United States Patent Application Publication US 2005/0130172 A1 - sequence listing, part 2

SEQ ID NO: 47 - DNA, 127567 bp, Homo sapiens
tatgtccaatgacactgagtgcaagaagggtagagacccagcatcttttactcacctctttaaactctggcttatatatatagcctggtgcttgacaagtattcatgataggggttaagctgagtatactgttgaataaaaccacaataattattggtcgcaattctcttgaatgtcttctccagagcactaagtagtgtaacttatcaagtttcctttcttgcattggctgttaggaagctcaaagccatatctgcaaacccttcatagcaagtctgtaaatcaacaagagcatttatttttgatcctgttctcatttgatgttccaaattttgttcttcaatcttcttttgttacatgttatttcatgctctcataatctattgtatatgtccttgtaagacactttaaacaacatccttgcttgaattaaataaattgcatagcctgtcgaatttctggcctgcaaagaaaaagaatgccctttccaacatcatggtatgtctccagagcaataaaccaccctcaggttacctgatttctggtgtccaaacccctttgggaataaggtttacatgactaggggtagttgagtggatgagaagctatttccttccaattaggtggttaggtggtggtggaggtggtgttctgaagtcagcagacagaactacaaaatctcacagaacgtgttttccctgctctgaccatgacctacggttactggggaaggaaactgcttccccaggtcaacccggcagcctcagtaggtgaggggcactgggtagaatacttggggtgccagggaggcattaatgcgagaggagtcaggtgctcagtttttattggagttgggagggcagccccacatcaggaagagaacctgtttctgcaggatggtccggggagaagggaggactccacccaggcttgtgtttgccctgctctgtgtattcagccagcaggctctgcacaaggaagcaaagtgcagggagccaggctccaccgacagccaggcactgggcagcacgcactggagacccaggaccctgtgcaggagcagctccgggtgacacgaggggactgaagatactcccacaggggctcagcaggtaactgctttcagatcctttaggcatggctggagggtttgctgtttgtggtagacggtgtcatatagaggccaggggtcagacagggtcaagtttgatcccagctctgccttctgttcactgtgtggccttggatatgtgtaagcctcagttccactatctgtgaaatggacccaaagatagcactcatctcaaagtttttagttttacaaggagcaaatgacaatgtggtcagtgttaggcgcatagccacataaataactcctatttggtggaactattgagggtcatttcaagcacaggacatggggagaagtcactggatggagggataggctgtgtgatttggggatccgtcagggcaagaatgccccatagccgagtggaatctgagccttcacctcaggcattgcctaaagaagtgggaggacaagaaaaaggacttgtggagtgccttttgtgaatcttatttaacgctcaagaccaccctatgaggcagctgctgattcaaatcctggcttcaggacccctgctgtttacatctccctctgaaccagtttcctgcctggaagagtcattgcgattagaatgcgggtgcgctgcagccacaccgccagatgccagccccagctccaccctgggctggctgggtgccctggagcaggttccctcagccctctgggcctcagtttcctcatctgtaaagtgaacctaataacagtactgagatcaaagggctgagaggactctactgcccgtaaatacctgtgcacttagtaactcttagctgtggttcttgttttcgctgttaccatcgtctccattttacaactaggaacatgaagctgggtgaagagggagctgcatctggttccaggtctcatggaaaggatgctgtggaactggagtccagtcgggcctgggatgagggtgcagccagtgagactctcaccttgggcacgaaatgtaagggatgccaaaaaactcagtcatggagataaacggtatgttaacacaacatttttaaaagtcagaattaatggcaagacacccgtgatgaacaaactatgaacatgttacagaaagataagatcaggaacagcggtaattttgattttcacaaatttcatgttaaaatactattcatctccatggctgagctttttggtgtcccttacattgttcccccggagtccagggcctgatccgcctcagcctcctggggatcctgagctgatcacagcagcttcaggccctgggtgtatatactcagggtatgtagagggtgcttcctcctaaataaagacaacagacggggcggggcatgctaaagtagtttctcatttaagtgagggtgggggaacaaaccaatgtcccaaatcacagaagattctttttttccaaagagttctggaacccagaagggttttgtttttaggaaaaaggcatgagctttgggaaaagcaatgggcccgttaaagcccatggattctgcctgctttaccatgacaagagatgtggagggagaggaattgaaaaaggctttgggttgggggcgggggtacctttgcaccttgcaggctcatctgtcctgctggagtattagatgtgacttgattgtctctgtgtctgcagcttctcttcaagccaagtgccctgccctgaagcagttcaggatttgagtgcctgagtcacgtggacccaggttcaaaccccaggtgtgcctccccgtagctttctgactgctactcttgggcaagtaggactagtaaggtgcctaccctcatggaggtgacgttcgtgagatgaggggatggcattgctcagccttggtttctttatctgtgcaatcagggaataatgggactctgcaagggaaaaggagacaatgtgtgtgaagtgcctggcaccagggtcagggcaagggtgaagccagtgagcacctgggggataaaatgcagggaggcgctcactctctgctgccgattctgcaccagagatggttgccttcctatattttgtgtcctgctatgctcaccctggtgctgcctggcacatagtaagcctccaattaaaattacctgcgattatcatgcacttaacaatgtttggtgcaataataagactatgagagcgagctctaagatttttaggattaccatccgtttgtgcaaacataattaagtactccgaaagcaaaacatcaatcaccaagcagccctaaaacatccaaggtgattttgatcaaggcacccctgcccctggacccacaaagtcccataccaggaatcagggcttgggcagttcagtgaggactggatttcagttccctgtgtccccttgtacaggaggcaacctgtagcactgtacctggcactcctgataatagctgccgtgttcctagcactgtgcgggcacacacatggagctgcaggactgtggggcaggcaaagcggggttgttctttcctcctgcaaggtctttactgatgttgggggcagagggctggttctgctgggtgtgccagcctggccatgttggcgtcaccctcagctgagcagtgaggagggcccctgggttacctacattccattgcattgatcgaaggtgttgcttgtttacttggtgactaattctgtcaccattccacccttcaaaaccaccccccctcccattcaacagtcgtctagctgcctgctggtgatgaagtttcagaagtgctttctccaggccagcttgcatggggtttggcgtttggcctgtttccaggaggagggcctattattaatctgtaactacaaggaggcgacatggaccatcaatcactgtgtaaaagaggagggatttgagggcagcttccaggaggccaattcactcatggatcagaacacagaactaactcaattataacaataataagataaatgaataatattagcaataactaacgtttactcacctgagtactgccaagccctggcgctaaatccttacagtgattatcagtgacccttcaattgttcaatcctcactttatttgatttatttatttacttattgagagagtttcattctgtcgctcaggctggagtgcagcggtgtgatctcggctcactgcaacctccgcttcctgggttcaagcgattctcctgcctcagcctcccaagtagctgggattacaggcattgtgcctccacatctggctaatttttgtatttttagtagagacagggttgcgccatgttggccaggatggtctcaaacacctgacctcaagtgatccacccacctcagcctcccaaactgctgggattacaggcatgagccacagcgcccggcctaatcctcactttagattgtaccatatatattccttgcctagttataattttctcattgcaagaatgaatatgcaggaaatattttctattccatgttctattatattacatataaatatttcataaaactataacatcacttatacagcagaagagacagtagaaagtatgaaaatagaaaagttaaaagtctaaactctggacttgagtttgcgagggttaagtcctcattctcccacttactagaagatgatctgtattagtcagcttgggctgtggtaaccaaaacaccacagactaggtggcttaaacaacagtcatttttgttttctcatagttctggaggctggaagtccaatatcaaggttctggccgatgcatttctggtgagaccactctttctggctagccaacagctgccttcttgctgtgtcctcacacggttgagagagagacagagagagctctttggtgtctctttttataatgacactaattctatcagatcaaggtccacccttctgatttcatttagccttgattccttagaggccacatttccaaatgcagtcatattgcacgttagggcttcaacacgaatccaacacgaattttggaaggacacatttcaatccatagcatgatcttaagtgaggagtttaagttccctgggctcaggttctgcatctgtaaaatggggacaataaaaatacctgcctcggccgggcccggtggctcacgcctgtaatcccagcactttgggaggccaaggcgggcggatcacgaggtcaggagatcgagaccatcctggctaacacggggaaaccccgtctctaccaaaaatacaaaaaattagccgggcgtggtggcaggcgcctgtagtcccagctactcgggagactgaggcaggagaatggtgtgaacccgggagacggagcttgcagtgagccgaaatggcgccactgcactccagcctgggcgacagagccagacttcgcctcaaaaaaaaaaaaagaaaaaaaatacctgcctcatcgggttctgataaggaagctgtgagttaacacagagaagcattcagagcaatggctggcataaggtaggcgctacaaaaatattaggtattactactgctaatgtatggtccattttatttactgcttatactaacagcttatctctattcctcagctgctgtgcaccagccacccagttatacaacacatgggccacacccttctaatcttcacaggagctccacgcaaggaatctattatggtccttccctccacccctcacttctcagacacggagccagggcttatgcatatggccagggtgagccagaggggagcccaggcagagggcttgcgctatttcaccaccacagacgaatttactcacgtgcttttcagaaatgcagatccctaggtgacacctggctacaaacacgaggagaacatccccaagtccaggcactagagcagggcccctcaatatcagcactagcgaccctcagcaaagcagacaattcttcgctgggggaagggggcggtccttggcattgcagggtatgtagcagcgtccccagcctctacccaccggataccagtgcacgccccccaaagctgaaccgtgactatcaaaactgcatgcaggcatttccaaatgccccttcggggccaaaatcgctcctgactccagaaacgctgtgctccacttattgtgagggagaaacaaagaacagcatatttccaaggagaaaacgtttagcaaagcaatgtaagtcatcgaggaataggacaagatatccaaaatatgaaatatagatatatagtcctggaaaattggtaccaaaataaaataccctaaacattgtaaatatgttatatatatagtgtgtgtgagatagatagataaagtagatgatagatagatagatagatagatagatagatagatagatagatagatagatgatagatagatactcatcataaagttgaaatattgtcagtcgaaccatcatgagttgagtttgggacatctatatcactaatagctactaggtgctcgccctgccaggcactttcccatcacatttaccccttcgcacggtaccacgatgtatcaggacatgccactcaacctctctgtgctccggcttctcataagacaactgggaaaataaaagtacctaactcagagagttgttgggaggaccaagagaggcaaatatatgcaaatcagaactgctcagcacagagaaaacactctaaatgtgtttattattgccaccattatgaatactgtcattttccacaagaaagatactttcagaagggtcaagtgctttgcccaaagcctcacgatcgtgggattttacggatgcctgtctcactccagatctcttgttctcaagaggagagaggggaaccccagagatgcaggagagcgagactgcggagggcagcctccacccacctccggtggggcatctgggcttgcttctgaataaccagctggaaagcctgccctgcccgccagttctgggggaagggaagctggaggcccaggacagttctcttgatttgcaagctcacgaaacagtgcgtcagcaaagcagtgcccctagaagggttgtgagtgtattcaggtgcctgggtgatggtggtctgtggactccgaagcctgagctattcctccgtctgagaatccgtgggtttggttgtctaggtcagggtaggcagcagccaggagagttctgaccccaggagacactcactcactcaccccagaaatatccaaaacaggggctctcagccatggaaatcacctagagatcttgaaagtaccccgatgcccagccccaccccagagaatctgctgtcatcagtttggcaggggcctgggcatggggatctcagaactctgtgggaggttctcacatgcagcccagtctgggcatgggcccccataacacaggcaggaggcggggaagtgaaggggctttctcatctgaacctccacaatcaacccccagtggcaaagtgccaaaccctcaaacacaagtctaatttcaaaaacaacacccctccacccaccatagcttcgtatgtttaatgtaaaataaggtcataaagacaaaacactcatataatcagttcatgaaagaaagggcattttaacaccccattcaaactttttctttttcaaaaatgaaagttagctctttcaattgtacgtttatcatgaaaaactctatctgatttatttttctcctttttgagaaatgggagaaaactattacagacaagaattactgtctgaactgccttgagcctcagttttcccatctattaaacggggatttaaaaaaaagtctccacccaagtcattctggtttgcccagggttttccaattttaacataagagtcctgtgtcctagagcatcctcactcctggaaaaagcttgaagatggtcaccatcacactattttctataggtgtctgatcatgagaatcactggggcatttgctaaaaatacaaattccagggccccaaattgacttttcggtgagaggatcacaggaatcagaaatgttgctggattcctcggtagagtctcactaccgggcacctgtgggagaaactggcttcaaagagcaaggatcatacccgtgagagtcctactcatgctaactcttgtgcagtcctctttatgtgccaggccctgttcagggcactttgcttatattcactggtttgactccataccagccccttgagatggaggctataattatccccatttttacagatgaggaaactgaggcccagcgaggctcagtgatgctcagggattccaaactccagagcccacattcctatcctatgtgctacactgatgtctacatagagcttcagcactgggctggcatacggcaagctctccatacaagtcatatatggttatcattattacgagttccaggacctttggggcactgaaggagttgccatcttcttgccaactgtgaacagaaggcttcattgcaaaacatcaaaatgcttctttcagccttcccagttgtttggacctagtcctgtaggctgaattcatttctgctaatattgacatcagccaatagatggcagtaaccttttgcttttgtcccacccagatgaatcctgttctttaaaaggttgatggacaggcaggagcaatttcacgacacatgcattatatctgctggtggagagtgacaatatctgaatccaggttatcactgaaaaagacacgccattagattttccttctttcagggcccttcaccttgaagtggccgagaggctacttagggtgtgcaatgatcagaataatgtaaccccaactctgtgggaagaaaaatcttctctcctacttctgtacaccatgcgtcttccagcaccaaggtttttcataacctcaagtgttgattcaaagtagctttgttaggattgaatttacattaaatagtaagagctttaaaataaagcttgtaatcctactgttaaaataattttaaaacttgttaaaagctgaatttagatagagatactttgtgtgtatatattcttgcatgtgtatatatgaacgtatgtgtttgcgcgtatccttgactgagacatttaacctgcgtgcctcagtttccacaccagcaaaattgaaataataatacctctgtcttgttgaattgctgcaaagagcaaattagttttactgcaaataaagctcctagaagtttctcaacagatggtaagcactcaccaaatgttgttattgttattactctatcatttctatgattttttagagttgttgtcattgtttttatacacagtaggctcaaatcctggtaaactttctgtaaagagccagatagtaaatatcttaggctttgcaggccataggtgtctgttgcaactactcagttctgccattatagcatgaaagccatcatagacaatatataaataaaagggcatgactatcttccagcaaaactttatttatggatgccaaaatttgactttcatataattttcatgtgtcacattctatgattcttctaatttttttccaaccatttataaatttaaaactcatttttagctcactggcctactaaaacaggcagtgagctgaatccagccaccgctgttctttgccaaccctggtcttgaggattcaatattatattattcataatgtcccattaacagacagaagcgatgatctgatgcaagtgtgtgagtcacggattttataaatagaaaatagcacaaaacaacaagtgtcctacatgttttaacagtgctcagctttattatgtggtatgatcagaagacatacaaaatccccagatttggttatgtattaaattcctgcaagagaacacatggtgagatccatgaccctttttttggcctcctcaatatctaattgctcaatgcgtctactaccagggaataaaaactcacaccaatggcgagagatccacaagaatccctggtgactcattgactcctttcagccagaaatcaaaagtcctaatttttattccgagagccactagagcagataagccagaagctaggtctttggagatgggctacattggaattacatgtgcaaaagaactttaggtggcaagacagcaggcctttggagtggctgcaagagtccttgtgtagggatcagatatactaggagtcaattcctcactggatgtttgcccttggtgggtcttggaggttccattcctcctttttaagggaagctagtaatatgcagaacattccggtggttaggagcacagccagactgtgtttgaatcttgctcattaactgggtgacctttggaaaatgatttaaccccctcgagtttcggctacctcatatgaagaatgaaatcatgatacctctatctcacaggagtgctataggactacatgagacaatacaggtgaagcactccaaaattagagcttggaattgagaacatgctaagtaatgatttgctattatcatcattattattatatatcatacattattataacgaagctcttcagaggtttggtgatgatgtggtcatgtacctaggtctgtgcctcatatgtgagagatgctatcaatcgttattccctccattgactaacaataattaagctcccagtaaatgcaaacacactgctaagattaggagatacaaaattgggtgaaggtagacactgcctttgacgtcagggtgcttacaatttcttgtggaagggagacataaattaaatattcaactttgcccttcacctatgggacaataaccacattaacagtcatttcagaaccatcctacccagcagtgccacaacctgccatctcccatatgatcccatctcacgtaatgttattaattacttttattcgaccaggcgcagtggctcatgcctgtaatcccaacactttgggaggccaaggcgggtggatcacatgaggccaggcactcgagaccagtctggccaacatggtgaaaacccatctctactaaaaatacaaaaaaaaaaaaaaatagtctggtgttgtgccacgcacctgttatcccagctactcaggaggctgaggcaggagaattgcttaaacccagaaggcggaggttgcagtgagccgagattgcaccactgcactccatcctgggcaacagagagagactccgtctcaaaaaaaaattacttttattcataacttagaaccctatgcatttttgtttaataagcagatatgttttgcttaacatgagctagacattgttctaaccacgtcacaagcattaactcattgggtccttatagcagtcttatgaggcacagagaggctaattaactctcccaaggacacacagctacaaggggcagagagaggattcatgcccaggcagtcttgctctagagtctgtggtcataaccactgtgccatgctgccttgaactatcagaaacaacctcgtttgtggatttattgttcctatgttaactctctccctgtgcaccatacttcagctccatgaagtcagagggccttgcctgtttaatttacagctgtaaccctagtgcccagcccagcaacaggtgcagagctgtgctcaatagacacagtcatacactgcataatgataccttagtcaatgatggaccacatatacttagtggtcacatgacattataatactatgtatttactggactttttctgtttcgatatgtttaggtacacaaatacttcccagtgtgtcacaatttcccagagtgttcaatgtggttgcgtgctgtgcaagttagtggcctaggaacgataggttataccatacagcctaggagtgtagtaggctatactatctatgatgttcatacaaccatgaaatcatctaatgatgcatttctcagaacattttctcgcccttaagtgacacatgaccatatgtgctaaatcagtgaaagcatgaatatatacccaagtaagtatataattacaagccctgctaaatgctatgaaaaaaaaaaggccgtagtgtaaaaggttttaataggggaattaatttagtttgagaatcagaaaaaaatattattatttcaattaccctcattctaaaatcctaatagctgtgactttaactaaaagagaaaaaaatgctatctacactgaatacacttttcatgatgataaatattttcccctagcaatgaaatgcaactgaaaattatgactgcatttaactttaattctgttgaatacatgagtccaaaatctcctttctatttcccaaaataaatataagcaatgatatagtttggttgtgtctctacgtaaaatcttaccttgaattgtaatcctcataatccccacgtcaaggatgggaccaggtggaggtaattggatcatgggggcgggttcctccacgctgttctcgtgatactgagtgagtctcgcgagatctgatggttttataagcatctggcatttccccagctcgcactcattcttctggtgtcctgtggagaggtgtcttctgccacgattgtaagtttcctgcggtctccccagccatgcggaaccatgagtcaattcaacctcttttctttataaattacccagtctcgggtatttcttcatagcagtgtgagaacggactaatacaagcaatttgttctgatctcagctgatgataatacagccatgggcggcttgtcaggcctctgcaccttagtagcacatgtagcttcgtttggttttgatttctttctctcttcctctctttctctccattataggagcaatgggtaaccaaatgagtgttccccaaagagttgaagaccaagagaatgaaccagaagcagagacttaccaggtagtgtagtaaccattacaggggcatcagcagaaaaaaaaaaaaaaaaaaaagaacttcctgtatttgacaagtgtgttgactgaagtcctggctgctgattgattgtgtctgtgtgtgcaagacagtggagcgaggataacctaaaaggtgtcagaatcagcatattaaattcgtgctccagccctgacttgacaaatgcccatttgagcctggggtcccctccgtgcgacgggtcagagcttcctgtgagtgtggggtcccctgagctgaggcaccatggtgtgctctcataataactggagtccactcttggagtgagttattttggttctccaaggcatgatagaaaactggggagtttctagaaacacagcctttaagttaagtttaattttttgtgagacacccttgtatcttagaggttcttccttgagttcttctgattttcccccgaagatttgtctcacaatgccacgtgctctgtttcaggacaacgcgtctgctctgaacggggttccagtggtggtgtcgacccacacagttcagcacttagaggaaggtcagtgctactctgggaagggcatctaccctctcgtggggaaggggggtctgcagatgctgtttacggtgaaaaaaaaaaaaaaatgaaagggtcgaagccgcaggctcagtttgaaaatacttgcgtttgttccttgggctaccatgccctggtggcttaagcaacagaaatgtattgtctcacagtgctgaaggccaaaagttcaaaataaagttgtcagcagaattggttccttctgcgggtcatcagggagaacgtgttccacgcccctctcattggcttgtagatatggccatctcctccctgcatcttcatgtcatcttccctctatgcatgtctaaatttccccttcatcatatggaagcagtcatgttggattagggcccaccctaataacctcatcttaacttgatcatctgcaaagatcctgtttccaaataaggtcacattcacagggggttaggacttcagcatctttgggggcaatatgattcagccataacaacagatctcttctgagtgtgtgtgacagctggaggagactgaggagttacagcagataagataaaagcaatagagtgaaaacatgaagcttggcagacctaggttgcaatctctgccctgcagattactggctgtgtgacctggaacaaggcatctgcttttctcagcctcagttttctcatctgtaaaatggggataaaagtacctacctcacagaattgctatcaggattaaaggaggttgtttattaaacatttaacatagtctccagcgatatttcatatattccttttccccaaatgtgcacagcctctgccattatcagcacttaggaattcctcagaagctgataaattataaaagacaacagaattgtgtccacatgagggcagtgttaaaactgaggcatatacttacctatttgactttatcctggagtataagactgtatattcaatgcttccagggtggtcaggctctactatgtgacggatacatataaattatgtaagaagaggtagtatagcccagtagttgagggtaagaattctgcaatcagattgctagctttgccacgtactagctgtgtgaccttgagcaagttacataacctctctgaacctctggctcctcatctgtacagtgggaataatgacagtacttatagcataagcatctgatataatgaaagcacatattacagtgcctgactgataataagtgctcctatcattatcatattatggttatggttgttttctttcacatgtaagattctgggcttcagtttcctttcctgagtaatgaaggaggtatattacagcattggttccaaagcttttagaatttcctagggaatgtattaaaaattccatgccctagtctcatcccgtagctgctattcagaataccctaaagttggggactgagaacctgaactattgggggctctgtagaaggttcttttaaaaaaaaatcatagctttagggtacaagtggtttttggttacatggatgtgattatatagtggcaaagtctgggcttttaatgtacctgtcacctgagtagtatacattgtacccaataagtaactttcaccctcattccactcccaccctcccttctttggagtctccaatatccattatgctaccctacgccccggtatacacatggcttagctcccactttcaagtgagaacatgcagtatttggtttctgtccttaagttgcttcacttaggataatggcctccagttccatccacgttgctgcaaaagacattattttgttatttttatggttgagtagtattccatggtgtgtgtgtgtgtgtgtatgtgtatatatatattcaacacatccaccaccatacatagctacttttttgtttttgttgtagggtgtggtgaggacccttacaatctactcttagcaaatttcaagtaagcaaaacagtattattaacttatatttaccatgcaacttattcatcttatgagtgaaagtatgtaccttttgaccaaaattttccctggaccttagcccctgataatcaccattttactctctgcttctatgaattcaacttttttagattccacataaaagtgagatcatatagtatttgtctttctgtgtctagcttatttcacttatcctaaagtcctccaggttcatccatgttgtttcaaatgccaatatttccttcttttgtatgattgaataactattctgttgtgtgtgtgtatttacacacatgtatatgtatatgtgtgtgtccatatatatatttcctttttccattcatccactgatggacacataggtcattcccatatcttggctattgtgaataatgctgcaatgaacctggggctacagctaccactttgagacccttctttcacttttttagatatacccagaagtggattgctgaatcatatggtagttgatatggttttgctctgtgtccccacccaaatctcatttttaattgtactcccataattcccatgtgttgtgggagggacccagtgggagataattttaatcatgggggcagtttcccccatactgttttcatggtagtgaataagtctcatgagatctgatggttttatcggaggtttccacttttgcatcatcctcattttctcttgccaccaccatgtaagaagtacctttcacctcccgccatgattctgaggcctccccagccatatggatctgtaagtccaattcaacctctttttcttcctagtctcagatatgtctttatcagcagtgtgaaaaacagactaatatagtagttttattttttaactttcttaggaacttccatactatttcccataatgactacgccagtttacattctcattttgtcccaatttttaatcgggttgtttgttttcaattatcttcttatgtttaatatggagtgcaagggcaaggaatgaatagggaaaaattgttgggattgagaaagcctcttctctatccttctctccatcctccatctcactttctcttttctttcctctctcacctgtaatatatttatgttttttatatattatgcatgtgtgttaacatatatgagatacacatatgcataggtatatctcatatatgtgtatgtctcacatacatgtatgcacatatttgagatatacatatatatatgcatatttcatatatatgtatgtatattacaaagatgttcccaaaaggagggaaataggtttctcttgaaacgtaggacaacagtctgagacagcagttgccgtgtgaacacctgcacatgacgagggaaaagaaacacacatttctgagtcatgggttatttgtacctcgccctcacacctggcagtcttgctgtcaacatcctcagctactgctggagagtttgtaaagagtcccagttaatcccgaggtagcaattttgcctgttattcattgacatcttcaacctgtgaaacttgctttagagtgattaccccttttaagcttattgttgtcctcatgcagttttcctaaggttattagctaagttataattttcagtgcagttttaaggggtataaaagtgaaattctgggtgaccctttcttgtccttcagagagaattatttgaccatgtcttttgatgcacatttctattgatctctattggtgtatacatatatgtatagaggtatagaaaagtcattggaaaaatatgtaaatagaaatctagttgactgtttggtttctttttatctatacttttcctacttacaaaaattacaattaaaacaattcattggtgatacggtttggctctgtccccacccaaatctcatcttgaactgtagctcccataatccccacgtgtcatgggagggacccagtaggaggtaattgaatcataggggcatgtttttcccatgctgttctcatgatagtgaataagtctcacgagatttgatggttttataaaagggagttccactgcatatgctctcttgcctgctgccatgtaagacatccctttgctcttccttcgtcatctgccatgattgtgaggtctccccagccatgtggagctgtaagtccattaaacctctttcctttataaattacccagtctcaggtatgtctttattagtagcctgagaacagactaataccattggcatccaataatatttcctatgaaggcttatttagaagcagcaatggtaccatggctaagcaaacagccaaagaggctggaatgctacattgaatcatggctccaatatgtgagcttgggcaggtttctgagcttctttgttctgtcatctgtaaaatgggaattataataatgataggaccaaagcttctaagttattgtacggtttaaataagttgatactcctaaaactctcagaacagtgtctggcatgtggtaaacacataaggaaagttattctgtcttggatttaatgtcaattgacataaagactgccattgctatttgaagttaactgtattatttctgcctaacatatcttttggaactttaagatcaaaagttaaaactagtctttcctacatcccttatgccttgtaagtcttttatttgtctttcgatacaatgtgagagatatcaatcagggaaaatacctcttttaaactaaaacatgaaattacattctgtatcctcctagaaagaaatgtatcgtgtagagtgctttttcttagtaagagcaaaccaccatgggaatttgatatcaaacaaacattaagtaatacaatccatgtggattggagatctttctcaaaagtttggtattattattcatcttaagtaacaatatattaaaaaatcaaaatgtctcagtttttgcttatgttatatttctagcttaactcaccaattttagatgttatttgagtgtcccgttttggagtaggttgctaatgatgttaaaacaacataccatgtgatttacctgcaatgccactaagacaaacacatttgcttgcaaactttgggtgagaggcttatgtgcttgttctgccaaaatgcaattgtttaaattagtatcctcaatttgtctccatccttttcaaatagttgttttatttgaacccaaaaatatcttgagaattattagagcaaaatatctatcattagaagaacggataatccaattagggtatatccgtacaatggtctcgtaatctgtttgtactgctataacaaaatgccatagatctggtaatttataaaaagtagaaatttttttctcttagttctagaggctgggaagtccaggatcaaagcaccagcaggttcagtgtctggtgagggccctgttctctacttccaagatggcgccttgctgtgcccaccagaggggaggaatgctgtgtcctcagatggcagacacgacagaagggcaggaaagggactaactagttccctcaagtccgtttataaagtctataattccatttatgtggtctttgccctctaaactcaatcacctccttaaggcctcacctcttaatatgatcacatggtaactaagtttcaacatatgaattttgggggacacattcaggctatagcagatggtatactccttagcaataaataagaaggaactactgatcaatgcaacagcatggatgaatctcaacattattatactacgaaaaagaagccagacacaaaaggcaacatactacatgattccacttatataaaattctagaaagggcacaaatgtagtgacagaaagtagatcagtggttgctaggggctggggctggttgagacactcactgcagaggggcatcgagaaactttgcaatgatggagaagctttataccttcatcatggtggaggctacatgactgcatattttgtcaaaatgcactgaattgtgctattaaagttggtggattttattgtatgtgaattatacttcaatcagataaatctgatttttgtaaatgctgttaaggtacaatgaagttttttaaaaatcagcatagttggctgggtgcagtggctcacgcgtgtaatcccagcacttttggaggccgagacaggtggatcacctgaggttgggagtttgagaccagcctggccaacgtggtgaaaccccgtctctactaaaaatacaaaaattagctgggcgtggtgacacacgtctgtaatcccagctactctggaggttgaggaaggagaatctcttgaacccagggaggcagaggttgcagtgagccaagatcgtgccacggcactccagcctaggagacagacagagacctcatctcaacaacaacaacaacaacaacaacaacaaacaaaaaaaaaaccagcatagtcaaaagcagctcacatcaactaaagaaaaaaaataaattcaataaagaatggggggaaagatcatttgctatgttagaagggtgtcttctgctcaaccagttcttttgcttcctctggattcatcactgggggcaggaggagtctgcacaaaagaaagtaatgtgatggggaggtgttttgtgaagagatgacatctcttagctattttgtcagcccattcctcccatatactgcccaagagagggagacctcaggagactgtcatctggtacctcttcacctccccccaatacatgtggtatgttaatttattgcatctcattgaatcagacaacttcaagtaggaccacacttcacagttgagcacatcaccctcctgttgcgtacagagatcccctgttttgttcacatgcaaactttggtggattgtgaaggagaaactcaatctcccatggctcagagatcaggcagttagaaaggacagaacatttagtcccacacaccactgtcaggccacacaaaattaatcatcctagaaagagaatatgctgttccatttagtgaaacattaccacggaggtgccacaacccctattaatatgcaacaatcactttcccaccaataagaaaggagaatgacggctgctccttacctttttcactcaaaagctaaaaagagaagagaaagcctaagcctagagattctgggaaggaaatacctaaaaaggctttttaccaccttgagaatatagttgttttctagtttgtttctttgcaaaagacccacctaaagagatagatggccagtattagcataaaaccaagctctgtgagagtgcagctaatgctgatgtgatttagttaacatttgttcttcaataacaaaaacatagttttaaaaggcacatatgttctcaagggggaccccagagtcatcttctcactcaagcagagctgaggtgttggggagggacgcaaggggaggcagagcgtggacggccagggcaaagaaggcaggtgggcaagtgagatgacacgttggcctcgcaggtgacatccaggactagacgaggtaatgcattaagagctaagcgcatcccattcatgaaattgtaatatcactgacgtgtatctgtgtatgtactgtatctgtgctctatacgtaaaaagaatgagttttgttcatcctctcccatagaaccattttcgccctcttgggattaataccatccccactgagagtgcatacactagggagtgcaacttacttatgcaatttcttcatgtatgagaccacagagtattatagctaagagtccagcacaaggcacggtgcccttcctcccatcaaatgctcacatctaatcttcagcacctatgagtatgtgaccttacatggcaaaaggacttggcagatgtgactaaggaatgtgagatgatgatattatcctggattatccaggtggacccagtgtgatcacaagggtcttcatgagagggaggcagaagggttggagtaggaaaaggtgtgattatgggagcagatgtcacaaagagagagaggcttaaagatgctacactgctggactggaagctggagaatggagccacaagccaaggaatgtaggtgacctctggataccagagaaaagaaggaaatagattctcccctacagcttctagaagctgacccatttttgacctacaggcttcagaactgtaatatatttgtgctggggcatttgggataattcattacagcaatcggaaatggaaccatatcctctcaagcattggactctaacagacccaagcataggttttggctctgccactcactagctgtacaaccttggcaaggaagtttattctgagtctcatctgtaaaactggaataatagtatgaactttgtaggggagctctaaaaacagcagctggcacaagataaaagtgctgaaataaaggagtccgggcaaaactaaaagtagaggctattgggatgggtgcagtggctcacgcctaaaatcccagcactctgggaggctgaggtgggaggattgcttgagtccaggagtttgagttcagcctgggcaacatagagaccccatctctatttaaaaaaaaaaaaaaagtagaggctattttcatacttattctttaccattggctttccctgacatatcacctgaccagattttcccacctgcatattatttatgcctaaaacttcatagatctttggagaaataaaaatgcctgatttttggccttctttgattcctttctagcaaatttatgacattagttctcaggcctcactgctaacgtatggcagagactaagacatgccttccctgccaggacacgtcattttccagaaacagaaggaatgtttgacctggataaaaggtttctaaaattagtattttccttttttgctcctagtcattgttcctaaaaagaatagactaattttgcttttcttaaaaaaaagatgtaagtggaatcattttattggattgaaaattctaacttgagaaaagtgctcctgccaataacataatgagtgagaagagaagcatttgccaatatcaatgcctagtcaaagtggaatgggagacctgatgccaaaaagcatagctccctgatgtagtaaaaaatataggcaacagcacttgtctggaagggagcaaatacatgtgttctcctagtgtccactatttccctccaattgatcttattttttatctgtttccaaactcaagtaaaagtccctgagagcaggacgcttgccatcctttcttgttatgagggtcccagagctcagcacaaggcctgagatacactaaagacttagaaatggttgatcaatgaacagtggcatattaagccagtggtagcagaggaataaaataataaggccgaagggcaagttcccagactctgctgcactcagcttcaaggaatgcaaccctggataagtaaatagcacttttaatttgagcaagaagtctggaggtggcagttctaaatttggtacagcagtctgacagcctcatcaaaacaccaagtacatgagccaattgtgtcactcctgctcacaagatggctgtcacagaaccaaacatcacatctctacatcatgggatccaaaagcaggagaggaaaggccaaactttgccaccatttttttttctccttgtattatgcgaggaaggaggatccttccctgaagcctctgccaccatgtaggcatcctcttattggccagagctacatcacatggcccataccagctgcatgggatactgggaatcaagcatctctttgagatgcaagtgaataataataatacatggttggggctggagacgattggctattgggcaggccacaaacagtgtctgccagaggtgattccaaagaattattagaattgagcaaaggaaagtagttcatatcctcactctggcctttcaaaagacattaaggagatctaactcacatcctaaacaccacttttctctctcctcacattgctatatgtctctcactcaagaggctccctatcctcaactctccaccttgaaactctgtgagacaccccatcctcatgaggtaggggaatagggtctggaggcggggaagctaaggacttcctagaactaaatcaagcagaaaacccacaactttctatgctcaactatggatgtaactgcacttcagctatggcaggaaatatcctcttcatttgcatagggtgtacaccaagtaaataactttgtaacttcccttcatcctcttcatttacatagggcatacaccaagtaaccaatgggaaaccactagagggtatttaaaccccagaaatttctgtaaccagcactcttgagccacttgctcaaacctgctcccactctgtggagtgtactttcatttctataaatctgtgctttcattgctttgtgcattttgtccaatttttttgttcaaaacaccaagaacctggacaactctccactggtaacactcacaggcactctcctttcttctttccctccattgcactgtatcaccactgagtctaaagtaataacagagagttctgaacactggctctcccagatggcccaacagctccttgtgcctctgtcttccttgggagtgagcaagagccctggggaaatctcatccttctcaaactcagtgctttttctcaccaaaaagtctagtggagaattcctgttagataaaattatcttccctattgcattattgtggttgatagtctccaaagatgcacacatacaacccaccacgcaataacccatgcttcctggtattcacacccctgtgtagtcccctctgggctggtcctatataaccaacagtatgtagtagaagggatgacacaggactttcaagaagccttttaagaagactcggagcttctgccttgtctcttgcaacactagctctgagaaaggctagacacaatatcagaagttctaccctgagattgccatgctgtgagagagcccaagctagtcacatgaagaagccatgaggcaagagagaggtacccagccagttcccaaatattccagccatcccagtccaggaaccagacctgtgattaaagaagacatcatgggcatttcagctaatagatgccgtatgaggaaggaccataggaaccagcccatagccagaactaaagctccagacatatgtccctgtgtgagccgtcccagccatcttcatcctttcaaggcaccccagctgtggctccagacatcatagagcagaaataagctgatcctatcctctctctgcctgaattctttttttttttttttgagacagagtctcactctgtcacccaggctggagtgcagtggcacgatcttggcttgctgcaacctccacgtcccagatcaagtgattctcctgcctcagcctcttgtatagctgggattacaggcacgtgccaccatgtctggctaatttttgtatttttagtacagactggttttcaccatgttggccaggctggtctggaactccttgacttcaggtgatctgcccatctcagcctcccaaagtgctagaattacaggtatgagccactgcacctggcatctgcctgaattcttttttttttttttttttttgagatggagtctcgcgctgtccaccaggctggagtgcagtggcatgatcttggctcactgcaacctctgccttccagcttcaagtgattctcctgcctcagcctcccaagtagctgggattacaggtgcccgccaccacacccagctaatcttctgtatttttagtacagacggggttccactatgttgggcaggctggtctcaaactcctgacctcgtgatccacccaccttggcctcccaaagtgctgggattacaggcatgagccaccgcacccggccctgaattcttaatgcatggaatcatgacctaataaaatggtggttaagtcaatcattttggggatgcttgttacacagccatagataactgaaataactattagtatgcattttaattctttgtattttatttttacatgcatatatacttacatacataccaattaacatatatgaataaatgcaatcatattttctgttattgttgttttggtgaaacctgtctttttctttttcttattggcttcttcctcatctcacatcttccctaccccctccaaggacacccaagctaacaacctaatatttcttctttcatatttttctctttgttctatactttgtaaaagacaaatctgagacacaataaaatttcaaagagtgtatctgaatagaggcaattcattaatttgagaaaagaaaaccaaaagggaattagtgttttgatgacaaagcattacatgccagaattaagggaaaatgcagaggcataatataaaatgtgtttgatgtgttacaattacacagttgccttatttgatcatctcattggaaggtacccagttatataattttaagtttgttgactgtttctgattggttgagctcaagttctgtttttctttagcataggcatttacaagaaacagttcgagttgttttgcttatgtctgcaaatcaagcaaggtttagctcatttatgtggtctaacaggctttgtccgctcagggattcttcaggtctggtctttattttaatttactttaactagccccatacagacatttcccagcacatccattaatagtgtttgtttttttttaattgtaataatcttccccatctcaactccaaattcaactggtataactttaattcattttttttaaagctacaatgtacttcaaggtatagacatactataattcattcagccattatgctaattttgggcattcagtttttttcttatttttctctgacaatttttacctgggcgtaagttttttgttttgttttgttttttttttttttttgagatgaggtcttgctctgtcacccagctggagtgcaatggcatgatcatcactcactgcagccttgacctccagggctcaaggaatcctcttgcctcagcctcctgtgtagctgggatcacaggcacacaccaccacacctggctaattttttagtttttttgtaaagatgaggtctccctttgttatccaggctggtctcaaactcctgggctcaagtgactgtccctccttggcctcccacattgctgggattagaggcacgagtcacagcactcctctggcataagtatttttaaactcgtaatgtttatccaatattaaaagttatttggaatacacttagaaaatttctttttttctttttttttttgagacagagtctccttccgctgcccaagctggagtgcagtggtatgatctcagctcactgcaacctccgcctcctgggttcaagcgattgtcatgcctcagcctccctagtagctgagattacaggcgcgtgccaccgcatctggctaatttttgtatttttagtagagatggggttgcactgtgttggccaggctggtctcaaactcctgacctcaggtgatctgcccaccttggcctcccaaagtgctgggattataggcatgagccaccgcgcccggccggaaaatttcttcttcacatttttcaaaaataaaacattggcatttctgttttaaatttttaaggacttttttgtacttaccatgacagatactctggacacaacttactgttccatgactcatacagtctgattttaactgtcatgcaactgctgttgagtaatatgcaactttctctttgcctctttggatggagaagaaaacaaggcagcacagttgggctccaaagataaaaacatgggcagggtttcaagatcactcatctctgtcttggaggatagaccaagagagataggacagaccaagagacaacatgaaaaaaacatgaaaagagaaacagcattgagaaataacaacagctgcactcaattcttttcctcaaggtgcattttaaccagatcttgaaatagaataaacacacctacaattctaatcctagagtggacatttttttaaaatcagcttttcatatccttttaccacaccaaaaagaacttaccaacaattttcatttaacaaaaataaaaataatcagcgagatcaaagaaatggtaaggtgcgcttcaagtttctggaagtttatcaataaaagcagcatactgtattagtgggtaggatccattatatgcaaagcataccccaaagagcaaatgtttctgggaacaagaactgaaaaatgtaagcagagcctgcctccttgtgtgggtgcaatagcagtgcccaatagcagtgactcgcagagttgtccctgggccagcagcatcacatcacctgggtaccggttagatgtgcagtttctgtagccggagcccagacctcctgagtcagaaacacccccttccctgggggtggggcccagctatctgttcccacaacccctcccgggtattcttgcactagctcaagtctgaggaccatgtaagaactggctcaaggctctgaatgaaatggagtttgcagggaactggaaagcgtccttgtttatagggctccacacagcttcaaggatggctgccctgggaaaccctgagccaataataagatatttcaataacagcctgattttaggacttttaaatgaaatttcccaattcaaaaaaatataaacactgtgttggccaaaccatcagcagacctcatagttggcaacctccgatagtgtgaggtttatttttttccctacctcaaatccctctaaaaagatggctataaaaaaaatcatcgtcatcatcatcatcatcatcatcatcatcatcaagttatcatagcttcaagcaatgaaacattgaaatcctgtaaccaatttcagctgtgcttgcagatttgtgggctctccaggcatcctgcccgtcacaatgtgcatcccatctgtgttttccacagagagggacagtggtgggatgttaccagtggctggccccctttgcagctttctgtcacgtagtcttaagccagtaagttggctatgtggttaattcatgagtcctcttaaaaatgccttctgagagttacatcagctccaggtgatataaaaagaaaagctggattttctgaatttgccaagcagaggctcagactctgcaacatggagatgtccctaaggccatgacactctcagcaagcagggcccacctggcctatcagcccctccattcaaagctgatgctcattggttagaacctgcctcgctgctgggccagccctaggcaaattgggaaataggtcaagtgttcagtccactttgaatcccacctctcatttctagttccctactttcattttttcttttcattatttcttcatttcttaatggatggggtaggtgcatacacatagcaaacattctgagcgatatacataataagataaggcagagaaaaaatccccaccctaactctgatggctccccaagccccatcccaaatttccttccttagaagtaaatactttacagtttcttatatccagaggtatcccaggcatgtctatttataagttgtctcctcaacctcccgacaccattttttaaaaacaaatggaaacatactgtacgtgctgttgggcacagctttttctttccttactaaaattccttggggaattttaatgcctgtggaatatttcattgtagggacatatgattatttatttttttaaacttttatctaggttcagattacatgtgcaggtttgttataaggtaaactcatgtcatgggggtttgttgtacagattattttttcacccgggtactaagcctagtacccactagttattttttctgatcgacttcctcctcccaccctcaagtaggctcagtgcctgtcattcccctctttgtgtccctgtgtcctcaaggacatatgataatttatttaaccaggtttctactaataagcgtttaggtcatttccagttttttgccacaactacagtagtccagcaaatagttccatacgtaagcctttgtacccctatgcaattttatttctaggataacattttagaagtggaagttagacttacagtgtttgtgaaattttaagtattaatagatattactgagctattttccaaagaagtggccaaattacactcccaccgacgatctatatggctgttcttttttttttttttttttttttgggggagacagagtctcactctgaactctgttgcccaggttagagtgcagtggcacaatctcggctcactgcaacctctgcctcccaggttcaaatgattctcctgccaccgcctcccaagtagctgagattacaggcgcccgccactacgcccagctattttttggtgttttgttttgttttgttttttagcagagacagtgtttcaccatgttggccaggctggtcttgaactccttacctcatgatttgcccacctcggcctcccaaagtgctaggattacaggcgttaagccaccgtacccagccacagctgctctttttttatacgctttccactggggtcatcaattgtctcctttttaaccaatttggcaagggaaagccaagtgtcataattttattgtgcttttattttactatttatgaggccaaacatcttttcttctgcttaaaagctggctgcatgtcttttcctgtgaactcttcactcctatttgttgtctgtttcctacccccaccccttggtgctgtgttgctgtttatttatctaattcttctttttacaaattgaggtacaattcacctaccataaaattcaccttttagagtgacaattccgtgattttaaggatatttgcaccatgtgtgcaatcgttccacgtctaattccagaacatcgtcattactccaaaacaaaactccctaccctttagcgctgagttttttccctattcccagccactggcaaccactaatctgttttctgcctctatggatttgcctattctagacactttatataaatggaatcatacaatattttgctttttgtgtctggcgtctttcacttagtaccatgcttccaagtataaagcatgatataacatggatcggtgctttgtttcttcttatggctgattaatactctattatatgcaaatgctagatttcctttttccaattgatggatatttgggttgtttccacttttcagctattatgaaaatgctgctatggacatttgtgtacaagtttttgtgtggccatatgttttcattttcttgcttacctaggaatggaattgctgggtcttagggtaactccatgtttaacttttccaggaactgttaaactgctttccaaagcagctgcaccatgtcacattcctaccagcaatgcatgagcattccgattttttcacatcttccctaccactggttattgtctctctgattatggccatcctcgtgggtgtgaagacgtatcatgctgtggctttgactgcacttccctaatgagatgacattaggcatctttttatgagttccttggccattagtatatctgctccaaagaaaacactatcatcctgatttggctgctttgctgcaccctgagcctcttgtctctgtttcctggctaatttttccagagtctcaaagtaataatagtcaccctttggcaatcttctatgtgtcctgaactcaacctgccccacaaccgtatctccacagctgacccgtggtgtcctaacaactgaagccactgatagaataataggccacctcccctggtaagctgcttaccacttaaaaggtgcttgagacactcattgctgctggaaatgtgaatctgtagagcctttttaagaaaataatatggcagtgtctgtttttcaaaactaaatgcatattgatttgagggtaacacttctacatctgtgcctctattctatagaaatatagcaccagtttaggatttttgaacacgaaagtttattccactatagtggaaatggaaaaaacaatgtggaaactaccaggatattcattgattaggcaatggtttaaatatcttttggtatatccatactgaggaatattatgcagctattttagaagataagatagctttggagctattgactgtgaagaccaactataatgtacaaaagtcatcagaaaatatgtctaatgtgatccaatttctataaaaacaacaaggacagatacagtccctgtatatgtgtatctgggatgcttatacgtgtttgtgtgagtataaacaaagttcaatatgccacatcaggttgcagatgttatttatctggcaatgagggtggaggatagagacaggaaaaacaaagggttcagagagattaattattttggttgtaaacacgggttaaatgtacattattatcagatttataaaaaaaatcaaatgaaacatctgatttgtctttaaatgaaaatatatgctcatgttggagcaaaggctggttttgcatttgaatgagctttgcatattccagagttttgtagcacatgaatgacaggaaatatatgattaaagagaagagtggaaatcttgagtgtcactgtcagtcttgccccacagtatctgatcatcactgttgcttttagaggatgttttctgaagagcatgggggtagtagtacctttgcctacattcctttggaatccagcatttccatcactaaatgtccagacatgttgtataaagctgatagtcaagaattctaccatgatgttccaaaatcccatccttttcttttatttatgctagaatttcttggcaaagacattctggctttttaatgtacagatgaaaagcatgaaatgcgatcattcagtgaaagtttcaaatctaatctaacgtcttcctccaagtcataagtatctgccacgtgtaccctgactttacgacctttaaaacaacaaatgcatttgcacaacatagaaagccgcagttgtttgaagtgtcatttgactcttgcagcatgaccattgaagggtcatttttgcataattttttgaggtcttcataaagttttgagttttcccaaaggcctaacataatcttttgatattctaatataactcttttgaagaacttactgtgttgtgttgtccacttttccttcttcggtgatctgtgttaactttgccagatccttgtccaaccacggtcatgtgtgtgatctgagcagctcaccaatgttacaagactctataaacccctgcatcttttgcaagatgtacaatttccctttgcaattagtgtgtatatgtccactttatcctgaatcctgacagatcaggatattgatgcataggacggtgttgcttgcataggaagagatgattcggcggtgaataatgttcatacatggacactttgtaaataaaattataatgatagttcctgctttcccctttaaactgaaagcttggaggatttggataatgtattgtcagaaaaagaaatttcatccagcacaacattagtctcttctcagagactcagtttcccaacctgttcattggtgtgccctactacagttacaatcatggtcctttgtggagtgtttgctaggctgtgccccaagctctgtgcttgctgcttcacccatgtttcctggcttaatcctagtgtctagcactatgggaactggaatccagctgtaagcagagcagaccaagtccgggtccacttggggcttacaggtcgtggagaggaaacaagtgaagaagaaattaatgggatcatttcagagagtgatgaatcctctgtggagtctagagaataaacaggagtaagcaggaggggttacttcagatggaggagtcagggaaggcctgacataacctaagtcttgaatgataagaaggtaaccataggaagatcttagcgaaaatatttccagattgaaagaataactagtggtgagggctgcaggtggaaacatgttggtatgttgagaggtgtgaggaaaaacatagtacgagctgaagttctggagggtgtggcccatagtagagagtttggattttgttttaattttgtgaggcccttctttggatggttttatgcaaatgaatgacataacctaatttttatttaaaaccaaaaatatatagatatcaatgtttcccagatgtgagaaaacagggtttttttccccctcttgtacatagttttttcttgggtatccactaattctattaactaaactttgtctactttgttcatcttccctcccttctatttcttctttctcttctgttcctgctttggttaccacatgttgttgggagtttgaactttggaatcaggcaaatgtgggttcaaatactaaatctaccagtcattagctggacaacattagaaaactgacttgacttttcagagcctcagtttcacgacctgtaaaatgggagtgatgatagtacctaacttgtagatttgctgttatacttaaataaaatgtttcttgttatagacatttatccaaataaataaataataaataaacaaatgtcatacataaataaaatgcctcttgttacacacatttatcctaatgctgggaaacagtcaatgaatgttagctattgtttttacagcttgatgtcgttaggctttttgtccccacccaaatctcatctggaatttaatccccataatccccacgtgtcaagggagagaccaggtggaggtgattggatcatggggacagtttcctccatgctgttctcataaaagtaagtgagttctcacaagacctgatggtttcataaggagctcttccctgttcatttggcacttctttctgctgccttgtgaagaaaggtccttgctccccctttgacttccaccatgattgtaagtttcctgaggccttccctgccatgctgaactgtgagtcaattaaacctctttcctttataaatcacccagtcttgggcagctctttatagcagtatggaaatagactaatacacagctgtagcaagtgaaagttttagctttggcacatgaaaaaaaaaagataattcttcctcagaagttttgaatattgtaatacaaacgtgtgtgtgtgcatgtatgtttaaatatataattagaactctgatgaagcagcttgttttgacgagaatatttggtactttgaaaatgataaacatttctgaaacttgcctggcccagatacttatgtttcttaagataaattgatttatatcactactgtttttaaaagtctttctagaaaactcaagtttgtaaattaaactattggaataattcctttccttatggcttacatttaaaaatacaaaatggtaattatattaataacatattagtataacaaaaataactactgtttaccgaataccaatcatctaccagcctgtggtaagcactgtatgggcaatatttcatttaatcctcagaattaccctctgaaggaggcactgttattttcatgccaatttgtaagaaaactgaggcacagagacaggaaataacttacccgggttatccatttaaagagtgagcagttaagagtcaaagccaggttcctgtgatccacaatccaagttcttaacaattacacgaagatggcactggaaataaggttttaatcacatatacagataaaatgactttctttaaaaaaacatgcagcacaaaatatttttctgcactaagaaaatcaaaattttcaactctaccttctaaatattttggagctgctactgtcattcttgatttctttttaattttccttaaattctttgacttttttaaaaatgaaaagtaacatctctttggtatgtcatctttttgcatttttttaacttttattttaagttcaggggtacacgggcaggtttgttatataggtaaatttgtgtcatgggggtttgttgtcacccaggtatcaagcctgggtgatgaaataggtattattaatacctgggtgatgaaataatatctattaattatttttcctgatcctctccctcctcccaccttccaccctccaataggccccagtgtgtgttgttccccctgtgtggccatgtgttctcatcatttagctcccatttataagtgagaacatgtagtatttgattttctttttcggcaatactttgctaaggataatggccttcagctccattcatgttcctgcaaaggacatgatctcgttctttttatggctgcatagtattccatggtgtatatgtaccacattttctttatccaggctatcattggtgggtatttaggttgattccatgtttttgctattgtgaatagtgctgcaatgaacatacacatgcatgtatctttataaaagaatgatttctatttttcgggtatgtacccagtaatggaattgctgggtggaatggtatttctatctttaggtctttgaggaattgccacactgtcttccacaatggttgaactaatttacactcccaccaacagtgtataagcattcctttctctccactacctcaccagcatcttattttttgactttttaataatatcattctgactggtattagatggtatctcattgtggtttttgatttgcatttctctgatgattagtaatattgagctttttttcatatgcttgttgactacctgtatgtcttcttttttttttttttttttttgagacggagtctcactctgtcgcccaggctggagtgcagtgatgtggtctcggctcagtgcaagctctgtctcccgggttcacaccattctcctgcctcagcctctccaagtagctgggactacaggcgcctgccaccacacccggctaattttttgtatttttagtagagacggggtttcaccgtgttctcgatctcctgacctcatgatccgccctcctcggccttccaaagtgctgggattacaagcgtgagccaccaagcccggccgatttttgtatatgttgtaaggaaggggtccagctttaatcttctgtgtacagctagccggttatcccagcactttttattgaataggaaatcttttccccattgcatgtttttgtcaggtttgtcaaagattagatagttgtaggtgtgtggtcttatttccgggttctctattctgttccattggtctatgtgtctgtttttgtaccagtagtatgctgttttggttactgtagccttgtagtatagtttgaagtcaggtagcatgatgccttcagctttatgctttttgcttaggattgccttagcaattcaggctcttttctgggttctatatgaattttaaaatagttttctctggttctgtgaagaatctcaacagtagtttaataggtatagcattgaatctataaattgctctgggcaatatggccattttaatgatattgattcttcctatcaatgaacatggaatgtttttccatttgtttgtgtcatctctaatttctttgagcgctggttcattattctccttgtagagatctttcacctccctaattagctgttttcctaggtattttactctttttgtggcgattgtgagtgggagtgcattcctggtttggctcctggcttgactgttgttggtgcatggaaatgccagtaatttttgcacatttattttgtatcctgagactttgctgaagttgtttatcagcttaagaagctttggggctgagactatggggttttctagatataatgtcatgtaatctgcaaacaaggatagtttgacttcctctcttcctatttggatgcgctttatttatttctcttgcccgattgccctggccaagacttccaatactatgttgaataggagtggtgagagagatcatccttgtcttatgccagtcttcaaagaaaatgcttccagcttttgcccattcagtatgatcttagctgtgggtttgtcatacatggctcttattattttgaggtatgttccttcaatacctagtttattgagagtttttaacataaatggatgtctaattttattgaaagccttttctgcatctgttgagataatcatgtagtttttgtctttagttctgtttatgtgatgagtcacatttattgatttgtatatgttgaaccaacttgcattctacttgatcatggtggataagctttttggtgtgctgctggattcagtttgccagtattttattgaggatttttgcattgaagttcatcaaggatattggcctgaagcttttcttgttgtatatctgccaggttttgatatcaggatgatgctggcctcatcaaatgagttaggaaggactccctcctactcaactttttggaataatttcagtaggaactgtaccagctcttctttgtacaactggtagaacttacctgtgaatccatctagtactgggtttttttatggttggtagtctatgtattacttcctcaattttagggctcattattggtctgttcagggattcaatttcttcctggtacagtcttagaagggtgtatatgtccagaagtttatccacttcttctagattttctagtttatgtgcatagagatgttcataatattctctgatggttgtttgtacttctgtggggtcagtggtaatatcccccttgtcgtttctgattgtgtttatttgaatcttttctattttcttgtttattactctagctaatggtctattttattaatttgttcaaaaaaaaaacagctcctgaattcactgatcttttgaatggtttttcatgtctcaatctccttcagttcagctctaattttggttatttcttgtcttctgctagctttcaggtttttctgctctcagttctctagttcctgtagttgtgaggttagattgttaacgtgagctctttctaactttttgatgtgggatttagtgctataaatttccctcttaacactgccttagctgtgtcccaaagattctggtatgttgtatctttgttctcattagttcaaaaaacttcttgatttctgccttaattttattatttacccaaaagtcattcaggagcaggtcattcaattaccatgtaattgtatggtttcaagtaggacagtcctgtagatatctatcagggccatttgatttagtgctgagttagatcttgaatatctttgttaatttcctgtctcaatgatctgtctaatattgtcatggggtattaaagtctcccactactattgtgtgggagtctaagtctgtttgaaggtctccataaacttgctttatgaatctgggtgttcctgtgtttggtgcatatatacttaggatagttagatcttcttgtttaatttaacactttatccttatgcaatgcccatatttttttcttttaacctttgttggtttaaagtctgttttgacggcaactaggattgcaacccctgttttattctgttttctatttgcttggtagatttttccccatccctttatcttgaacctatgtgtgtcactgcataggagatgggtctcttgaagacagtataccaatggttcttggttctttatccagcctgccactttatgtcttttaatgggatcatttagtccatttacatttaaggttagtgttgctatgtgtcgatttgataccgtcatcatgatgttggctggttattttgcagacttgttatgtagttgctttacaatgtcactggtctgtgtacttcagtgtgttttgtagtgtctggtaatggtctttccatatttagtgcttcctttaggaactgttgcaaggaaggtctaatggtcacaaattcccttagcatttgcttgtctgaaaatgatcttatttctcttttgcttatgaagcttagtttagtcagatataaaattctgggttggaattctttttgtttaagaatgttgaatattggtcctcaatctcttctggcttgtagggttaccagtgagaggtccactgtaagtctgtgcttccctttttaggtgaccgggcctttcactctagttgcctttagcattttttcttacatttcaactttggagaatctgatgatgatgtcttggggaagatctttttgtggagtatcttactggggttctctgcatttcctgaatttgaatgttggcccctctagctaggttggggaagttttcagggatgaactcctgaaatatgtttttcaggttgattccattccctccatctctttcagacaccccaatcaatcatagatttggtaggcttgattgctgtgtatttacaagtgaaacagggactgaccaattccctggaattctctcaaagtcactgagtatgtattcaatttcaactggcgtaagttggggaagagtgatttattggcttatgtaatgctaaagttcagcttcaggcacagctggatctaaatgtttaaatgacatgattgggtatctgcttcctggatttccaggttctactttcatttgtgctgattctcaagtgtacctcctattggtttgcaactcttttttaataggagtatcaaaagttacaggacttatttttattagtctatcttatgtcaggtgcccacctaggaggtgagcatctgagcaaaggaaatagaagccccaggtgatggacttgggtatgtacccacctaaatttggagagcagagcttcagttgcatggaacgtatcaccgaagaactctaagttcttagaaattgtcaaaaacactttacccattctctgatatcaaaagctactgtttggatttgctataatcactaaatgcactgaagtctagtccagatacctggatgtaaggaatttattctttttcaaagcaacatattggcactttaaaataaaaaaggttgtccatggaaagtactttgtgttttttgaagactttttctctggctataacactcttacttaccactagctcctttgctttccagccagtgggtaaggaagagaggaattaaactgaaagatataagttggtgctcttggcattttgaaaagcccttccctgttttgaatcttagcatttccctttttgtcaaccataccctcttctcctggcatggaccattcccacaattcatttatattcactctgacacttcaacagccttacttgctaactttacaccctgatgcatccatctatcacttacttattctccctctttttttcttctttagtataatattttctatcattatgaattcctgaatcacagaaaaaaaggttaagaagagctagaagatcaatatgctggcagggtgattttcttcaggttcaggtttatgagaaacccctaacattcatccctgggcttgccccagaccatttcttcactgtgcctcaatgcttaatccagctcactctccccccttttttgtttgttgtttagtctagacactgcgagacactagagttgggcaaaaacaattgctaatggatgcatgtgtgtgtatgtgtgtgtgtatgtatttctcactacatattaatgagcagtatgaatagatcaaagaaatctcaattcttccctttatttttctgtcttcctgcaaacagatattaagaagtgtctgactacagatagagcaagcaaaatgcaatgttgtcaaaggcatgagagaaacctgaaaagttatcacagtatctgtcaattactaagcacttattatggaaaaggcgttgtgccagatcctttgcatgacttttcttctttaagcattacaacaaccctgcagtaggactaccaatattcccattttacaaatgaagagattcaaagatctttagtgatttactccatatcacacagcttatcagtagagaatcttgatctttaactgggatcccaacattcttggtgttctttttttcctgaatatttcactgatttatagtagggtcctagaaaagaaggaccttttatagttaatttaggtcaaggtagaggtcaaaggagaaagggtggatgttggaaacagtgcccttgcctggaggggttggagcctgtatccacacacacagtcttgaccagataaccctacacctttaattccacactggcctgaggtctaatttgccttcttgtgtggatatctgctcttccagcctttcaaagagaaattttctgagtactgtattttaaaaatcttcccatattcttaacagtctatgctaatacaagtccctggtaagacagagagcgcatgaacttagaagtcagatttctgcctgaagccagactctgctgcttactagcttactgggcagccaggggagggtgtactgacctctctgactgtcagttttctcactcatgaataatgataactaatgtttgtgatatttattaagcacttaatatattccaggtgctattgtacttgctttaaaactattaactcatgtaatcttcctaacaaaattacgagatttattatctgtctccttttaccagaaagttgaggcacagaaaattagataatctggattcaaaaagacatttcagctcagtgcctctcaaacgtaagagattttgtcctccaggggacatttagcaatgcctagagatatttttggttgccatgactgggaaatgtgaccggcgtctagtgggcagaggccaggatgctgctaatcagcctatgaggcacgggatgagcctccctaacaaagaataatctggcttcaaatgtgagtagtgctgaggttgagaaaccttgttctagctccagaacccaagctcctaactgctgtactgcctcccagttgacatcatgacaatatgctgctcacggagttcttacacagataaaagaagattaattaacattgaatatcactcattccacacctggcagctagtgactttccattaagtagctttccctcctcaccaaccttgccttctcctctcccaagaaaagcagggtccaaggagatgtagagagctaacttctgcctttcagaatgaccagagaacaacacagttccagtatgcagtatggcttttgtataaaaaatgtctggagtccattattagtgcctgaatttcccggcttggctgaataaccactgtttatgtttgtgtttacagtcgacttgggaataagtgtcaagacggataatgtggccacttcttcccccgagacaacggagataagtgctgttgcggatgccaacggaaagaatcttgggaaagaggccaaacccgaggcaccagctgctaaatctcgttttttcttgatgctctctcggcctgtaccaggacgtaccggagaccaagccgcagattcatcccttggatcagtgaagcttgatgtcagctccaataaagctccagcgaacaaagacccaagtgagagctggacacttccggtggcagctggaccggggcaggacacagataaaaccccagggcacgccccggcccaagacaaggtcctctctgccgccagggatcccacgcttctcccacctgagacagggggagcaggaggagaagctccctccaagcccaaggactccagcttttttgacaaattcttcaagctggacaagggacaggaaaaggtgccaggtgacagccaacaggaagccaagagggcagagcatcaagacaaggtggatgaggttcctggcttatcagggcagtccgatgatgtccctgcagggaaggtaagtgtgccaaggtgtatccacttggttctgaatgcatgctcgggggcgctaatgggataagaccactgcacatatgcagtcaccctgggcctaggcaaggtggcaagctgttgacccctctagaacaaatagcacattgcagcagagtgtcatcctgatgtttctctgggtagaaacttctgtgtgaagaacaataacagctgtggcatctgttttatgtaaaagaaaagaggaggtgagttacatgcagatgaatttgtccatccatttttcaaaggcggaagtagacaggttgcgtttacgatcagtggattctggaggaaaaggcattagtggaataaaaatgattcctaaaagatgttacctagtctctgtagtttgttgacatgcagagttttgttggaacacatttcgtcccttactgttaatagcctgaattgatatttaaccatcttttgctctaaggtgtgtgtttgaataaggagattttacagctctgggcagactcttttatgtagtaattcttttccaacaagtaggagtaataaacctttgtaaaaactaggggttttgggttttttttttgttttttggggggtttttttgtgttggttttcaaagaaggtatcctggaatcagttgctttttttcctgagcgaagaaaggcaagctctttttgacactaaaaagagcatttgcttttaaccttgagagagcctgtttgtattcaaggcaggaaaagaactccttaaaagaagaaggaagtaaaacttgatacattataggtttagggcatgcatttccttggttaacagactttttaaataacaatatttttcaaaacttgggaataaagttaagtgccactagcagacttcagagccaggaaaaaattggatgagctccaaatatatttgtcttaatacaatgcaactttgcacttccgaagtgctaataattacacttgctgtcatttattgaaaatgttcaatgtgccaggctctactctgagcactgtacgtaaattattttccttaatgaaaataagtatcacgttaatctatggttttaatgcatccagggtgctacgaagaattacattatgaaggctgggcaccgctgaacactctggagagttaaaattgggaaaagataatagtcatcatgtgttttaggctcttactgtcagcattcttgtgttttctatacattttgattcaaagagcttatttccaacatttctttcagagtttaaacattttcccttcaaacacccactttccaaaattcaccagttcaagaagccggttgaataactttccgtataatttaaaataagtctccaaatgcaccaggcatctgctctttactgagtgtgacactgtactaggaacaggtgaggcacagggaccacagtgaagggcgagacacagagtctcggccctggtggagtttgctgtccagtgagagaagtgaataaataaacctgcaattgcaatgcaagatgccaagtgctgtgctgggggagcagagtgtgggggagatgccagatgccaggagaactgggctccatggcccagggaacattccagcaaatgcatgaaccaggacctgaaagttacgtgcccagaggcggtaaactagtcgtcaatattcctgcatatgggagaaactgtttactacttgcgcctgagtggagaaaccattctcattattggtcataggcttctaaggccattttgaggttgtgattttttaacagtcatgtgtttgttttgcttgggcatccaaagcctatccattggctcagttaggagaagattgagttatttatgggaagacaatgaaggaatgtgttttactcatctttggacaggtgtccggtgactcatccaaatccccatcttaatcaagtaaaccagttcagcatagaatagccagccctccaatgtactcagccataaaacctcgacacactcaatctatttctagtctaagaaaagtgaggaaaagttttggagttgtgatttattaactcagctttctttattgaaaaagaactcttaggggtagaacctcaatttgagtggaatgtgttccaaaatgagatttgagtcagaaaatgggagcttgtgttaggaacatggcaggtatctaatatagcaaagcccttgtgtaatattttcaagttataatgatctctcagaagacccaagaattgtaactgtcttcctttctgaataagtgaattcactccctcagattcaccagtgaagtctgcatctgattttgttacatgacaaatttccatttttttcagtgatattgaaatttgaaatactgagtgcccactttgtactatgtacatgagaaacacagaaaagttatgaaatagccatttctccctcagcctgtgaacttatggatattcagatgcatatgcctgcaaaggtttttaacaacaacaacaaaacagccttctgattgtcaaggtttcttttctgactcccggctgcatagttctgtatttagggggaaaaaagcaattgttctataaatgtaatgggacaatccaaccctcagaaagtaacatgaataaaacttctcaatcagtggctttcttggtgggagtaccacattgtacatggctggatgtcagtgtattgattcagaattcttagggtgaattatgccttgggctcagccgcatctactgcctccctccagcagcccttccccccatttttatggcttgctccctgctggattggaattccagccacaagcccacagagctgtgaattgggagaaagatgccaccatttcatcctgggggaaacatacaaatcttctgtgttttcagaacgacaatcttatttttgtgccttataaaactacattcagggcaaagcataattaaaacaaggcaagaattcatgaacaaatgaagcgtttactacataggccaaagaaaagataaattatatgcctgaaaggtttcactgagctgtgattcatacaaaccaatgtgttggcagggatgaggtttttttcctctccccacaacaactgaaccagagctgtaagatatgcatttaaaagattcaacacacacacacacaaaatcacataatgcaaacttgacctttattggttaaaaataaaacccaccacatttctgttatcaacacagtacttccagagttgtgtttgtgttgagtgggggtgtggggcgcataaagtgttgccatgcagagtttcataagatgaagaatgtcttttttcttttaaaagtgtaattaaatcctgcaatcgttactttcgcactaaccttgtgcaaggcatttgaaaaataaatcatgtttctcgtctgtcaaggagtgtataatctagtaagagacatagtattttaagagacattgtgataagtgcatcggtcctcagattggctcaggctactaataataagaacaatattctgtgttttcacttctcttcttttctctcttgaacacactccattcaggctcttgtcacagccaccatgatgtttcaaattccctaccatcaccctggctgccaaatcctataggtctctatctttgtcctagtaggtctgacctgcaagttgaatccgacacagtgactgagtgggccacaccttgctgtttgaaacaacatccttccacctccctggtactcttccatcatctcctttgctggatctcaccctctaaatgttggacttccccagggttcacttcttggctatctctaactacgcttatttccttgaaggtttccctcagtcccaaaggtttaaatactgctatgggttgacaagttccaaatttacatctctagccgggatccatccctgaagtccagacgtgagtctcagctgcctcctcttccacatgtctacttgaatttctacatccccatttggctgctcactgagtatctcaaccctaatgtgtccagaatggaactcttcattcatcgcctaacaatgacaaaaacaaaatgcccaccagtttaattcacggggttttccatctcagtgaatgacaagttcatcctgtctctactgtttagtggtagaattggaattaaagaactaaggtctccagagtcctttcctacatggtatttagtagtgaattaaacataagcatcatagtcaagtagcctaggtttcctctctacctctgtcacctactggctgtgtgatcttgggcaagctacttcacctcctgagcctcagtttcctcatctgtaaaatggggataataatagtatctagcacattctcacattgttcacacttttagaagttaaatgagataggccatataaagtacttagcacaaattgcattttgaaagaagaaaaagagaaattagctattaccagtattatgggttttctccctgtcttctacttcacattttacttttattttttgcctttcccttccatagtcctcaacccaaactcacagagatagcacagttgactctaatttaagagttgtataaccaaaggcacaagtcctaacttgggtgagaaaggtataaaagttgtaaaattatttttgaaacaatagaaatgttagtgtccatgcccataagcctcagtttctttgtctgacatttaagggtttccacaatgtttcctctgcctattttccaactgcattttccacccttcccttaaatttctccagtcaatatggccaacacctgacctgtgcaaacgccatctgtctcctggtattttctctgcctatgtccctttctctctctgtttatcaaaaattgacttgatattcagtgccaggttctccatgaagctaaccagatatctccactcttggatgatttcggacagcatgaatccctctcgcattttaagtcaaattctgtgattaaatcattttgtagaaatcagctcattgagccatcaaatcttaccagggaattcctgtattttcaccattttacagatgaagaagtcaacagttcagagaaagcatatcactcctgacacacagctaaaaggtggcacagccaaaattgtccatctccaaagcccatagtcttaaatagtcaacgtttctatttttgccaattatttgaaacttgttcaatgaagttacaacttgaggcaatgaaattcaaagatgttagcatatgcaaagttgtaaatacccaaaatcccaagtgaaaaataaaaacaaataaaaagaattaccgaatttcaacattagaaggccaagtgaattattaactgttttttattttgtgttgtttctgccttatgtccacaaggccatgccttttcaactggtaaagagaactagccacccaaaagactttgtcagtgcaaagggaaaatccatcttacattatgcaagttttggagtaaacaaggtcctcagctataccactgggattttgatgcatttagcagtaagaaacgcttaatatgagatgtttgcagtggcagaggtgatgtggaagtgttaggagcctgggtgacctaggtatgagtccagactctaccactaaatagctgtgtggttgagttaaatgacaataatagccccattttaaaataattcattatttctaggctgtgcagtaagcattttgcatacattatctgtttttattgttaaaaaaacccaacaaggtaggtatttctattgccattgaacagaggagagaacttggggagaacttaagttacctgcgttaaggtcgcaaagctaattagtggcagaagtggaatcgagatccatctgtcacctaagcctgttatactcaatcatttaaaaacctgtgttttcatccacaaaaggaagctactacctgccctaggggtttttgtaaagttagaagataatataggccatcagtagtagtcatgctaaataaaactgtatattttctaaattgttagaaacttagaaatgagtaattatgaaatagatcaaatggcttttcagagtgatggagtttgaatagtgtatcatttaggggttggtaatatatcatttttactttggctgcaggaaacacacacacacacacacacaacaatcaattaatagtggttcacttaacaaggaggatgtactatttcttgcatgtaaaaagaaccctagaggtaggggagttcaggttggttcaacatcttcacagcccccacaagcccgcctcagtctttctctactggtgtcctccattgttgcttagtccctaggcttagtcccttgtggttttaacatgattccaagtatgcaggagtacctctctttattgtgcttcacagatgctgcatttttacacattaaaggtttgtgacaatcctgcatcaagcaagtctgtcagcaccatttttccaatggcctgtgttcactttgtgtctttgtgtcagcattttttagagataaagtttttgttgtaatttttattttaagttctggggtacaaatgcaggatgtgcaggagcccgggtgacgtgcacgtgtaccccagaacttaaaataaatgtgtgccatggtggtttgctgcacctatcatcccatcacctaggtattaagcccagcatgcattagctatttttcctgatgctctccctcccccaacccccgacaggccccagtgtgtgttgttccccttcctgtgtccatctgttctcattgttcatctcccacttataagtgagaacatgcggtgtttggttctctgttcctgcgttagtttgccaaagataatggcttccagctccatccatatccctgcaaaggacatgatcttgttcctttttatggacacatagtattccattgcagcactattcacaatagcaaagacatggaatcaacccaaatgcccatcaacaatagactgggtaaagaaaatgtggtacatatacaccatgagacaaggtatttttaaattaaagtatgtactttttttttagacgtaatgctattgcacacttaatagactccaggacagtggagaacttttatgtgcactgggaaaccgaaaaatgtgtgtgactctattgtgatattgactctattgcagtgacctggaattggacgtgtaatatttccgatgtatgtgtcataatgtcctataaataagaaaggagtttcctaaaatttatcctcagagccctttggtgaaattgagtcacgtgtctgtgtcaaggtgcaaatagctatcagccagcattttcagtttcttcagtagaaagaaggctcttccagcaaagaggacatgccacagatagaaaccagatttatcttctctacctaacattgtctggaaatcattaagtgaatggagcaagtagaagctgctacagtatccacctatggtaattcatctgagtgtatccattacattagttttctaatttaactgtgaccccatagtaagaactagattttacttgagctgatatacatgcgcatacatgaaacaaagaattcatgaagtaatactattcttgcagcatgtaacacctgcagggattttgtattcttttctattctgtttgatttgtttactgctggttttgacccactaccttatttttaaatctgctaatgatcacagtctgaaatttggagaacgctgttctgttatctgaccacttcgacacattgagacagttatcttaagagacgtgaccattttttatgcaactgagtattcccaatgcctagcacaatggctggcacatgttggcatccaataatgtttgttaaatgaacctgacaagaataagggtggtacacgtcatggttcaacttttcagactgttaggatgtattattgcaacgtcattatctgctctgcctaacacaagttgaaatagaaagtcattgcaaaatatgtggtgtatacgatttcacttaaactttagaatcatagtacaagtctacatttgtactatctacttggtattttaaatttggtctttaacatgtcatggcgttaatccattgaaatatctagtaaattgttttttgcaattaatttgtaaaataaattttgagttatcattccctctggtattgtcccatctgactcgccccctcagaagttgtaacggctataacttatcaagtttactaagtcacggagaggtaaagtaacttgtgcaaatcatagtgctagaaagtggcagggtggaaattggtcaccgatgcccacacacttaaccactgtgcctataggttcaaagagatgaaacactttaaaacttttgaaacatcttatatctttaaaaaattctaaagttagttgtattagtcagggttctccaaagggacagaactaataggatagacgtatatgtgaaagggagtttattaaggagaattgcctcacattatcacaaggtgaaatcacactataggccgtctgcaagctgaggaggtaggaagccagtagtggcagaagttcaaaagcctcaaaagtgtggaggccgacagtgcagccgtcagtctgtggccaaaggcctgagagcccctggcaaaccactggtgtaagtccaggagtccaaaggccaaagtacctggagtctaacgtccaagagcaggaagcatccagcacaggacaaagatgaaggctggaagactcagcaacccagcttatcccaccttcttccacctgctttgttctagccatgctgccagccgattggaaggtgcccacccacattgagggtgggtcttcttctcccagtccgctgactcaaatgttaatctcctctggcaacaccctcatagacacacccagaaacaatactttaccagccatctaggcatccttcaatccaatcaagttgacacctaatgttaaccagcgtgatagtactttccaagttggtctgtggaacgttagtccaataagatgggcctagaaatagggctctgctatggaatagtttcagaaaatctatttgctttatagtctctactgaagattcacaatggacatccacctactaaaggctctgagaagtcctgcagcaagcacgcctgtttcactttgtttaaccaagtgtttctcaaacttaatcatccatgtagctgttgggcctctaacaaggtagctcaattttccaaggaatggttcttctagagaacgttgagctaggcatttagaccagaagttgtatgatgttggctgtgggtttgaagaagtaaaataaaataaaaaacataaaccagaagttgaaaactagccatctgtagaaggcctctagccagagatgcatcttacttggcctacatagtgttttaaataatattttaattaattaattatatttttgaattaacaaagttgatgatattttaaagcaataatatgtcaatacaattctatatttcagacttccccataatgggtagttttgccctatatttccagacagaatgtgagttgtgactgtcccttaagatggggcacccactctccagttcaccaaatgattcccagcagcgcagccatgtaggttgtccttcgtcataacacttgcattggtatttttcttgggtacagttgagaatcaagtaaatacacccatcatggaccactttacttccttcatccttcatagcacttatcagaatttgaagctacttagatgaccatctgtcattccagcctgagagtcaatcaggcagccagtgttaagcaatatataaaaggggtgggaggctgggcgcggtggctcacgcctgtaatcccagcactttgggaggccgaggcaagtggatcacgaggtcaggagatcgagaccatcctggctaacacaatgaaaccccgtctctactaaaaatacaaaaaattagccaggcgtggtggcgggcgcctgtagtcccagccactcgggaggctgaggcaggagaatgacagagcgagactctgtctcgaaaaaaaaaaaaaaaaagtaagtggatactttcatttattcatgcaacaaatatgagtatttcctttgtgccaggaatgattttagattccccagcaggtagaacagtgtacttcatgggagctttccttctagtggagagaccaacaatttaaaaaagaaagagaattaacaagcaaacacttccagagtttagaaagagctctgagtgaaataaacagagttttgagatagaaagtagacaggagagtgaaaatcacaactgggtgaggaacagaaacagagaagtgtttaaacagtcagtgaatagcatgtgactttttctttctttctttgcacgggccaaacaattcttagaaagtctgcaacctaattctggcagcattcaaaactgttttctcgctttggggaagtgtttgttaaatagatgacgaatgtgttctaggctgtggattattagttttttgtatttaaaggcaggttttctggtgtggtttttgtttgttttttgtttttgtttgtttgttttccgtaacattgggtatttttcctttagtaaatgtgaaatgctgtcaccagtctggaaggttgtgcttgttaggaactaatcatggaacagaagaatcttccacaaatcccttttgcccagtgtggcttaccctgggaatcactcttcactcactctgcctgcagcagtatttttccattttaaatcacacatattggccgggcgtggtggctcacacctataatttcagcagtttgggaggctgaggcaggaggatcacttgagaccaggagttcaagaccagcctggccaacatggtgaaactccatctccactaaaaatacaaaaattagccaagcatggtggtgcacgcctataatctcagctactcaggaagctgaggcatgagaatcgcttgaacctgggagatggagattgcagtgagccgagatcgcaccactgcactccagcctgggcaacagagcgagactccacctcaaaaaaaaaaaaaagaaaagaaaaaaaatcacacataagggaactatacttaagagtgtgccaactcatgtgtccttaggactatccccaaagcaaagcctgctgccaaaagggaaacaagagaagaacattttattgcttaattctctacccacattttacttgccattggaactcaagttgacaaattcacttacccctcaagcagaggagttgctgagggagaaaagagaaaatgtacactagctttatatgggaagcaagtgtgcgttgctttcttagatagatttctttcccccctccccctatgtgaacaacagacaatgctttatttaatcttacaaatgtaacatctccacatcagttaataactatggattaatgatgatgtaccatgctaaggccctgggctagacttctgctacccccgtgtgagatgagccttaagtatcctgaggttatgtccacagggtagtaaaacaggtagtgatgttgtgatttacagtagagagtatcacactggataattggtccaacccggcttggttcaattagtataagcagctgaaattaacattgcctctctcttccccaaaagaggaagaaaaatggctaagtggaacatttttatatctgtgttatccagactcaatttccatctcagaaaagatgccagaggacaatggaaatctagatttcttggttttatattttcatgttattttatttccctctgaagtcttagataatttcttaatcaactacctggaccactaagaagcttgtttccaccgtggcgctttggcagtatgcaattttaaagtcttcaaacacacatgctttctgaatgagcaaatctgcatttaagaatttattgattgataggtcaggagggtgactatagtttactgtacatttcaaactagctagaatagaataagtcgaatgtttttagcatgaagagaagacaaatatttgaagtgatgaatatcccaagtacacgaatttgatctttacaaattacatgaatgtattaaattatcacacgtaccccaaaattatgtacatctattatgcatcaataaaaaatgtttaaaaataatgtattgagaacatgatcaatattttatgcatggggctttaaaaaatttccagtattgtctgtaagaaaaaaagctgaaatgatccaataggtctttcatattgattgtggcacacccttacactagacaccgtaaacgagggtgacataaaaatagaattggtcaggtgaagaaagtgatagtataatgttaaatgagaaaagcagatttcaaaatagcatgcagaagaatctcctctgggtaaaaatgatctctgccttcctgtgccatagctctgtcatcccacccaaagagcagcgtggaataaaaaattgcaaattgttgacagcagttgactttcagtaatagaataatcgatgcatttcgttttattctttgttatctgtattttctcttttttataaaaggagcactgtagtgaaccaccaatctaactaaaagtaaaaaaatgccaccatctaggtaatttctcgattcctcctctagactgcattaagaggctgaggattcctgagctgtgttaattagaaattgccacaggctgctagcaacagttcaacaagaggttattttcctctaacaataatttccaaactatgccacccagagcttatgtgacaattcattgttcagaaagaataacaactttttaaatatacttatagctaatgtgtaatcatctccagcaggagatcacaaagagaaatgttgtcctaagtgggcagatttgaagccctttcataattggatttcctatggttgtgctgtctgtgttctttccctgtttttgccatgggcttgaaagatgtgaatgcattataaaaaaaaaactactcattgaatttttatcagttgatgtgaattgggtaggagtagtggaaaaaataaaagtacagaattacctacattaatatatatttattgaccttccttcagtggctttgagcactgtagtaaaacaaacttaaaaaaaaaaagagtttgggcatggtggctcatgcctgtaatcccaacactttgggaggccaaggggggtggatcacctgaggtcaggagtttgagatcagcctggccaacatggtgaaaccccatctctactgaaaatacaaaaattagccgggcatggtggcacatgcctgtaatcccagttactcggaggctgaggcaggagaatcacttgaacctgggaggcggaggttgcagtgagacgagattgcaccattgcactccagcctgggcaacatctcaaaaaaaaaaaaaatcatagtctgcttaggaaattctgagattctgcaaaatatttttagtattggtcttcacattccttcctgcttgcatattaatttgctttcctttctaggcaaattgggggacaaattctatcttcaaaaattaaccaaaccctatttttcttcctgaatctgacaatggctacacgcaggtgacagtgttttcagaagaagaaaaatgaagacttcgtgattgtccagagactattgttgtccagcaaatcgaaccctctgtgctcgcgtgatattctctggggagaggaagcagagccttcccttttatcccaggcagcatggggctcaaatttctgacagatggaaaggagtggagtcatgagtttctgtaccattcaacatttttcacacaaattttcttgtgttcacctgtactttcagtactgattcgtggtgttaagactaagagtaaaatcagtgctacacaatgaggaaatctagatggagtagaggcatcacagatcattccagacaaggctttttaagccttatcttatattttcactttaacaatgtagatctgcttaaaggagtctgaagtccagctgacaatagttgaaagaaagtgccagaagttccatatgggccttattacagacaatcaaattatgataaggcggcattatttttcaacatgacaaattgtaatcactttagcagtgttcctatctgtttgctctttgaagccaacaaaaaagaaaatatatataaacttctcacacagaggtgaaaaacaagctaacaccacggacgcctgtttgcttaaaaacagtttccaggtattttctggagaatgtttctgtttccgtataatgttgtttgctgagaatgattcggaggcctgatgagaatagcagcagcacctacaaataacatgtttaaagcacaggccacacactggtggcctgaaggctggactctcatcacaactgtgcttagcttggccctcttgatgtttttaaatttttttagttaatcatgcatattttgctttagtcttaattttaatacgtaacatattcactctgttcaaaacaaaaaattataaaatgccacccagtagataattgctgtttgtatttttaatgtatctttctagggttcctttgagcatatataagaaataaaacataaattctttttctttcttttttacacaaacggtaacataatatgcactctgttctattccacgcttgttttcagttaacaatactttctgtatctgtagggagcttcctcacttgtaatgcctgcagagtattctgttgaatggttgtaccatgagttatttaaccaggaccccatttaatgcccattggctggcttccagactttcgctattaacctcactgcaatgaataaccttgtacatttgttatttcacacgtgtgagtttaggtttatcctctacatcaactcttagagatggaaatacagggtaaaagaatatatcctttttacagttttggtacacaatgccactctgccctccatcaggattgaattagtttatacttgtaacagcaatgcatgattgccttcttcacacaagcttggccaatgaatgtttttgtaaacatttggatttttttacttttcaatcttccttttcatgacttctggatttctagtcatacacacaaaagccttctcaatccaaaatgaaaagctgttttccatgtttccttgtattatttttaatctatttggattttatcctggtagagggttgagttgtgacaccaagttaatttttttccagatggctgctctgtttttcctacatcttttatttaaaagttcttcacttccatagattttaggtatcatctttatcatatactaaattcctatatgtctttggaattttaccaccttgttatcatcagccatacaacgtatgcatgtatgcctgatgctaacatatgttgtatggttgatggtaacatatgttgtatggctgatggttacaaagtagaaaaatatacagcagagaaaaggaataaagtggcaggaacttaaaataggaaaggacttgctgagaagataatatttgagtaaacatctgaaggaaaggagatagaatcagtgcagcacagcactgaaaaacctttggcctctgaaatcagctgggcctgggatcaaatcccaactctactttatgaccttaggcaagttatttattctttctgtgcattaatttcttcatctgtataattggaattacaaacagtgcatgcttcatgggatcgttgtaagaattaaacgggatctttttaacaagcttagcactgggcctgacacataaaggctgatcatttttacggttatcatggacacttattttgtcattacacactccttaaataattcatggctgcaaaatattccatcacacattgttatgggttaatttcacatgttaaaaccacatgcgaatttatttaactgcagatcccaaaagttcaactttttaagtggttcttcattgttgctcttccagaattatcctatcaagctttttttttttttttttactttttaactttgaaattattgtagattcacatgcagctgtaagaaatacaacagttatccctttatccagcgtcactcaacggtaacatcttcagacctgtagtgcaatatcacaaccaggatattgacaatgatacaatcaaatagagaacatttttatccccacaaggatactgcatactgactgttcaggtgcatccacttccctctcacccccatccttttcttacctcctgcaaccactagtctgttctccattgctatagctttattatttcaagaatgctatctaaatagtatcatacagtgggtacccttttttacataggcttttttccccttcagcataaatctctggaaattaatccgaatcactgagtgtcttggtagatattggtccttttcgactgccaagtagtatcccatgctgtggaagtaccagtttgatgtttggttgttccaactttgaggctattgtaaataactttgctataaacattaatgcataggtttttgtgtgaatataattcttcatttctctaggagaaatgaccaggagtgcaatcactatagttgcatgttttatttatttatttattttaagtttttgagattggatcttgctctgttgcccaggcaagtgcagtggtgccatcttggctcagccacccagggtcaagtgatcttcccgtctcagcccccagagtagctgggattacagacacttgccaccacgccctgcctgcatgtttaattatttaagaaactgtctaactgttttctattctgcctgtatccctttacatttctaccagcaatgtaaagtgattacattgtaaagtgagtaatcgagtttcttgcatccttcccagcatttaatagtcactattttttgctttaaccactttgatgggtgcatagtgatgtctcgttatggttttaatttgcacttttctaatggttaatgagattgaacatctttatgtgcttatttgccatctgcatatcctctgcaatgaaatgccccctcacgtcttttgcccattttctaattggattgttttgtttgtttttaatgttgagttttaagaatttttttcttttaaatgtattctaaatactagtctctcgtcagatacgtggtttgcaaatattttctcccactctctagtttctcttttcatctttttaacaggatcttttacagggcaaaattttttagttttgatgaattccaatttattatgttttctttttatggattttgcttttggtctttggtcttttatggatttttttaaccataggtctcagaaattttctcttatttttttcctaaaagttttatatttgaggttttatgtttaagtccacgatctcttttgagataatttttatataagatgtgagacttaaattgaggttctttcttttcctctatagatgtcaaattgctctagcacaatttgttgaaaagactatctttattctgtagaattgcttttacacctttgtcaaaagtcgtctgggcatacttgtgtgggtcttttctggcttctctattccattggttctatatgtctatgtctccaccaataccatacagccttgcttactgtagctatataacaaggcttgtgatcagatagactgattcatcaatttatattttaaaaaattattctaaatcctttgtctttccatataaatgttagaataacctcatctatctctacaaaatgtcttgctacaagtgctggaattttgacaggaattgcattaaacctgtatatcaatttggggcagattgacatctttactatgtgagtcttccaatccatgaacattgtgtgtctctccatttatttaggtctcctatgatttctttcattagcattatatagctttcagcatacaagttttgcacatgttttgtgagatgtaaaccttagtatttcattttcgtatgattattatggtattgtatttttaatttcagtgcccatgggttcattcctagtatatagaaatctagatcatttttacatgtttatcttgtattcttcagccttgctgaactcaattattaattctaggtgttattctgttgattccttgggattttctaattttgaaaataatgaaattgtctaattttgccatcttctctggggacagttttatttcttccttttcaatgtgtattccctatatttattttcttgccttaatatacttcctagaacttccactactatgtagaatacaaataatgagagctgacatccttgccttgctcctaatcttaggagaaatgcattcagtctttcagaattaaggataatgttagttctcaatttttattttgtagatcgtctttatcaagttgaggaagcaccctctgttactgtcttccttagagatttatcatgaatggaggattgaattttgttgaatactttttctgcattcactgttgtgatcatgtgatttttcttctttagtctgtcactattgtggataacatcaattgactttcaaatattaatcaagcttgcaaacctatagtaaatcccatttggttatgatgtatacttcttttgacatattgctgaaatctacctgctaatattttgtaaagaatgtttgcatctatactcatgaggcatattgatcagtagggtatttttcatttctttggtgccatctttatctgtttctggtaccaagtttttggtaactatctttataaaataaattagtaagcattccctcttctgttttctaggagatttcatgtagaattggtgtaattcttctttaaacatttcatagaattctccagtgaagtcttctgggcctgaagacttctttcctggaagtttttaaattatgaattcaattttcttaatagttatatggatatttaaatcatttatattatattgggtcagttataatagtttgtgttttttgagcaaatgttccattttgcccgttatcaaatttatgtaggtagcattggttatggcattctcctatccagttttgtacctgatactggtaatctgtaccttgactctcttgctctctcttttttgttgtcatctgttgtctctactaatagaggtttttgctgctgcttctctctgtctctcccattatgctgttgatttcactcactgggctttttgttttcattattatacctttcaattctaaaatttccattttagttatttttatatcttctatttctttgctggggctttctattttttcatttgtttcaagcactgttacaattgttaattgaagcattttattgtgactactttaaaatctttgtcagaggccgggcacagtggctcacgcctgtaatcccagaactttgggaggccaaggcgggcagatcacttgagtttaggaatttgagaccagcctggccaacatggtgaaacccatctctactaaaaatgcaaaaattagctgggcgtggtggtgcacacctgtaataccagttgctcaggaggctgaggcaggagaattgcttgaacccggtaggcagaggctgcagtgagccaagattgtgccattgtgccattacactccagcctgggtgacagagcaagactccgtctcaaaaaaaaaaaaaaatctttgttagataattctagcatctctgtcatctcatttccaggttgacatctgttgattgccttgttttattatgtttgaggccttcttagttcttggtatggtatgacaagttatcttcaattgaaatctgaccattttcatattatgagactgcatcttgcttaaactttctattttagctggctgtcccggacaccattccagcagtactggggctgctacctcattactgtcaggtggaggcaaacatccaggtttctcaccagcctccattgttggggggcgggggtatactccttattactactgggtggaggcgggagttttctgctcacatgaccttcactgataccacagtggaggtctcattaccactggctgacgctaactccactgggtctcttctcacaccaccccagtggggagagggaggagcatctcattgctcctgggtggggttggaagtccaggctccccatgtggtccccgcggacaccatggtggggagggcttattaccaaccggtgaggatgagaatcccagctccctacttagccccacagatgccatcttgcaggggtattgggataacctattacggtcttgtgaaagtggaagtctaggctccccacttggctttctctggcatgggagatggtgagaccacagaatgtcctgtggtatttggctggagtagtatggtcattgtctaaaagttttctgtcttgccagattgccctttcctggtcctttagtcagagagagtaggctttcggaaaggatttgtgagtatgtcagagcctataggtgtttccaggttgctaatttcttcaactccaagtctggggtacttgaggcaaaaagaaaacccaaggaattcaccatcgtgtttttcctcgggtcctcagctggtctgccttctcttctccacctttcagaatccttttatgtatgttttctctataatgtccagggttcttcattgtccttggtgagaggaacaggagaaagtgtgtgtgccccatcttcccagaagcagaagtcttatgttattttttaatgtcaatctaagaagaaaaaaaaaatatttcaaagtaagggcttaagttcaagctgagaatttcacctggaaaggccataaaactctcactcaggaagagccacaggcaaacctactccttgccctgggccggcagatcttgctcctccatagctactgtctgtccaaggcaggagacattactgcagttgggaaatcagggaagcagagaggctagagaagatgtcatggggcaatgcagaaaggcagcgggctcctgtgttcctggagttcttttgaactgtgtctgctccagtagggttctttctccaggttacggaagtactcacagctttcttcctcattcagagggcgtccatcatggcagatcctgatggccacctagatccatagggtccacttgatattttagtaattcctagtcccttcagctgacatcactgtattccattttgttttgagaaagttcaatagatatcccctgtatgtctagccctggaaccacaaaaaagaatcattgccttgcagccctttaggaaacccaatcaggacaggagctgcgggcaacctagacatagccccttttattttctgtgatgagcactggggagcacgtgggctgtcagaccggagtagctcagagcagtggacccaggctggggatcagaagagctacctccttgcctccacgccaacttcagagaaccttgcctactgtctaagtagccagcagcccatcacctcaccctccgtggccttgccttttcttttctccttagcagccctcaccacctgagtcatctgtgagatgtattagtttatctgtgtttttgtccacttcggttttttcccttgtgagaatttcagctccccaaggactgtgagctgtactctcactgcctccatcagtgggaagcacacagtagatatttgatcaaaaatttctctcctaatctttcatgacaccgtaggcaagtccccagacttgctgtgattcaaaagtcctgttcaatccaacttttttttttttttttttgagatggagtctcactctgtcgcccaggctggagtgcagtggtgcgatcttggctcactgcaacctccacctcctgggttcaaacaattctcctgcctcagcctccaccgtagctgggattacaggcatgcaccaccacgcctagctaatttttgtatttttaatagaggcggggtttcaccatgttggccaggctggtcttgaacacctgacctcgggtgatctgcctgcctcggtctcccaaagtgctaggattacaggcgtgagccaccatgcccagcccaatccaactttaaaactttaatcacacattcattataacattcatcccaattcctgctagaaccaagctctgccttgaccatggcctgaggtccttgcagtctggaagaagggggacttgctttttttcctcttctcgtcctcccctagtgcatgtgagtttagggaggaggggttaaggggaaagggctctaggctttttgccttgcagattgttctctctgactctccatatcttctccgttgtgggcatccacatgatgtttctcttcagggaataggtggggacttctccacttcaaaattatgtgatggaaccctctgctgcttctgctgctgtttagcccctttgccctgtgcccaccatcctggtaaggtagagtgaggctgcctgagcccaaacaccttccatggcacctactccttaaatgtcagtcaacacttcctcagtctgactccaaattattgttataaccatcttgcttttcataacccccatacctctgctgaactgaataacctgccccctaaaccctccccaaacccatccccacctcatctttttctgcatttctcacatgccttcctccatgtccacttgacagaaatttctccatcaccatcccgcattcctccctgtttctgcgagtctacttgcaacctatgctccatggccttggggaaatgctgcttcatcttcaagtctccctctcccttctagttcagtcactcttgaccttggtgcacactggaatcacctggggaggtctaaaaatattgacatctgagcctcgcctccaaaaagactaatgtaattggtcggggtggaatctgggtattggcatttgtttaaaaagctgcccaggtgattctaaaatccagttatgctgagacccactgggctgatgaaattaacttgtcttttttttctttttatcttgagacagggtcttgctctgtcacccaggctggagtgcaatggcacaatcatagctcactgcagccttgacctccctggctcaagcaattctcctgcctcagcctcccaagtagctaggaccacaggtgcatgccaccatgcctggctaatttctgttttgttttgttttgttttgttttgtttttgctttgtttcatagagacaaggtctcactatattgcccaggctggtcttgaactcctgtgttcaagcaattctcctgcattgacctcccaaattgctgggattacagatgtgagccactgtgcttagcctcacttgtctttttatcagagtacttgtccctatctactgacctttatccaccataaggctccaagcatctaggagagaagacagtgtcagattcatttttgtaaatctcacagcttaccacagtgctcagtaattaaattaaacacaataataatagctaaccattactgaatgcttcctctgtactgcacattctcctaagtcctttatatggattatcccatttactccctcaacaaccctaaaaggcaggtgctactcatcaccccacttttacaaatgagcaaattgcaacctagagttagggaaagtgcagtactgcagaggtgtagatggcagagcagggattggacctgggcagctggcctctgcacagcttgtatgtagtcacattgagggttaggatttggggagacacaaactttaagtccacaatacacagtgaaagcataacttcagagcccatgctaatgctgtgtggcctctgcacagcttgtatgtaatgtaactacccccacatagttactgagtgaggatgaattcatgaatggtgctcctgggcaacaccttacttaggcctgtggggaatttctcagtctagatttatgtcttgtgccactttcataatgactcatcttcaagacacctgttcagttattcatgtaatagctttatttaaagtttactttatattgaacttcacctacacaaaaatatccataatatgaaaaggttgatgctggacatatttttctagtgcacattgtcttagttcaggctgctatcaaagtaccatagactggatggcttataaacaacagaaattgatatctcacagttttggaggctataagtctgaaatcaagatgccagcatggttgggttcttgtgaggaccctcttctgggttgcagatggccagcttctcattgcaccctggaatgatggaaagaggactagaacgctcgctggggtctcttttataagagcactaatcctattcatgggggctccaccccatgacctagtcatctccccaaggccccacctcctaataccatcacatcagaagttaggatttgaacacatgaattttggggagacacaaactttcagtccacaatacacattaaaagaataactgtgtgtgtgcgcggacataccacctaaaataaaatcgccttcctcatacgtatatcaacactcatctgctataaatagaatttgcagccatccttctaatcaaccagcttaaccgcttggatcccagttatacctcagagttagtttttaaaagttcaactcatattagaacctgtttttaaaaagtacatctcttccaaagcaaaacacttttctcccagaattaaccagaaaacctaacaagactattaagaccatggcttttatttgcttttagttttatgaagcttcagctgctcatgaggcatttcacaagaaatatgcttccatttagaaagagtcctggggctgattgaaacccttgtagaatatgtgtattattgttacttttaaaatactcaccaaaatgtgctttttgtatttttgcagccatttcacaaaagccccatttttaatgcaaactattccaacctggcctttggtgttaggctggtctaagtgcataatctaagtaccaactgagtgctgagaactgtggtatagaaattcagagaaggggacagagtccatgggtggcctgacccagaaaaacgtcggtgggagagggagacttgattccaatcgtgaagaatagatttcaaaagggaagacagaagctggagagcacagtgtacaaaggcatagaaaaaagaatttactccatatcctttcatcctttaacaaatgtttctcctgaatctactctgtgtcaggaactttgcaaattgtatggcattttcattgcttttttttttttttttttttgtctgtttggctaacatttattggacacttctatactaggcattatgctaaggaatttacatgcattatttcttatggaaactcacaacgaattataccaggcaaggtttattattaatcttgtgttccatgagacgaccttgtctcagagaggctaagaccccagctggggttcctcaacctgtgagtggagctgggaggtgaatatggagtctttgtcaggcactggaacttttatcaaccacttgatcttgttgtgaatgagacacacgcagtgcctgtcctcaaatgcccagttgagcaggtgatactggcaattaatcaattatgattcagtatgatgggtactgatgagaggggaattaggaaaacaaatagcagtaagagataatgagcttcaattcttgtttgcaaaattactcaattgaatatcagtctatgggaaagaaagagagattgatcattgacattcattcttcccttcatttattcatttataaataatgttcataatcattatcactaattaatataaaaagatctgctacacccctagaacaagatttattattaattttggtgacaaagttcatatttcaaatacacttattaatttcaaatttagggagctcacttcttttcagacctgatttgatcctcattgctgttcacatgataatgtagctcaagattcatgcatcaccaaaaacgaactcacctgtagccagctacaggaagtcaacactctctactattaacagagtagaagctttcagctaagggagagttacaggaactggctttgccctcttgcctaaaacagatgaaaacttggacaaaaaaaccaaacaacaatttttaagactgttttaagatatcaggcaacaaggataggtgttctctgagagacgggacataagagataatccctgtgtctgctcctacctactgccttgagagggtttccagcccatagcctaggggggaggaactgaggcagagcccagcaggctccctgagcccaaggtggccagagttcatagacaaagcatcagaggagagagagagatacacagagagcaaactccaagggtctgtcaaaggtcctcacatagtatgaggcagagagctgaccaatatgttcatatgaggaaactagcaaagactgaagggggaaaaaaaaaaaaccaaccaccagaaaggcatttacacagggccagagagagtgccttctctcaccagccagactagaaaacctcattattaataaggcactgggtagagtagtcacagggtctttcctcattagcgagaaaatattagcttcctagactagacacgattttggtcctacctaatgtaactgccaatgggttatttttgcccgctgcccagacagagccaatttatcaagacaggggaatggcaatagagaaagagtttactacacatagagccaattaaatgtgagattagaacttttttattactcaaatcagcttccccccaaaattcagaggctagagttttttaaggtcagtttggtgggcagattgctaaggcgtggagaatgctgattagttgattgggggcagaatcataggacatcagagatgtcctcttgtactgagtcagttcttgggtgggggccgcaagtccagatgagccagaccagaatgcagggtctgaaaaatatctcaaacaccaatattaggttttacagcagtaatgttatccataagaacaactggggaggtgaagaatcttgtggcctctggctgtatgactcctgagccataatttctaatgttgtgtctaatttgctagttttacaaaggtggactggtccccaagaataaagggggcttgtttggggaagggactgttattatctttgtttcaaagttaaactataactaaattcctcccgaagttagtgtggcctacccccaggaatgaacaagggcagcttggaagttaaaggcaagatggtgttggttaggtcagatctctttcacagtcataattttttcactcataatttttgcaaagtcagtttcacgaacaaatcttaaaagccagaactaaaaggatcaaactgattttaagtatcttaactacctccaaaaacaaagttcaaaaatatttataggaacaaaaaatatccagccacccaaacaggtaagattcacaatgtctgacatgcaaacaaaaattaccagggaagcaaagaagcaggaaaatgtaactcatgatgtgaagagaaatcaaccaaaacctacccagaactgacacaggtgttagaattggcaaaaaaataaaaaggattagcataaatgtgtctcatatgtttggaaagttaagtagagacatagaagatatatttttaaaatccaaatcaaatttctagagataaaaactacagtgtgtgaggtaaaaaatacactggatgacattaacaacagattagacaatgcagaaaaaaaaattgtgaatttaaatacacagcaatagaaactatccaaaaggaaccacagggcagtgggtgaaaaggaagagggctttttcaaaaagaaggaagaaaggaacattaatgagctacaggataacttcaagtaggctagtaggcaggtaattggagtccatgaaaggagagaaaaggagagaagaaaaaatatttgaaatcataatggctaaaaattgatgactgatactctcacttggattaaatcatttgttcattcattcactagtaatttttgagattgtaccatgtgcacaagtctgggtgctggggaaacataagggagaaaaagaaccttcattggtttctattccagtgaagggagaggaacaaaacacaaaatgacaagtgagagttttaatataattctcagtcttgccactgagagccagataactctttgtcctgggcattgcaggaattttagcagcatgcctggcatctatcctccagataccagtggtaaatcactaacccgctactcgtgacaatcaaaaaaatgtctccagacattaccagatgtccttagggggaagaggagccagtaatatattagaagtgaaatctactaggagaaaaataaagcaattagcagcatcagatatgccgggatatattatagcaacttaaagtagagtggtaaagaaagacctcgatgaaaacgtggccattggctcaggcgcagtggctcatgcctgtaatcctagcactttgggaggccgaggtgaggggattacctgaggtcaggagttcaagaccagcctggccaacacggtgaaaccccatctctactgaaaatacaaaaattagacaggcatggtggcacacactgtaatcccagctacttgggaggctgaggcaggaaaatggcttgagccagggagacagaggttgcagtgagtcaagatcatgccactgcactccagcctgggtgacagagtgagactctgtctcaaaaaaaaagaaaaaagtgacaattgaaaaagacttgaaagaagtaaggtcacatgctcctggcaggcagaagctcagcccagatgcaaaggtcctgaggcaacagcctacttgacatgttcaaagaagagcaagcaggtcactggggttacaaaagagtgacccagggggaaaataaaacaaaaaaaaacgggcaggaaagcaatgagaatggaatggaagaggggcacttctccaggaatgagcaggagggtcctgttgtcacaaggagtgaggaatgctacttaggcaaaaacaaattaatgcttacgcttgccaactgtggccttggacatgatgtttaaacctctttgggcctcagttttctcatctgtaatttgccttgcacaatcttggcaaagattagataagatagatttgtgaaggcacctcgtaactgtaaagctatacaagcataaacaagcattgtttaagacgtaaggatgacatggtttaaacaagttataagtgcagtactttttgggagagttaagttatgaagggtttttactggtggaatttatggatgtagtctatatttatatacactccctatgaggatcttggttttccaccacctggatttaatttatatgatgttacattttactgcacacactatataagtttagcaaagttgacactcatagccaaataatctatagaattttaagatgttcagttctgacaggcctgacttataatccccatattggcctctctcaagctgtgtgaccttagacaagtaacctaaactctctgagcctcatttcattgtttgaaactgttaattgtaatatttgtctcagaagattgttgtaaagattaagtgacatatgtttaatgcatttatttgtatagtggtttgcatgctgtaaatgtaaaatatttgacgtattggcattgtatattattctataataaataataatatattaagattaagcgaccttgttcaaattatactagcttaggaaagagaaagcactggtgtacatgtaatgcttaataagtagttgacgtaatttgcacatctgtccttacctaaatctcatgttgaattgtaatcccctatgctggaggtttggcctggtgaaagatcacaggggtggatccatcatgaatggcttgggccatctccttggtggtaactgagctcttgctctatgttcacacatgatatggtcatttgcaagtttgtcccaccaccccctccactctttctctcttgctcctgctctgaccatgtgctgtgcctgctcccacttctccttccgccatgattgtaagcttcctgaggcctcccagaagccaagcagatgccagtcccatgcttcctgtaaaggctgcagaactgtgagccaatgaaacctcttttctttataaattacccagaatcaggtatgtctttataacaacgcaaaaaatggcccaatacaatcgtccattaaaatgagttgaattgtatctcagtggttgggatagtcaacccatatcaatttatactgcttgtccagacactgccaaccccagaggagaaagtataaaatccaggagtctaaatgcagtgccaccatatcccactctccactactgagagaaggggtcaaaatagaaataccaagtcttctgtgggcttctgccacctcacacactgcgaattgttagaaatcgcttttgaggaaacagaagtgtctcctttcattctcctctaagtaagggaactggcagcatgggggcagggagatggtgtggagaaggcggaacccacagccctgggatgaaaggaaggactacacggggatgaaagggagggcgaagagtgaagacgatgctcaaccagcaggtgagagtcgagtccgcctccctcactccacccacctccagaccaagctccccactgccaggccacaaccacatgcaccaacctgcccagcccggatacgttttaggtctcacttgtcacaacctccggtgcaccaaacagcttctcagatgcaccgatgtacctgcaggacctctctgttgaaaccttctcattttttgcaagaatattcatcaagtttatataatttgcatacctcttgacccaaaaatttcatttttgataatttacccaaagaaaatatagatacatgagtatttaaaaataaaagtgtgagatgatcactttactactgcttataatactctagatgtacaactatacacactgtgaatgtccatcaataaggatattagacaataaacaatgttataaccaagcaatggaataaatgtcacctgagtcgtaaagaatgaggcaggtttagctgtgttgcaatgggaagtttctgtactactttgtcacatgagaatttatgctggtacagatagcactattctatgtttgtaaaattttcataaatgatacatatttattgaatgccttctgtgggcctcgctgtccttggtacttgagaaaagcactgagtgaagtagatattatccctgtctttgtcgagtttgtagtctaatgggagtatgaggaaaagcacaaagactgagaagtaaacagaactgctgacacagcaaagatttttaaaagggcaagggactctggtggagacgacagtggtgggaggacagccttagatgaatgtttagggacaatctctccaaagagatgacacttatgaccttaaggatggatggaaattacctacgggcagacagaggagcagaatgtttcaaacagagagccagaagtttggaaataacctgtggtatgtttgaaaaactcaaagaaagtgggccagaaaatggaatgaaggagcacgtggtacagagaggatggagatttaggcaggggcagaccatgttagacgttggagatcctgcatcagagtttgggcttgactccaagagctgtcagaagctactggagggtggtaaggagtgggaagatgggatctgttgagtaaagaatgtattgtgagggtcaagagcccaaccagagacaaggccagggctgttgcagtcagaaggtggagaggcagtagcttcctgtcctggggtcgtgagaggtgagatggtgaaaggaaggcagattcagaacgcatcctaccctcctgaggaggtcggggagaaaatcagttcccctatcacaccccttgcacagatgaacctcatatctcaaaagcaaaatagttatttttaaacaccagtactttttctttttctttttctttttttttttttttttttttagttgatataatccaactctgtggaaattgtgggaaacgccatctctggggataatgtacacatcatagataaggagactataaagatggaaaatatcgataccttacacaacttctttgcagaattggaagaaaagggtttttgtttgaaatgcaacgtgcactgctgtgtttgttaccctttggctccaaacaatgtccctccaaccaacagcaaatgctgaatatgttagaaagagggggagggaaggaagagtgactcttataatctcatgattgttctgcacgcctgtgggcagaagaagtatggctggaattagggggtaagagagaaaggggtgtgaagcaaaagtatgactttgagagttcacattcagcaagtggcaactgtgacaactgttttgcccctaggacatagttgacggcaaggaaaaagaaggacaagaacttggaactgcggattgctctgtccctggggacccagaaggactggagactgcaaaggacgattcccaggcagcagctatagcagagaataataattccatcatgagtttctttaaaactctggtaagcagttttctcctcttttcccctccactctattgctcaaaagttttgttaattctaagaataatgcacatttgaatgttattgtactaaatgaattatcatggtgctgttggagcatgggagagaacagggacaagatatgcttcataagaaagttgtgttatatcagacttttagcaagagagcccctgaagctcggaaccatggtataagcagtggatgcccaaatcatgtaacatgggctgtgttgtaatggaattctattgcaattgaatgtcttatgttcattgatcataaaaataattgaaaaatatctccctgtgttgtggacatctcaaagcagttttgccactcaagtggcaaataaaatactgtagaaatcattcaaaaaaaaaaaaacctgaatgaatgaatgcatagtgaagcagactgtcccaaatgtgtttgggctattttcaaatatcaagactaacctcaaaagaaaaaacaataaatgtcaacagaatgtgccacaaacaccagagggttgcacatgtgtttggagtaatggtaaaatttattggaagtctgtggtcttccaggagacaattttgaatgtggtcaaactcttggtaaatgtataagatcagatgtatctcattataagatattaattttgttaacttttgtattacccggcggtcctgagatttctattgaactaaaaatacttctcattttattcttgacctgtatggtgaactggaccaccctaaagagttatttatctatgaaataaaaatcactctaaagagcaatgatttctaatatttggctttctcaaacttttaaggtttcacctaacaaagctgaaacaaaaaaggacccagaagacacggtaggtagttggaagtgtgtatgtatatatttgggtttgcgcatagaattggatttggatttgtgtctgcctgcttgttttttgaatacatatatgtgtgtgtgtgtgtgtgtgtgtgtgtgtatcatatctatatataattagcaatttaatagtgctgttaggttgtcattaaaatattttatttacattaacagtagttaaattaaaattttactggaaagcttgaaagacgtgccaactctggctaaataatatcacaataccaatttcttatatagcataagaacagaatactaataattatatcatcatcttagtctttttagttgtgcgtagagggacccagggaatatagtaaaaaacagtccatgtaaagtagaagaaagcttttcagtaggacgtggactctaaaaaaataaagtagaagaaagctgctatatttttgttttctaaaaaatatgttatttttcaatgtaatttgaaaactaaataaatctttactgcaaaggcagtggtttggtgaaatagaatagtttccctggggcacctgccaaacggatggccatgcagaggcgttaggacacgctagagagcctaggttcttcactgtcatccaagaattcagcccactctcctcaaaataaacttggtttgaaataccatcttcctagagatgttctccctttacactggacaaggctcgttacctctagtggaatacacggtttaagtttcacgggaaccatgaaggaagtttaacttggtgacagataagtgtcttgggtccttcttctgatatcggaaagtgctttgaaaaacagtgggatcagatacatggcttggtttgccccctacatctgctacccacatgtgaaggagctggctgtgaaaagaggatcctagattttgtctcaaaagacctgcatttcagctccagttctgctacttgatagtggtacaatcttaatctgtctgaacccaagtcttcatgtctataaaattgggacaaaaaaattctttgtcctggaccccaaggttgaatgaaggtgtggcattgttttgcaaactgtagagctctgattaaatgtagcgatccctatttcaatgatcacagccaagattggttgaatgacatgactacatttgtattgtatttcttggtttcctcgagaattttcttcttccattggaaaaaaatatgtatctgaagcatctacatgcattttcctataaagttattcatttgctccgaggtcatagggtcaagttcaatgaatggttggggcaaaacgtatttcttttggttctatgtcttgcgttgtttgaagccacatagcgtaaaaggctctaaacagtggagtatgggaatgtgtgtgtggcttcccaagtgacctgatgcactcattctctttagctggtcatggaccaagactcctccctgacccagaatgtggtcaaaactgaacgtacccagctgataaaatctcaccgtcctgcccaggaagctgtggggtcacattagtggagctgggtctcaaaagcgggttttgtgaatgtaggttgtccatgacacccacaaacagatgtgttttctacaaacctggttctcataccttgcaattttgatatcttttctactgaagttcttggattcatgcttttgaagtctgtattgttttcagcccactaccttccctacacgaaagtccctgacatttgtaacttgagccaacaatcttgagtggttgtagccaggctatttcggtttcgatctccctctactttgcctcagtggattggttcacactacacattttctctgcctggcgggggtctacccatctagaagtgaattgaaatttttgcaggtgatattgcttccataaagtttctaatagtgaatcaaaggagatcgatttgagactaaaagacattcagcagcagtctttgctttgactccaggatgaaaaagaaatattttgtctgcaggtattttttactttaccatgtagcaatagcatttagatatctacaactatcaagtagagactgcattatcttctcctgttatttgtcttcagcaaatggagatacagagttttgttttgttctgtcttgctttgaggtgtgttcatctgggtcatttaaataggtcactgttgaaaatcactgtatatctaaaattgtgaatatggaagtttaaaaaagataaacatttacagggtgttttgtggttagaagaggggatggtgtaccaacagttaattgtcacagcgtattaatgcactttaaaacaacagaaaacaaaaagaattttgttcaaaaacaaagttctgaggttgtgactgctgttgccccaaaggcatcgaaagcagaaagtgtctgtgatggacaagctggtcagaagacatccgagatccaggctagaggcaccaagaaaaagcacctggatagccccaggctaggactcgcctttagaaaattctttaggcataaggtctgtatcttattaaagtaggaggaaaaacaagaactctggtcttcacaagacatgtgccatcctgagcccacccagctcctctccagtaaaaacagagccttgggtggtggggatcattaaaagagaattaaagatgatatgaattaaacttcagtgatttttaagtccccatagtcataaacatttcaaacaggtgtcttcctagtgcggaccagggttctggaactattcttctaacccagtatttcccaaatgtcaataacttgtgtaccaccttcaccatttttgttagatgtactattatttgatatttttacattgaaattgacctattttctatttaaattgtatctttaaaagaaactttatatcatatatagaaaatcagaataatttttcctaagaggaaggtaagcattaatttggctaattaaaaagacattacattctagctacctcatttgtattaagctctgaatctgatgctctttctagctttattaaaaggtgattaattggccaatggtagaaaaatgttaaagatgtaccatcaccagactgagactttctccagaatgttagtagaaggattaaatgagagttggaaaaggagaagtggtttcactatttgaatactatgtaatatcatatttctgcacaatctataatcttctctgatccaccaatggtatgcttcctacattttgggaaatactcttctaacctcaagtaataatgttatctttctgtggtctgtttcatctatttccaatattaactaagcttacactgaacccaaataaaagtccaggcggaaaaaagcaatgaatgaaggcagagcatgtttcagctccatgtccttgggaagttaggacaacactgaagtcagtttgggaaatattatgcttccaatgtctaagaagacgccagtgtttgtctgaaaccatcagtttaaaggatccctgaattgggttagcatgcttgaaaatttgtttaaaatatcagccattttccaccaagtcaaaagcctgtattaaaaaaacttccctacctggatgtcacagtcccgggattgtatatgcaaataagcactccatagaaagttctcacagctgaatctgtatttgcgtaagcagactatgttatgaagccacctttcaatttccatacaggataattttgttctgtgaagagaaaagaatggggaatgataaatattgcaacgggggagggaagattaaaatgtgctccaacatcacataacttagtaactgctgggaaataacttagtaactgctggtgaaacgcgtcatagatctcataggaaagaatctagtttaactcccacttggagcttttgtaagtaaggggccttgaaagtttaagaagtgtatgatgtttccccagatctgcctttcattatgacattcacttcatgcactacaaaattttacgtctgcagtatctcttgccaccaataaagggaccacccaagttcaatgttatcattcctagggcttcccaaaaactgttggcctcccatcttgtcactgaggtagatggggaaaagacaggattctggaagagtgggaagaggccgcgggaacagccttctggaattctgtaacacagacacaaggacttcagggttttgccttgagtggcattcagtgtatttttttatgtaagtgtaaatcaaagtaagggacacctcccaaatgttctgaattcttatttacgcagcagtttgttagagctcattggcttttacctctgcacctgagatagttcatttctttttctcttttgattatttctgttgtctctaaagataggaaagtagggcctttaaataaccagccagattctctcagtgacattatcatgattttaggaggtgtgatactctccatttccccatgggtttgtcacctggaaaagaaaacgagaaattcaagcaaattgaaggataaaactattttgctattaaaaaaaaagttaccaattctggttaattctggggctttatttctctacatctctatgatccttcttataaaaagaattttctcagttcaaaaagtagggaagtctgaaatcagtaagtgaaatacatttagtgtcagcttttgctgaattggaaccatttttctcggcctaatggcatgtgatgtctcagaatcaaactttttcatgtggccaccactgtttggtgacaactttagacacaaaacagagcattcctttagaatgcctttgccatgccccaaaatgctcccctctctcctcaggtttccccagtgcccaccctttctgtaaggcagctgaagtattagcaagcagcatgcatgatttataagctctaccattcattcattgtttttggttcttggtgtagtgtttacatcttactaacatctcctctctcccacacccaatgtgaaaacaagacgaaaatttattaagaaggtaaggtcatttgacatacaatctccaaattgaatccactagaatttcatgggcagggccaccaggtaaaatatacaggactcagttaaattcaaatttttgataaacaagaaataactttttaatttaaatataagtatgtcccatgcaatatttgggacatgcttatgctagaaaattattctttgctgatcttaaattaatatttaatggaatatctcatattcttattctcatgtgctaaatctggcaaccctattcatgagattgcctctgaaaacacaattaaaatttttgtagtctcctctgtaacgcaaacaaagaatatccagttggttgatgctggcagaactccatctgggggacttctttgggaaggcaggagagtggtgggcaggaatgaaaagactaatggtgttctgactggtattctacaacccagtgagcaggggtgggtggctggaaatatggcatgacaggatcttgtgtgggtgtctgtctctggtccctgtcatagactgtaattattaattgaatgactgattgtctattttgtgccagaagctaggcctgatgggaattggggacgtaatcatgaccaagactttcttggtcttaggatatgatgatgaccaagactctagcaaaagagatacatattcaacaaacaactacacaaataaattagaattatatagttactataactgtagtagggtcatgcccttgtaatgtttttgaagggtttctggatatcctcccaatgcaaagagaaaaaaaaattggtcacttccctatgaaactgatcagtatagatgtgtttcccaatctttatctcagtatcagccctcaccatgatacttttttagactattttttgccctaatcacccttccctccacgaaattttaatgtaacaaatattctttatacctgttaatgcactgtaattctttaggggagacacagaccatgttaatatctaatttggcataacccttctcccaagaacaaatgcaatattattttttgttgtatattgcccttgttgagaacggtggtatagatttccctcactgatgggtggaatagcccagggagcaggaaaccttgattcattggaaacagtgtagtatggagtcactattaatgcttgggtttggggatcagactccctggattcagctgtcagctctgccccctcattagtgtaactgtgggcaagttacttagccaccaagcaactaaatttccctgtctgtgaaattggcataaaaattagtgtcttcctgtaagttgtagcatttgatagtaccattgggaaattacagctaacagtaatttattggatatttcaaaacagctagaagagaaaaattgtaagcttccaacacaaagaaaggataagagtttgaggtgatggaaattccagttaccctggtttaatcattgcactttgtatacaggcatcaaaatatcacatggaccccccgaaaatatgtaaaactatgattcatcaattttaaaatacaaaaaataatcgttcgtcataggacttttgtcaggacattcaggtgcttaaaacagtgtctgtcactgttaccttttattcttgtcatcaaataaaagtttaaagttggaaattatgtcttcaagatgcaacagtggtccagggagactaagcagagagagaaagggtggtggctgagcggtgaaaacggccaagtatgtaatgcattaggtaaactggagctgtcccaggtaaattctggcactccaggacctggggaccttgttttttgtaacctctatgtgactctgagtaagtgggctaaatgcacatcaaagggaacccttgagccagaaaaataacacagcatttagaaaaggtacaaagccaagccacagaagttacaccaaaatagcgtggggccatggagccgcccttctaatgacttcggcagattgatgattggcttaaagcaaccagagccctttcttagagatggggatgaggtcagccccaacccctggattcttggtctaaaatggaccactgggcaaatggagattctcccaggaaagcagaaggagaggttgttgttgaagtagccacgcttggccactctttgctccgatacttgccgaaggaccttagggcagttgttccctgtgcgtggaaaactctcttcttcccttctctggttaattttcagtcacccttcagatcaaagcacaaccatccttttctcagtgaagtcttccctgattttcatgagtggatcaaactccttgatttagctttttatgggattgagaggaatagcctcaaatcgcctccccactcagtagcacttattacagttgaaattttacatttatttgtggaattatttactgtcatcctctccttgaggacatgtaaccccagcacttagtacatatcatggctcatagaggacactcaaagtggattttaaatgaattattgaataatactttctcttattttctgaaaaagaaaacaagctacttagcatgtgtgtgttaggaggaggggtacttaccctttaaccagtcccctttaatttaattaccgtttagagctaaaatagcaccaggtactcaagagcgtttgggacgtttgtaatgcagaatcttatgagctcagccattttgacttcactgtctataaaatgcaaaggttattgtaaattccaacattttgccattttgtatacttttaaatggaactggagctattccagtatcaactatcacaaaattcatttccagacgtcagttctttatcttaacttgaacttagaatctgctcaatggatgactccttcttagtattaaaaatttcagcaaagaagatgttgtgtcttgcatcaaatagtaaaattcatgttatttgcaaacatcctttggagaagcaatatgctgcctgggaagagctctagaaaggagccagaagttcagacttgaggccaggttgtgcccttgttcagcgttgggcagatcattggcctcagtttccccatccatgaaaattcatgcattggatcagatgggctttaagactctttccaggatcaaaaaatactgtcaaactttctgaatttgtccatattctatattttttttgagatggtgtcttgttctgttgcctaggctggagtacagtggcacgatcatggctcactgcagcctcctggactcaagcaatcctcctgcctcagcctccaagtagctgggaccacaggtgcaagccaccatgcccagctaattttttattatttgtagagatagggtttcaccatgttgcccaggctggtcttgaactcccgacctcaagaaatcttcccacgtcggcctcccaaaatgctgggattacaagtgttgggccaccacacccggcccataccccatttttattgcaatatattttttcttttagtcagaaaatttattcaaggatattacatccctgggaatttaaagggattgagtcataagtatccagagcaaaaaaaatcataaaatgaagatgtttaggattaagaggttaggtcagatgaacctgatgttaaaattatgagtaccaatattcactcatgtcaagataaattctgactataattctcccaactcttcctttatctcatgactcagtgggtggcagagcatagaaattaacacccccttgctgaagaaatcagatgtcctggaattggacttcagtgcagctgctcagagagagagacagaaagagagaaaggagatacggacagagggagagagaaaaagacagagggaaggaggcggaggaagggaagaagggaaggaagagagaggaagagaggaaataaagaccgaatggataacatttcaagaagttttaattgtggagtgtagggctgcacctaaaagtgaagaaatagggtttgtggacactcttccaattcaaaatcccttcaccaagttccagcctagttgccttttactaactttatagtctaactcagtcatccccaaagtggagtatggagaaaaatttcagaagttctatatttaatttaactctcctttaatttctaattttgatcagtaagatgatgcatgtttataatatatacataaataagtatgcatgtattgaaggtggaaattcaaaatgtttttactgatgggaacttgattgaaaccatttggagaccagtggcctaaataagaactccatattctaacagcaaagggtctcttaccaccaccttgattcctaatgagttacttacataaacataattaataatgcttctatgtttattttttgaaagaaaaatatcttaactttttctgagattttaacacaagtccacattcacagtaaaaatttttaaaatacagaaaaatataaagaagaaaattaacattatgtataacctcagcccatgtttattaaaaagagatcttccatttttaaaattttgagaccattttgaatgttttccctccattttttttaactctttagggtgctgaaaagtcacccaccacttcagctgaccttaagtcagacaaagccaactttacatcccaggagacccaaggggctggcaagaattccaaaggatgcaacccatcggggcacacacagtccgtgacaacccctgaacctgcgaaggaaggcaccaaggagaaatcaggacccacctctctgcctctgggcaaactgttttggaaaaaggtaagtctgattttcaagcgttagagagtcgtccgggcggggatgactccagaacttatttctattgggctaactgttgtactcaacaatgtatggaaggtgtttcttcttcttcaaaatgactcggcttcccattgagtagaagccttctaatgtgttcctaggaaaaatgaaacgcctgtcatgttataaacatgtgtttcgtggggaagaaaaggaaatgaacaagtagaatttttcattctttgagtgacttcatttcatgacagagggttgtggtatttcatgatttcattttccttctgaaatggtttaaaaccctgacttcttcctggtctctttgagcactcttactctggcaagatgaactacctaggggctgtctgtcttcactcctccccagccagacagaatcattcattatcagccactaggtctccactatccttttagaaacctagggtgtccatcagttcaccaccagggtaggcaaacactgtgctctatgacaggaaaagtcaaaccactgtctgattttgttcccatctgaggtctgagtggtgcaaggacagggagagtggggctgagttattctagatctattccttaattatcattgctgagcaagccccagctgctacacatgtgcagagcttttgtctgttttaaatttggccaaaagatgagcaagaagttggagatgagggtgtgggtggaattcatagagctggaaaaatctaacttcagaatttcatcaaaacatctatcgcacttggcacaccatgcaaagcagatgatgaatgcagatgccactgtggtgtcagctttactccgtcgtccagaatccagctggatgcggggccccttgcctgtttgcttcctgtcatacagaaaccttccttccaggttcttcccagaacacagtcttcactatttcataaaaactttggatgatgtcagctgacacattctgttgtaatcctttttcttcatcacccaccattacttatcttaaaatatcttttaccagcaatataatagaagaaacaatttccaagtgaggtatatgtgtatattggagacaagagagaagacttaagtggcccatatctgaataattttagttaaataattaccatgtattcatatgcatattcaaggtgtcttaggaaaaatagagttagcacattaaatttgagattaacgtatgttttgctcaaggttaaataagcatattttgtttaaaaaggaatctaataaaaagacagtattacataaataatggttctgatagtagataaataatggtaaatttgggtcctccaagaagcagacaccaagacagaattgacgtgcaagagatttattggaggaagacatctgtgaaggagaagtaggagtggcagagctaggtacagagagccttcagactacagagagttctgaccatctagcaagaaagagagagaaggaaggagaagtgggtggagaaagcctcaaactgaaggtggtgctaagaaagtcctgaccaagccaatggagaatcatagagtacagattgcctgttccagaggcccacactggaccggaatgaatggcccagtactcctgtcgtgcccagtcattggtaggagcccccagggagaggagcagaagctgaaggcatgacaggtggggctgtctttcttgcaggaatctgagcagcacacttccatggctgctacagatgatacaatatggtaaaaaccacataggtggtgtgccagtggctaaagtttgagaaacactgatgtaaaagctaaaagtttgaaatcagacagctctgactttgagtctcagtttgtctctatgagctttcgtttcctcacttgtaagatgcaaatgataatagtacctatgtcatacaaatgaatacaaatgaagtaaggattaagtgaaataatgatggtaaaacctccaacactggacctagtacaaaagtgcccactgaacagtgttacctctcatctatttcctccgtgctcaggagggctgaagaactaaccaggccgacgtctttatctttctatactgtccagtttgagaaagctgctaaactattgcctcaagtgcttatttaatgtttggaatctacaagagatacagtggttcttctttgaagttcaagctattcctttgaaaaacaatgtcaggacaacttgacattcatctccctaatgatagaatttcatttatttcagtctcactgtcttttgagccactatttagctttatttagtatatcattaaaaatatgaagttaaaagaaatcaaaaaccaaatcccctgtgtctctccttcttgcacccaatcagaagaaaaggctcttcgtcaaagttttacttattcaacaatattgtaattactttatttgtgctaagtactttatttgtgctaagttgttttgtgctatatagtttgtgctaaatactaggcattgaaaaagtagcagtaaacaaatgtctgccctttcctagcttatattcttgtaagaaagcttatattctagcagaaagcaaaatgaggacctttgttttcttttcgttaaattacaaagactatgattataaaatcacccttgtaaatttttgaagagttttgaaaaatgcaaagggaaattctaggaaattcttacattttcttatattttcactgataactaacctaacctctctttcttctctcatttttagttgaaaagctttcaaacatattgattttaaagtttataagcctgtagttacagacagcagaaatgaatttttcccagaacaggctatggatatgaaagtataagttgttttgatttatagtctttattgctagagtagttattattataaaataaaaaaatacctttaaggaaaccaatttcaaattatgttgtactttccaaaaacgtgtttaaaatgcagttaactggagtaaatatgccatttattgttctgagtaaattggattctcacttgctctgtgaccttacataagttatttacactatttgagtttcttttcctcatttgttgaataagaggattgggatacacagtcttgataattcttgtgtatggcaaggcttacacaacagaatcagaaaggttgagctgtgtatccctggacaaattggttgaccactcaaagaccctcctttctaatctgtaaaataaggactgtgtttttctcacagtgttgttataagaaaccaataattgtacatataaagcacctaatatatagtatgtgctcagtgaatgatgtcatcatttcttcaagtatgaacaatcagtggtcatgactaaacacccacgtgtggcttctggtgttaacaccacctaagtacaaaacaagtataaaattcatttgctagcatcaaaagatttgaaatccatttggaggaacatgatacacacacacacacacacacacgcacgcacatgtatttgtaattaataattgatatatttggaatatcttcaaaatatcccttttctgctttcctttgggggagacaaagagtggagtgggaaaataatgtgcactctgaagccacagagacattatcaaatctcagttctgacagttactgactgtttaaattttagtggagcacttaaactcttgagcctcagtttcttcagttataaaattggccaatgacatctatctttcgtgtttattgggaggatcgagtaaaaaaaaaaaaaaaaagaacgccaaatgactgatattcagtgaattataacccgattctgaaacaacgaaatttgcaatttagtattactctgtggagtacaggtaacaaatgctacggttgtttagaaaagggagcaatcagtgtacgtcaaaatagacttaagaacttaaaaaacgtatctgaatcatttgggtgatttgtttcaaatacagattttaacaccttcccatggggattctggttaagaaagtctgggcatatgtctgggcaattatggaagcacttgaaagatgggctgaccaatctgggcttaatagaaaatgtcttagggctactgtgaagttaatggactcagaagagctgtcacatgatcaaaatgatgcttttagaagactcactaggaacagggcaaatgctggcttaagtgttaccatatgaaagtcttttaaagaaaccttaagaattgaatttgctctttaaaggagaggaaactctgttattctagtttctatggataggttatctgctgtttagctccccattcttagcaatataaatgtccaaacaggatcccgtagattttaaactagattttttattgtcactgttaatgaggctggacctcaactgtggatcatccaccacaacatactcattggcagtagaaaataatgaattgaaaaatgatattcctggctccctagctccaggcttcctgttatatagagaacatacagaaagaagggagaagttgccttcatttgtctttatgtatgagcatggaaaccatgcctaatacaaatacaagttaaatgtgagatccaggcttggctcaaagatgctcaaagaggacgctataatacatcagtcagctttcaaggagagtagagacacacctcaagccccaaaggcagatgtgatgtttgagtaaaagcaacagtttattagatgttccaatagagacctagaaattaaagaagattggtttccatttgaatactagcttggaatacaacataaagcacttaacccactgcctgacaataatagcctaagagtggccctataatgtgggttgtcatcactattatctctattagcattactatttttttcagctctgtgcaattgcatctaatgcatgctaagaagctggaggaatgcaagccgacaaagaatatttattaaggaacaaaacatattgcaaggagctgtcttcgggaagccctctggaatctggcctcagccctgtttattcaaaatttttatcagttaacttggacaacgaccaagttaaaagaacatttatcaagtttacaagctgggtgggttcactagtgcagtccaaaatataaacaatatgaatctcaaaataacggcacaatgggctgaagttagtatgacctagaatttttggttttcaaaggtcaacataacactatgttatggtacttgggtcatcaagattttaactgagacccacattgtcccctacaccattccaactttggaacctaatataacctattagttagcagtgttaaaaatgtctgtttataaggggttccgtagcaaacatacatctggcccaagcagacttaagaacatttcaaaagcaacatagaattactcaagaaaaattctaaataggtctagtagatctagccagtgtcatttcttcccaacatttataaaaattgctgttgctaattgaaaatataccatgtgcaggtactgtgctaagtgctttacataaacaaaataaatatcagcaattttcatagaatgctgaacatacatgaatccatgcccacacaaatcccatccagatagttctaggaatccaagataggtgatcatgaatcagcctgggctgccatatgtccctactgggtggtcacccccaagccacaccactgccaccaccacagccaccaaggagatgatccgtgccaatttatcccactcatcactgctgttgggactcccaagcccacgagagttcacctgtctcttgcaaggcagcaggcagaaaaccttttccttccatgttgtgcttagctctggaaggagaatcccgctgcagctgcttggaccccagagtggccccatttggcaagacccactgtaggcatccatacagccctttttctccccagtagacagccagttcgagagtagctgagctggaatgagttgttctaccagccaccagcaccctacccagaaccactatttcccacaagccctggaggttgctgattctggagttcttattgctcctggtaaattctcttgctagggtccatttcttgaaacctttatttttgctctacttcaatacattctggcttgtagaaaagcctatagaccactgtaccctaattccagacatggtttgagttgttcctacccctcccccataaacataccttccaggatctccaactcccatgtaaatgagggtcttcatgtaagtaccaagaggaaccatgtgggtttgactccagccaccaggcttcagtgagtcacagctgtgcttcagccatgattttccctacacaggccttattttattttttccttaaaacaacgctatgagcagtagatagtctaacagtcagcctttgggtaagtgaactgaggtgcagagaagtgtgattaatttgctcaagattgcatagctgaaacactgaatttgtacctgattccacagtgtatggtactctagacttgggttctgagcagattttcttttacatgtgtcaaacactaaagggggatcagaacctgccctcttattatccatttttgaattcttattttaactggatatttcaacaaccactaacagaaggctacacttgcaggccagtgtgcaaatgtacaagaatagttcaaaattatttagagtgactcttggacacaatctgagaagcatttaatcctttacatagtgcatttatctcctgttttcattctataagaagtctcttcttgatattcacaggcatttattactgtacaaacacctgctgatctcttttttaaagaaagacttaaaaacaattagaacttactgcatgttttttatctattgtactttttaatacgtactactatttacagcaaagatgttgatatgacatttgctgtaatgataaggcatttcttttaaaatatatttaagaaaaaaatattaagtaaaaatatatttaagtaaaaagagagtcagtttaaagaaaaacatcaactgaatagaggtggtacatggacaggtcaagaattagaacatggttttttgttcttgcgatagttgactgagaatgatgatttccaatttcatccatgtccctataaaggatgtgaactcatcattttttatggctgcatagtattccacaaaaaaccaaacactgcatattctcactcataggtgggaattgaacaatgagaacacatggacacaggaaggggaacatcacactctggggactgttgtggggtggggggaggggggagggatatcattgggagatatacctaatgctagatgacgagttagtgggtgcagcgcaccagcatggcacatgtatacatatgtaactaacctgcacattgtgcacatgtaccctaaaacttaaagtataataataataaataaataaattaaaaaaagaattagaacatggtatgaaaatcattgaagtttgagagatgctcaactggattatttcccaaaatgagtgctttgctaagtagtctgactttaaaaatataaaatagcaattccttttgaaaaagacaatatttataatgccagacttaaaacatcagaaagatgtggaggtctgaaaccataatgaagatttaaaaaatctgttcagaagcagccccttctattcctcaccatcatctacattggtgatggaatctactccaagttcccagttgcttctgaaatatagtgagcaatgaacaaccagaaactttctagacacaggcaatcaaagataaaaactagtcttgttgcaataaactgggacaggaaaaagggtatgtaaacctagaagtgctgttcttaaataatggaagggttttctcagtctaatataaacagtataatgattcctgaaacttttgtgggccggccttgaggaggtctggctttaaagataccatttggttcattacgtgttcatggtattaaccagtgtctgactaatctcagagaaaaaggggtgcagtttcaagaaagtatctgatatggtttggctgtgtccccacccaaatctcatctcaaattgtaatccccataatccccaggtgtcaaaggagggacctgataggaggtgattggatcatgggggaagtttcccccatgctgtcctcttgatagcaagtgagttttcacaagatctgatggctttataaggggctcttctcccttcgctctctcttgcctgccaccatgtaagatgtgcctgtttccccttccaccatgattgtaagtttcctgagtcctccccagccatgtggaactgtgagtccattatgcctctttcctttataaattacccagtctcaggtatatctttatagcagtgtaaaacggattaatacagtaacactactgctaatttcttctgaacacattacaatttcctgataatcagaagctttcagaaattcagcaatctcttttaggaacatttttgtgcccagagaaacttcactgtgggaagaagataactagaaataaattatgcaatctgaagatctcatctagagagaataattctgtatgtgaagaaaggaattcacacgattgccgaaaaaatgtgtttctgacccttgaagtcatcatagcaggggaaaatttggcttttagatgtaaaataaatgtattaaaaccatttccaccactttctagctgtttaactggaacaagtggcttcacctctctgaacttctatttcttactctgtaagttaggatcacaatacttaccattttggggtgctttaagtgagatgatatataacgcaagatgcctagtgcagaagatacatttgtaaatatcacttcctgtcttcccctcccctggatgccttaaaggaaaaaaaaaaataggacttagtaacaaaatggatatagacagagttcttaacttgtaatccaagaggagagacatagaaggtctatgaatcctgaaattatttgcaaagtatattgtttatgtgcatttctctgggaggagagtccagatctatcaaatgagtctcaaagtggtctgtaacatccaccaccatccatccagaagtttaagaaccaccaaaagaaagatgcaaaaatgaactccaaagttggctaactgatagaatgattgtggctttgacctttgacagaatcgggataactcctatcccacttggggcaggactgtatatgccagaattactcctgggagtaaaacggtgtttgaatgtggatatgtaggactgcagctctctagccttccacagacatgttttagtcaaattgaactttgacctaatgaacttggcctagactgagggctgacgaaagcagcggcccctgctgctggcccctgtgctatggtcagggtagggcttggaccctgcctattgtattataaagcctgcttgctcaaaaggacaattgaacgagtttctctgcacttattaccagaattttcctgagtagcttctttgttttacctaacagtgactctgtattgaatgattaattgcatttctctcttttcatcaactactaaaaaatataaaggcaagtacattgcttacctacagcagttagcattttctgtgacaacgcttctgcttgctccatttgtatcctggctgcatctgtgttttaattttctctttgttgcattttaaaatacataactatatatatatatatataccgttttcatttttgtaagtctcctttctttttagaaggaggtgtacctaggcaattcagtgtccccgaacgcaccccaagactgtgagcccaactaaccctttgcttttatgtaacaattttgttttctgtaaccttttaactctcacttttgtttttatcttcctttagtcagttaaagaggactcagtccccacaggtgcggaggagaatgtaagttacacacaccacggcagaatcattccattctcatcttccgccatgttgtacaattgggcattttcagctctggggtcctgtgttcttgcatgctgccagtgtgattcgtttgttgtagactctcttatcccgtatgtgattagggacgcatggaggataacattggatgaatttttgtaactctcattgaatcagtgcaaaataaatgcaaaatcagggcacaaatttttataattgttatcagtaggggctgaaagagtctactacacgtaagaacagctttgcgcttccttgagggataatgatgctccgccttctgcttcattccaccttgactgctcgttcactcttatttccatggtgatccagcttcttactaactttgggcggtacccagggcagggagttgcatcaggcatgagaacatcttgcagcaacagacgctgagaatgtcggtctcaggttagagcgctgacttgacgggtctacctctgagatagagacgttgagcctcacagttttcctggcttttaatcttctagaggaattgtcaaaattttcaagacagttcattcatccccgaaagggatggtgctatataaaacatcacaaaaacgtagcttccagggagattaataaattgacctcgtgagtttcagacccaaaacaacagctctctgccttgaaagaagtgcgcagtctttgggaaatttttataagtagggataagtgaattcacagctccttgagatagaaaccgaacattatcatgttgccaaagcaaaacttgttctgggtgtcccttatttacttgccataaatagggcgtgtgtttttatttttatttagttatgggaactgaacagatgttaaacatccaaacacgtttctgaaatgttgtctgtgatgtggaataaaaattagaatggctgtgttatgattcttattggaagaaaaatcttgaaattgtgtccggagttggttccttccggtgggttcttggtctcgctgacttcaagaaagaagccacagaccttcgcagtgagtgttacagctcttaaaggtggcacagacccaaagagtgagcagcagcaagatttattgtgaagagggaaagaacaaagcttccacagcgtggaaggggacccaagcgggttgtggctgctggctggggtggccagcttttactccgttatttgaccccgcccacatcctgctaattggtccattttacagagtgctgattggtccattttacagagtgctgattggtgcatttacaatccttttgctagacacagagcactgattggtgtgtttttacagagtgctgattggtgcatttacatccttaagctagacacaaagtgctgactggtgcatttacaatcctttagctagacacagagcactgattggtgcatttttacagagtgctgattggtacatttacaattctctagctagacagaaaagttctccaagtctccactcgacccaggacatccagctggcttcacctctcaaaatctgtttgttggttttactgcccttccttccttcctccttccttccttccttcttttctttcttgagccaatcttagcccagcaaagctcaggtctctcatcattccagaaagttctcatgaattactattttatagaaagtcaaagtttctattcccgcaacctacaaggaggactccacaagacttctttctacgaactttaagtttaaaagctgcccgtaaaatctgtagcatctgttagctttgaggttctgagttttctaaagaaaaactttttggatgtttgtgtgtagttgcttgtttaaggaaccctgtgtttcccgcagctcagatgctaaaatgcagagttgatctctaacaggcaaacaggagatattctattttctactgtgaaattttaaatagaaatataaacaggaattaaaagttaaattatcgacaccaaacgataacacaaaaactgatgatagggacataaaataaggtaaaatatttgttaaataaaataaagaagcattataaaaattgccttaaatgacttaacactgcaagcaacattttgatttttaaggctcaatatttcatcttctttttttctgtttgtgtgtttgtttgttttcttgagacagagttttgctcttttcacccaggctggagtgcagtggcgcaatctcggctcactgcaacctccacccacccaggttcaagtgattctcctgcctcagcctcccaagtagctgggattacaggcatgcgccaccatgcctggctaatttttgtatttttagtagacacagggtttcaccatcttggccaggctggtctcaaactcctgacctcaagtgatccgcccaccttggcctctcaaagtgctgggattacaggcgtgagccaccactcccagcatcagtatttcatcttctgacagcctatcacttggagggaatgagactgatggttgtgacgttgatcccatcatcttcaggccacacctcttgagcctcagtttactcatctgttaaatggcgataataatatcacctacactttcgggttcttgtgaaaattggagatcatgtctataacgtgcttacttcagtgcctgaaatgtaggaggaactcaataattttagggatcagcaaactgtagctcatgggccaaatacagcccacaagctaaaaatgatttttacattcttgaatggttgaaaaaaaatttaaaaagaatattttatgatgtgaattcaaaattcaaattcagtgtccagaaataaagttttattagaacacagccatgctaattcctttacatatcatctatggctgctttgttgctaggcaacagagttgagtagtttcaacagaaacactgattggcagggactttgcaggaaaagtttgccaccttctgcagtaattgttagcaaattagcaaataagagacaacatagtgagtgagcatgtcccagtaatcggtgattttctttcctagtgaaatgatacagctcacagctgactcagtgtccatgtggattgaaggaatgtgtaaaacagagttagctttaatttcctcctctcttaaataagagagaaggcattagtcaaaacaatgtatagtgctctacaccttcacaacaggacaattagatatgattaaccatattacaagagtgctttaaataacgacttctggctaaaatgtggttgagtttattctttaaaatttctctacctacaactttccagaactaatctatcaacggatgcaaggcccacttgtatttaaaaaaaactaaaaaacagagtgatgtcaacatttctcaaagtttctcacagaaagaaaaataaggattttgaagcctgtggaagtttagtgcttttcctagaatgtgcttctggtcctatcagaaataaatctttttttaactcttgaaatgatagaatctttcagttgtaataaaaaaaatattttgcccattggttaattgagttaatgttctaatgaaaaaaatttctttccttccaataacctgtaagaccatggaaacaggtacttctgttgtttatctctcttaataagtaatctctcagttgcaagtgaaagaaaacccaattcaacctggattagaaagaaagtggcctttactggctctcattactagaaagttaaattgctttcaaataaaatttaattcagggctctccttgggttcagccttcttggcctggctacatgctcagctttccaacatcacatcactcagtccaaagtaaatgagctatttgtcaagtagcaaccctgcatgtcctggagtttgttctgtttcactgactgaaatgcattcacatgctgtattcgtcagcttttgccaggttgtgttgcagtgacaaccaggtcccaaattacagtgcttctcaatagcaaagaagtttgttttattttttcttttctcactcatgctacaagccagctatcagttggctttggctaacccatgtggcctcttcctgctgaggtcagtagagaagcagcagtcccttcaataaggacatgcagttcttgttgcagagagaaaatagtggcatgggtgaatcatgcaacggatcctaaagcttctgctcaggcatggtatatgtcatttctacccatgttccattactaaagcaagtcacacatcaatgggcacaggtgtgtaattcatttacaggaaggtagggtaaataattggagaaataatacaatttgccgcatgctgtcatttctaaaccaaccacagtcaaggagcttgaccatgttgattggtttagacctttttaattggcttaatccaaattacatagtcttgaagatgggaaagattgctctcccaaagcaaaattagagtgtgtaagcagatgagagagaatagttactgagtagaaaaaaaaaaatctgtgggaggtctttgtaatcaatcacattaaaagtcctatcaaaataatctttaaaatattctaaaataaaaacctttaatgttaatatgacgttgtgcatgaagtttaaatggacgaaatctatttgccataaatcaatttccaaaagccacagctctagtaaaaactgtataaccaaatttcaagaataagtgtggtataaaatttgaggcaaaaagggaaactcttcactgaaatgtatattgtcaatgttagatgtacctgccatcttcatgcaatgtctaccatatcctctacagaaatcaagcaggggggatttaattctaaaatgtagcgcacatctgactttaattatgtccattcatgatatccaaaattaaaatgtgcagatgcggtcatatgttctaaataggaaacaactttttccaaagccctggcctaggagaaatttggaaaattatccaaataaaaattgaattcctatgtctgtatatgcaaatcagatccttatttagccaagattgttctggatttccacactggatgtcagtggattttccttggctactaaaagccagcttcttggcctgacttcaaaggtagtggaagtctccagaagtactatatttttttacctactgcaatagttgtgttctggagaatggacttgtggcctaggatttatgggttgatacctctcaacatttggaaaggctcagcaagggaaccactggcatccaaatagaattgatttacagagttattgccatacaatctgatcattttatttatgagtaatttttcctccaggtctttgcacacgaagaaagaactcactgcctcaaagacagaatacttctgaacgcaaactctattccttatctacttaagagctattttctatttctccactcttctacccttagttttaggcaaagttgccaactttatacccccaaagtatttgatcatgattagtctaagttagtaatctcattttcttcactagtaagtagcctgggggtaagtggcctagctctgacccatgaaatttaggtaccctgaggtaggggatcaaaatacagatgtttatttggtgcaagtctttggctgtgaccttccttctcagaacattggattgaggatgtgatatctggaattgtggcagctattttttaaccatgaggtaacaaataaaatgatgaaaatctagcatgccaagaatagtggagccaagaacaaagagccaaagttgttagagatattgtggagccactcaaccaaccccagaacttcttgttccatgttttcattggttaagccactattagatacattgagttgccgcagaaaatgccatccttattgtaatgcctatttatctgtggtaagactctggccaaatcattcaattgttcactctttatctatagaatagggataatgttatatttcctaagctgtcgaactatcttgatgctatttataaaaaaatattaaacacccggtacaataccaggcatagcaagaagtagctattaatataatcatctctaaatattggatatgtgcatggtgcctaatccagataattcatgctcatggactaaatagctctaacattaacacaaataacaaccactagcattaattgagtgcatggtgctaagaacttgacatgtattgcctgatttaatatgcagacaactttctgatgtgtatgcaattcccaccgagaacagagaacacgaaaagcacagagatgttgggcactgagcttagatgagggatatagatgtgatttagagcccagcaagttgttctggagcttgtcctctatgaccacgagttagattgcctatatttcagcctcacctgaagggctcttgtggctcacacttacttttcggaaatgcgattgaattaaatcagttcaaaatgtggaaatccatgtccatgctctattgccattctcagtctctgatatggctccagtctccacctcgtttcctaaagatagattggggtccaaagccaacagcccagcagcagacccttcctcacaaataggttttgtttggccaatccagcatttttaatcatttaacatctttagatgggacagcttgactttactttgtcatcatccctgtcactacttttggtcttaggtctggtcaatccatgctgatattctctgccttgcctcctgaggacttttgagtttgtaaccccccaacttccgtttttgtttacaaaaaagaaaatactagaaattgtgtcagtagcttaagaaatttaatttagcttaagaaatgtgatttagttgccaaatgttggggtgttctgcatgctgatttactgatgggcaactccctgaatcaaatggcaatacagagactaagggttcttctcgatttggaaaattcgggtcattttgcaaaccaatggtatgttctgtatgatgggaaagaaaatagtttctcagcagacgatatttttggaaataactaagtccccttcccctaccccctgacaccaagaacaaggctccaagaagctaggggtctggcccagcaaagacaagtgggaagatgcctttgactctatggtactttccagggaggcagcagatgaaagccatgtggtttaaagggccagatagtaaatatttcaggcttcataggccatttgtggtctccatcccatacattttatcttttaaaatatttcttccaacgctttaaatgcgtaaaatccatcaggcgtggtcgcgtgtgctgatagtctcagctacgtggcaggccaaggtaggaggatcactcgagcccaggagttgaaagccagcatgggcaacgtagcacgacctcatttcttaaataaataaataaaattaaaaggtaaagactatccttagcccaggagccacacagaaacagttactgagctggatttggtagtattttgccagcccctgcctgaggaaacaaaggaaattaaaaaacctctcctggccaattcactctgtcctgtggcagggaacaacacaaatgcagaaactgtcccagatgtgactggggccctgtacaaatggagtgaggcactgcaaaagaacacaagttgagagcagagtgtggtagatgggcccttccatccaagccgccacagacactcagaggcagaggaaatcgagctcactaggtacagtggccagggccgcgaacaacttagccatcagtttcttgccaagttcatttttcttctgaaagcataaacttcaattaagtgaaatggcaaatgactgttctagggaaaaattagatatcgcttaatgaggaagtcaattaaattcagtggtttttacactctcctttctacaaagaggacagtttctttatagttgcaggggaactggaaagagaactggaagctgtcatggttaccgtctctaacgttggactcttaagaaaatgattattcctggtttctagacaggccaaatgtaattcacctacgtggcagattaaagaggtgggcttactagatttgattgggtattgagcatgctctgaatgacagtccccaaaaaggacctcttatctgttcttccccttggggaagggattttgccacttccatgtcaatgtggcagttgagcttggaaattggtgcgttgtacaacataagcattacttctccaagatgtgcctgtgtagaaatggtcatagattcaaaactgtagctactatgtggacaggggggcaacaaggaccccactttgtaaaacatgttttgggggaatgttttgtttttcattttcttattacctggcaaaataatccaggtggtgtgtgagtcaccagtagagattataaagtccaaggaagtagaatcagccttacaaacagtggacctcaacgaaggagatgctgcacctgaacccacagaagcgaaactcaaaagagaagaaagcaaaccaagaacctctctgatggcgtttctcagacaaatggtaagccccttacttccagtataggaaacctaagatacctagagcggcttctgggaacaatgggctcatgccacaggtagtaggagacataattgtagctggtgtgtatggaatgtgaatggaatatggattgcatagtgagaaaattccctttcttccttctgattcaatcatacagaaagtctcagtttattgctaatattctttaacccttctttaatgcctgctaacactttttaacaaaaaaagaggtgcccttgggttggaattttttttatttcaatagttgtgagcatacaagtgatttgagattacatggattagttctttagtgtgatttctgagactttagtgcacctgtcacccgagcagtgtgcactacagccagtatgcagtcttttatccctcacccttctcccaaccttctcccctgagtccccaaagtccattatatcattttttatgcttttgcatcctcgtagcttagcccccaattatgagtgagaacatacagtatttggttttccattcctgagttacttcacttagaataatggcctccagctctatccaagttgctgcaaaagacattatttcattcctttttctggctgagtagtattccatggtgtacataagccacattttctttatccactcattggttgatgggcacttaggttggttccatatctttgcaattgtgaattgtgctgcaataaacctgtgtgtgcaggtgtctttttcagataatgacttattttcctttgggtagatacccagtagtgggattgctggatcgaatagtggatctacttttagttttttaaggaatctccacactgttttctatagtggttgtactagttcacattcccacctacagtgtaaaagtgttccgttttcaccacctccacgccaacatctatttctttttttcggccttttaattgtggttgcgtccaaattttggcatacaacagcatctaactggaagttactattattgcttactattatttatttttaaagtttccttctcttggtggtcaatgatactgcttttcttattatggtaatgatatgaggttttctttgaattacatttgtttacataaagaatatcaggcattttaaggattatgtatcaaatagtccaagttatataaagatatggcaaaaattctgaaggtgacgtgagtgacacaaatttggacaaaactagcttatagataaattaaataaggaaatgacaacataatattccaatagtgaaatatataacttagttgatgaattagccatgcttttaatttgtgtagaatagaaagaatgtgatagatatatttactgtttataaaaagcaatgcacattaaatgactaaacagccaggagcttaaataatataatgcaacaaaacctaaatcagttggagaacaaaaaacaaaaatgcatgtaaaaggtcattagtttaattctcttttaatgaaaaacaagaatttcattatagtgtgactttattttcaggagtatttggagtttaatcctttgagaaagcaactctctaatttcacaggctcaacctgttaaggaattctatctagcccacaaaacaaaacaaaacaaaacccttgccaatgggaactgaggcatattagaaataattatgttagaaattgttgacaggaatcattttcttttcctgttatattctcatggagtaaaaagtgtagaatcagttgtgggcggcccatatggccaaaaccccatctatctcattggccatttgatctgcaatttggcagtgaaaatggagattaagacttgagattttttttaaaaccaatttttacatgatgccaggaaagaaaagaacatttggcctgtttccggcaactcatctaacttacaaatgggatccccaaatatctcatcataatattgagagtgatcagcttttccatttctggatggaattgagaggtacagaaaaaaaaaacagtaaatagaatgatggtctcttccaaataaccaacatgaagctccttcatttaaaacagggaaaagtacaagaaactccaaagaaagcatgaaaaaaaaaaaaacctctaaaccactcacagcatccatctaaaacaaattcttaaattctaatgaggtctcatattacttaaatttatcccccagagctatctgttagatgctgtttgggaaaagtttttggcagtagaaaatgggtaagtctaaattctgagggaaacaaattgaaaagaaaagcgtcctttggaatcaattcgctataggatagggatgaaggtaggtgaggacacacttttccccagcaatccccaatggattcttagaattggattccatgctgtccattgttcttattaccagttgcccacgaaaaggcctgggaacacgaacattatctttgcaaaatttaaatcctgattgttggaatttactttaaaattccaggtattctaattatcgtctttttttctgttttgccttcattacaacactatatttatactgtgattaattcaaataaacaaatgaagagttttccagcttactaaagtccctaccactccctattgccacacccagtctagctcactcatttatgttaccggccctttccctgtgggtatttgagtttgcaatccctgatagagaaccgcctgattctttagaacaacttatttgaatcatattgtctggatttatcatactcaggttaaccattgctcaatggatggacatgtggtatgttttcaactttttgcatttcatgcattcactttttcaacaaataattattgagtgtccactatgttccaggcacaagggatacaacagtgagcgtaaacaggtgcagtctcccccggcggagaataaaacagacatttagttttaactctatcctcatattcagtgagcacacaccaagtgtctcacccacgttatttcagctgcttcgcaagcctgtatgaagatcctcacacacttacttctatgcacatgtgttaatgtccccattgggtagatttctggaagttggctctagcaatcattcttaggaaatactttttagtaacatgttcatagcttccaaactgattcaaagtcttcggatttatgcaggaaagaaaaaacctgccctaacagcttgaaaatagagacaacatctggcccatcgctaagggttttttgagcggttggggatgttgagccaaataaataaacgtttcagacaaattttggatattgttagcaaaatatcgatttgtttaaataattgatttaatggaagagagaactcagctgcaaaacctatgctttgattcaccaaatcattgattttctgctttctatcctttgcatttccctcctttttcttttttttttctttttgagacagtctcgctttgtcccccaggctggagtgcaatggcacaatctctgcccgctgcaacctctgcctcccgagttcaagtgagtctcctgtctcagcctcccgagtagctgggattacaagcgtatgccaacacacctggctaattttgtgtttttagaagagacagggtttcaccatattggccaggctggtctcaaactcctgatctcaggtgatccacccgcctcggactcccaaagtgctgggattataggcatgagccactgcatccagctagagatctttttctctctagaaatttactgctcataaaaataaaaatagaggccaggcgcggtggctcacgcctgtaatcccagcactttgggaggccgaggcgggtggattacgaggtcaggagatcgagaccatcctggctaacacggtgaaaccctgtctctactaaaaatacaaaaaactagccgggcatggtggcgggcgcctgtagtcccagctactcaggaggctgaggcaggagaatggcgtgaatccgggaggcagagcttgcagtgagctgagatcgcgccactgcactccagcctgggcgacagagcgagactccgtcttaaataaataaataaaaataggaaaagtatcatttttaaaataactatattttagggaaaggaaaacagaatcatgtaagtcctaacagtgcattcaacacatagagatgtagcacttcacagaaatcctgcgggctcctgcaggattttaaacaattgcgaggaatatctaagacatctgtcatgccctaaataggaaaagattcttatacatattaattcagctgtatgtcaagaaattgaatatttgaagtgctggtgtatttttataaagtgagtgggtagaatactgcattcatgtgtccacaaagcaggtaggcaaatgaaaccagaaaggtggtagatctagatacagttttatacttcgtcaatattaataacaccttacacttgaaaatgctttcctcctccaaactattttcacctaccttatttcatttactcctcctcatatctttctttggaccattagatttgtaagaaaatctttgttggaataatgttctcaggcttagagaaatactgtgagctttaataatgggtaaattaaaagtccaaatgaggaggcagccatgaaatcagagggttttttaaattaattacattcaatctagtaagtctaacaaaatctgttgaaatgtactattggaggtggaaagagggtggtctgtgacggtagttacaaaacagaaaaccgaaagtcttccatatgaaattcttctctgagcattaaaatgttaatactgatttgctctttaaggaaagatttctgaaggaagcattaatttggtcaattcctgtccctaccaatgacttgcattcctttctaccctaagagggtctctgtagtcgttcagcacttttcagttatcggcagtaacaacaatgagagctaccgtttatttattgtctgctaggcactttgcacgcagtatctcatttattaatagagaactctaggaaacaagtgctctctctgccccatgatggacataaggacacagagactagtgagtatttatgggatttttccacggtccgggagctggtaagcgggagagccagaattccaactcagtttgttgttttgttgtcattttgttgttctaaagctcaccctttgactcatgtgtaattgctgcttcctgtgcttctgcagctggtattctcagaaaggatacgaaggtagaacaaccacatgctccattgttgtgatttctttagtaatgtgttctatggaagtaccattttgatgcattgagctgttgcacttacctaaaatgacaataagggaaaggagaagaaaattaatatatggcttacttaaagcttgcacataggttttctaaatatatttgtcactaaaacaaaatttaccttggctggggaattttgcctgactagtccaattccatttcaagtgagcattgtggtaaaatactaagctcagatccattacctttgttgatcctagaaattttcagtagatcccattcttggatttgttttcatgagactggtctgataaacaatattgcagatatagtcaccatatattaaattttcagcccaattctttttcttttaaatgtcaattgtgtttgaattatattgccatcaaaatacattaacattcccttcaaagaaatgtgaactgaccaccaaacacttttgctagatttttgaatagctaagtgatatacattggagatggttcaaacattcctcagagtatcaagctataggaatgcatgacaagatgaaagaaataaaaaatgatttcattaatatacaaggcgtgaatgccacaagtagattccatctcaacactgcaggctgaatgccctgagatacttcacctttgactgtcatgaataaaaattaactccatgaagaaagttgctcaatatcacactggaaaatctctgaaattacttcatagtctttaaactgttcttcaaagtattaaatagtctctggaagaattttagtctctttaaacagtaactttgctatttttgacagctggaaaaaataagtttctatgtttatggttcctttgaatacagagttcaacatgaattattctgatttgtctctgcaaagaaaaaagaaagaagggtagaagaaaaggagggaagtgagggagagagagaggacgagaggaaggaaggaaggaaagaaggaaggaaggaaggaaggaaacagttgttattaataataactgctgctacagaagtgacttcagatggatttaataagattctaagtgtaaacccaaacttcagtcacctttgcatacatacagctttacatgcctcaaaataagcaataaagaaaaatcactgaaaagtttgagatactctctctctctttttttttttttttttttttttttttaagaagttgaactttgttgcagtaatctccctgacagcctggaggtctgttttcatgattcatgatgtcagctgagatcagctgctgtcaacacagccttctgattcaatcccaattcttctccaagggctctcaaagaaatggggggaaagaaagcaaattgaaaccttaaattgacagagtccctaatgaatgccaaattgaaacaactaacgggaagtttagaattcctgtctcctagggggcaagtgagagaactttattctctagaaggtggtggagtgctcatgcgtgactcttcatgtccattcggtttttgcctaaaaagccattttgtgcatttgtttgttttttgctgctcaacattcccaaaggttgacagatatgatccaaagccacagtgtaaaggccacttgggaatgggcttgagtaggaagggctcttacgacacagcccgaatttggaggctgaatgaaatccttacgtgtccaaagctttgggtgtgatgggaaggctgacagagctggttatgaggagggaagaaatagccaacagttcatttctttttctaaaccttctcaagcaagactggcctttgtagaacaatgcacaaggcacggaggaaggaaaaacccactttccatgtagacagatctaaattttatggagaggacagtctgatctttgtttgtcaatcttagtgaaacctgcaccaatgatgttcctcagtacacggaacttccagacaccacctctttcacactaagcagtatattaaaaagagcacaacccttctgtaatcccagtgctttgggaggccaaggctggaggatcacttgagcccaggagctcgagaccaacctgggcaacatagtgagactctgtctctgcaaaaaaattttttaaaaaatagctgggccaagcacagtggctcacgcctgtaatcctaacactttgggaggccgaggcgggtggatcatttgaggtcaggagtttgagaccagcctggccaacatggtgaaaccctgtctctactaaaaatacaaaaattagcagggcgtgttggcaggcgcctgtagtcccaactacttgggaggctgaagcaggagaatttcttgaacctgggaggcagaagctgcagtgagccaagatcatgccactgcactccagcttgggcaagagagtgagactctctctcaaaaaaaaaaaaaaatagctggacatggtggtgtacacctgtagtcctatctatctgggaggctgaggcaggaggattgcttgaccatggaggttgaagctgctgttaatgatgattgtgccgctgtactccagcctgagtgacagaatgggaccctgtctcttaaaaacaataataatatcaaaaataaagaagagcacagttgactcctgatgaggggacatcccataaacatccacatttgagtttggtcatcctccatcttatccaagcttttatcattttgtttaatctaacattcagcaacttcatacagtgaatgctcaataaacgtttattgattgagtggtgcctcttgccttctaggggcagtatggggaggtggtttagagtgtggaatatggagtcattgcctgctgtccaacactggcactcaaacctgctagttccatggtgatgctagtatctttgagcttccatttccttgtctgaaaaataaagtaattccactatcttaaggttctgacataatgaataaatgaaataatgcaagttattatctcatttagcacaatgcccagcacttagtaagcactccactaaaaattatccttcataaataataatttgtattatctctaatgtgaacaccgtagctcagacaacaaagatacataatattaatcagtcaaaaagtatttgagtgctttcaatgtttctggctgttcttagtgcatgtgttgtggattcttacggtctgctaagagaacagccatggccataaataacagtggaatctggagtcttcctctttgccccatatggctgaaaccctgctctctatactcctcccttagctgggaagaggagacattaagcagtgatcaaacgtgtgggaattagacctgagtcaatgttgttgataagaaccgaacattttatcaccaggtttcttaggtatcaggcactaagcataggacattactaaatgcaccgttaaaaccacagaccccagcatgagtctgaacctgtatatggccaacttgctgagagcggtggtactcaaactcagacaatcctcagcaccacctggagagcttattaaaatgcagatcattgagcctctgcctctgaaagcttctgattgattagatccagcctgggtctccagaatttgcctttctagcaagttcccaggtgatgctgaagctgctggtcctggaatcatacttctagaaccattagcttagagtgtggagtttaaggagtcaagtccaaccccttttatccctgtcactggtgttgctggctatagggggtgctaaagggtggaaaatgaaatattaaacaaaactcatatctctatcaaggagagaaaaaaaaaaaaacaataaaacacccacagcctaaatattcccagtggaaggctactcatgggtcaattgttcattcagtcttcatttaatatgttcaactatctcctgcttccaacattaattggaaccgtcatcatttatctcagaattgcctaattccaggatttagtacttttgttgttatttttggaggccaacacttgaatttaattagatctggttagaaattgcatggaaatctctatatccaatgagtaacatgtttccagttggccttccatttgtcttgaccccaaacctcaatgataaatgactgagatcatccatttcagaactttcttgcattctccacgtcactgtacttgtggctgaaggccattgtctgtttgttattttagtcagtgaaaggggatggagggatcacccactcagaagaaataaatgggaaagactccagctgccaagtaagtgacctcgaactcagtttggtggtgggattagtggtgtattctcacttcttcacagtatacttttcaataaaattctcagccacagccaactcatttaatatctcaggattaagcacctactatatgccaagaactatgttggggtctgcagacacaagcatgaacaagctagagttcctcagctttatcctatcaaaaaactttcacacatgtgcttccctcttttctgcattaaaaatctcttctcacccttcactttttgccataaatgtcacctcttcaaaaagaccttccatatctgcctctcataactacatattgttcttttatttcatagcgtcatcacaaattgtaataattcatttatctcccctgtttcttctcatgtctgtctggaatgtctgtggagcaagaagtctccttcttctatttctctatcaccttgcatggtgtttggcaagtactagaatctatgtcttgaacagaataaagacatggagtcggggggtcacacagtttgctttcattattttctttattctaaagaaacatagctatgacatatttataactacatgtgttcctttttttaaataggatcatgcagctgcactctttttttaatttaaaaatacacctccacaaaaaatggcatcaaatattcttctagtagttttgacaatatagagaagtggctacaagaatgagtggtagactcaaactgtctggttcaaatcctggctcagccacttttttttttttttgctgtgtgacttaggcaaattgccaaatctgtcagcacctcagtttcctcatctatataaaggagctatgaaaagtacttccttatggggttgtcatacttagatgaatcaatacatgtaaaacacttagaacatttctggtatagagggctcaatacatgttagctactgtattagtcagcacgggctgccataacaaaatgccataggtggttgctttaaaagcagaaatttattttcttgcagttcttgtggctggaaaggataggattaaggagtaaccaaatcagcagggtttggttcctggtgaggactctcttcctggtttgtaaatggccaccttcttgcttgtgtgtccttacacggcagagagagaaagagaataagcttgccaatgtctcttcttataaggacactaatcctattggggcagggccccaccctatgcctttgtttaaccttaattacttcctattccaaatataatcacattgggagttaaggattcaacatatgcgttggggtgggggcacaactctattgttaacagtgtctatatgttactattactattatgctgctgatagggaatttccatcttataatgttgcccatatcacactcacaaatggacggtaatgactgtaaatatgtttttgtatttttatttccataataattggtttatcctacatttttaaacaggaaatatattgctttttactatactcttcatatttaagcttttaagacaagcttaaatatgatggtatattttgtctggaattttacagtgaaggaattatgccaataatcttggtgattctaaaattggaatgacatccatacaaatccaaataagctagaaacatcccacctaggagtgttttcagaatccaattgggaattttattttccggagccttggattcagacttgagaacactggtgtgtcctttccatttttagctaatttaattctcacagcaccataaggtgtcatttcttttattgctcccatagagatgaggaaactaggaggtcagtttatccttggtcacacagcaaggttatggtggaattagaaacaaaccaggtccttctgactccagacactgagttcttagccactcactgcatcttaaaatcttctacacaacaaaaacagttaacaaggcatttgaactgggatctctggtttctggcctttctgaagagcattgtggtgagagtttctgtttcattctaaggagagtatctgctctgggatatctattgtacttggacatccatatcttagcatttgctgcaactctgacagttggggtctgccagaagtgttcaagacatatattacagaagagcttctcaaggtacactggatgcctgttgcttctttctccaaggacttctgccctctgaagagcaccggtggaggccttctggaccggggagtctctgctgtttgtcttcccgcttacttctaaggggcgtgcatgattcactggtgtgaaaagaaagttctcctacagttgatgccttctccatcaaagctgctaccttgttgtagaactttttacctgggtacagtacataacttcatgaatcatgcttatacacatgtatccggtgggtcaagtgtgtttgccagttgccacaatcagggctttaaaacttttgaagtcaatatttaaaagttgacattttgcattttttaaaatttaatttcaaggttgtcttgaaacaacagaagctctgaccacactggggctgcaagcctacgtggtatctcttggctggatcagagcaactgttgccctttggacagggcatgtaacattcagtctcccctgctctaaattttctccccaacatcaaagccagccttgcttgaactggtgcttttcttatactggagaaatatttttttggacctttgttgcttttgcagctggagaaataagatatccacatggttattcttaccccagcctgcatttactagatttttggattttacagcctcatctcatcaaattattggaagcatgtgggattgtaaacctttcagtttgacaaaaaacgatatacattccaaactaataaaacaatcatctcttttaccaccatttcatgaagcaaaaggacaatttcacaccaaaaattagggtagatgtaattatgaagaaaagaatgggcatccccaggaaaacactcgcatgtggttgcaagtgggagtagccccttcaaagctggcttaagcataaaagggctccaggaacagctagatctaggaggcacgcatgataccatcaatgcctggtccctctctctctctctctctctctctctctctctctctctctccatttctcagctgtgattttctctgtgttggcttccttttcggggagattttccctagaaatattggtggttctggaagctccagtcttacattttcacagcttcagatctaacagaaagggaaccagcctctctctcatttcagcaaagctctgagattagctccagtgttatctgcatttggctatgctgagccaatcacagctggccaatcatatacaatgctctgattagtcaggcctaagtcacatgctcttgtctggaggtggaaatagtttgcctggaccacacggagtagatgaggaagaagggtgtttccccaaggaaaagccaagttctggttccagaataagggataaagagtgctttctgggatagcataaaatgtattaatgaattattagataactaaataaatgtccccaccatgacttcataagtgcacattttacctttttttatattcatttcacctaggattcatgaaaatgtagataccacccaacatttgaacatctctgttttaacatatttattcccttgctattgagagttgtcctgcagccactaaaaatgtactttgtttgaaattgctgtagacatcagactccacagaaaagactatcacaccgccagagcctgaaccaacaggagcaccacagaagggtaaagagggctcctcgaaggacaagaagtcagcagccgagatgaacaagcagaagagcaacaagcaggaagccaaagaaccagcccagtgcacagagcaggccacggtggacacgaactcactgcagaatggggacaagctccaaaagagacctgagaagcggcagcagtcccttgggggcttctttaaaggcctggtaggtggattttttttgcctcttctttctgggctctctccttccccaacaccatctgccccagtcagtttttcaaattctacatgtggctcttcacactgggatcccgggtctatcactcagggtttttgaactgctatgtgacttccagcaggttcaatccttctccattttacaagctgagaccttgagcaaattattgcctctctgaaccagattttttatctgttcatacataatgatgcctaactcatagagttcatgaaacaggtgagatactgcatctagtcacctagcacagtgcctgagacctagggagcaatcagcatgtagaagtaatcgtcatcatcaccatcaacatcatcatcagttttgttcagtgtcttgtgcgtagcagatgctctgggtaatatttgttgaatgaatgaatgaatgaatgcattattggctgattttatttacattatattataccaatttgacgtgttaaaaaaattagacaaatcaaatttaaacacactttatgttgtgagcaaagaacagttcatgaattgggcagcactcaaaacccaaagaggttcagagagcactgcccagtggcatgagcagtaagattttataggccaaacatggaagcaaagtagaaaacttatctgattgggtacaatgaggtgtttgccttatttggtcacgatgtgatgagttgtctgccttatttgggaatggtctgatcaattggttgcctgtgattggctgaagctcagctatttgtgattggctgcaacatggctatttgttacaaaaaaaaggatactcataaggtaggttttggtttgtttacttactaaatgtggttgcagtttgttacatagacactgggagtaaggagactgcctcaggctaaaggcctcctgcttatttaatttaacaggggtataaatgcacaattgtgttactccatggactatagaatcaatggctgctagatgcagaggaaatttttttactgcttgcaattttaggcagactggtggggaggtgttttagatgtgcttattttactctcctctacaaaatggaagcccctcttcaccactggactcccagctccatgagggcagggcaccacctttcaggttcaaggctgtatctcaaggacttgaaataggactgcataaacagcaggtgcttgatagacaaaggaatgaatggatgagattaaaataatagataccaaaatatgatatataaagttggaatacattacttgaaattgttacccttcgataaaacattgtactcaactttaaccacacttaacaatttctacttgcatgtttaaaaaatacccactttgagaatggagacactgaaagtgggtatccactaatcatttgatttacatatggaaaccactgaaatttcttcccttccttccttccttttttcccttcttccttctttcatttttcttccaaaaatatttattaagcattccatctaaagcacattcacactcatagcttctctctcctatcccacaagatgtaatagttccttattagcttcttctttctgggtgtagtgcagtcttcaaactaatcatgtagtccttgcagtggtttcattgatgtgaggaaggcagatgttgatgtaaagcaagaatgccagtttgtagccctgagagaaggacttcacccaagtgggtgaggctgtattggatttgccaacgcaagtcttctcaaaatgtactgtgcacacgaatcacccagggatctattaacacacattctgattgagtagttttggggtccaacttgggatgccacaaagctcctgattgatgctacaaaagctgctgatccagggatcacactttgagtagcaagttcctaaaggaccaggaaagatgttggggaaagtatttggatttcttgtagtttacttcttttgtttttttgagatggagtttcgctcttgttgcccaggctggagtgcaatggtgcaatctcggctcaccgcaacctccgcatcccgggttcaagcgattctcttgcttcagtctcccgagtagctgggattacaggcatgcgccaccacgcctggctaattttgtatttttagtagagacgggtttctccatgttgctcaagctggtctcgaactcccgagctcgagtgatccgcccgcctcagcctcccaaagtgctgggattacaggcatgagccaccatgcctggtcttagtttacacgtttttaacccatgatttattcattcatttaaaatgaacaccacccagggaatgatttacactgtggcttctaattattttaatagaagccagcctctacaataggtacgaaggctgaaaaagaaagatggtatggaaaagttcagatgatttctaataatctggtcattcacttaacaaatatttgtagaatatttagaatcctggcagtgagctagaccaggggtattaaaaatgcaacccttgtttctataaataaatttttattggaacattgccatgttcattcatttacatgttgtctagctgctttcacacaaaaacatgagggttgactagttgcatgactagggttgactggttgggttgactagttgactagactgcatggctcataaggcttaaaatttttgccaactggccctttgcagaaacatgtgccaagccttgaactaggcgctggaggtatattcagcaaacaaaggggacagggtccctgacatcaggggttcatattcgaaggggaagcatgcagctaaaaagtattagtagataagtttaaaaacaaggttaaaattattaaaactacaacgttaaaattacaaaattaaagacaaaatttgccaacaaaattgtaggtctgggagatcactgagggaaataaacaaggtcccgcgatagagtttgcctgagtatggatgggggggtgtgtgctacttttgcctgagtgtgtctgggggcggggtgtgctacttttaatcggtggatcccaaaattgtctctgaggagatacatctgagatgagacaggaaaggttaaaggtgccagacaggaagagagcaaggctctttcttccaggaggaggggacagccctggcaaaggcacgggggtgggaatgagcttagtgagcttagtacatttcaggaagagaaacaaggccgtggttgctgagggtggagaggtagggtagggggagaatgatggaagtaagattggagccgtgggcggggacctcctcatgcaggctgtacgggctgtgcaaggaatgcagacataatcctatctgagcagggaagctactcacagatattaagtaagaagtcttggcccctgttgataacattcgaagattttattttgctgctgtggtggagaatggctgttgaaggtcattaggagctagttaatacaggtcatatttcttgggagagctgatggagattggcctggtgattcctgaagaagtgacaagaagtggacaggtttgagacactaattacagttctagacaccgagtccctcctctgggaccacactcctttacagacctcatctctttaggatggcagcatcccttcaggctgggactgcttctgccacacctcccagacacataagccaggcctccaagaagctgtgtcttttgctgaacattccacaggttgtcagagacagaggcagcattcagctcaggccccctagaccccaagtcctgcatcgtcccagtgtcacaaggcctccagcaatgatggaggacggaggggggcttccctgccgctttccaaagaccaagcctcgaagactttcaagctggacacattccccagggttgcctgaccgccttcctgggaggggaatgctggcagccgagcctgtcaccacccacagaactattgtggtgcctgttacccacaggaaatgagacacaccgcaggccgatccctgcatgatctttgtctcacagtgacgtcctcgttagtcaggtccttttttcctccttctccatcatgctacttgagttctaactgagagcaacccacttggttttcaaaaatctgaaaagaactggaaggaagcccttggcattcacaaagtccaactgtttgaaaacattttcctttctttttgagcaaagggacttttttgtttacaaaagaaaatgtcacaaaacctgggtgtgtgtgtgtgtgtgtgcggatatatgcatatacgcacacacagacacatatgataaaagtgaaactattctgattgatggaagactgggtttctcccttcccctaagcaccacttctttgatggccctttcccagccttcccctttcccattttcatgagcccctgaagtgctagattgtgtgcagcgcaatctgcaggcaggtttagcaggtgaacaaatggaggcttgaaaagggaagacatctgtccacactggtgtgggctgaaccgaggcttgtgacaatcagcgcagtcactgcaaggagcctgagaccgagggttggaaagagcgggcagtgaacagaagagagccggggacaacaggtgagctgagggccagattccaagtcaaagtggccaggccgttaccgcatgacctagtcctaggtcatcttggagcctcagtttctgcatctgtaaaatagggtgaataataatcactgtccacctcactgggctggagagagaacaggtaagagaatgggtctggtttggccttgtgaactgtgacgtgtagtcctggtatataaggcaggaaaggggttgcatttatgtctctggcctccaaggtggagtcccagtgaggccagaagggcatgtgtatgtatgaggccagtgagtcaggtgtggtctgtggctacctgaagggcaggtgcccacctaaagggggtgcccctcctcagcaccagccacatgttaccttgggggactgcagacccattgtggcaggacctgtccatttagtcaagagaaaataacaaaggtggagaatttttaagagcaaatacctaatttttaaatgccagcatctaatttttttttaataaatgaagaaaatgcttgtacaagttcatctattgcaaagttcaggcccgtggcagccacttggccatctgagtttgctgtttagtccatcaagccccaagatcaagctcatggaacctaaaggatggaaacctcggggaagtaagctttaatagaggtgagttgactgggcagggtggagcctgggtgaaccaggatccacggcaaggcacgctgggcaaacagaggcaggatggatggctgccacccgtggccagcctgagaccaggctctagacacttgcaagaagcttgttcctggacttgaacctagctctcatctagtggctgagtgagcttggacctgtcatcttgctgagtttcagataccagatcaatgaagtgaatggtgctgacgtcacagggttagcatgaagatgaagggcagtagtgtacaatgcccttagagcaatgcttgtgaggtttaactagtcaggaaaggctattttgtgagtattatttagttagcccctgccctgggttgtaaaggtgcagagatgagtcgggcaccgctgtgccatggggagtttgtgctctaatcacagcaacaagcgattacaatgcacggtaaatggaggggttggggaatggcctttacccagctcagggttcagagatcggggacagaagccggcaccccacttactggcaggaatttgactgaagtggcttgggctcgctgggcttcagcagcctcctctgtagcctgagagcgacagtggcgtcaacctcgtgggctgcagtgaggaccgggtgggatggcagtctaagacctcacacagatgaggcagcaggctctcagcggtgagggaccggccagaggtcatgcaaccagaaagggatggagcatccccaaacccacagctgactcctgagcccaagcttttggtatttcacggtgtcctggtcatctcttgatgccccaaaactattaataacacaatgtattgtctgcagtaggtcctcaatatatgttgttgaatgaagtagtgaattcaactaccaccactaaaaataatcataactcttttatcacacttactgtgtgacaaagattgttcaaagtacattgcatatactaacacttaatcttcaaaactaccctgtgaattcccattttatcaacggtaaaattaaggcttaagtagagggttaagcaatttgaccaaagtcacccagctaggaagtggcaggtctggcgttcaaagaccagcaatctgattccttggtaaattacatgaaattacactacactatgtagtaaatacaatatactatactatgctagattatacagggcactacacagtctatgtactatatacatatactatatatgtgccctatatacatcatgtatactaaactacactctatttattatgctataatacactctatatactatattacatattatacgatatcatgtatattctactgcattaaaccatatgacactatgtacatatactagaccatacatactttgtgatagtacattatacttccctttcctatactatatactatagtgttctgtatatatcatactatattgtacattatgctttgctatactttatttactatactatacagtggactaaactatactgtgctatagttaccatacttgactatactatatatgtatactatatatactataaaatatacactaccctatattatactatcctatattaccttatactacactatactatctatatatactatgctacaatacgttattatactactctatactatactctctctatgtgtgtgtgtatatatatatatatactgtatacaatatataaatcttatactgtactaccctatactgtcttatagtataaaaggaggcccacaattgatccatgcagcaaggtggatgaatcgcacatccactatgctacatgaaagaagttagtctgaagggctgtgtatactctaggatcccatgatatgacatcctggcaaaggcagaactctagggatgaaaacagatcggtgcttgccagggtctgcggtggggagcggttgaccacaaaaggcacaagaaagatctgaggggggacagaaccatgtgacatgttgatttggatggtggttttagggggctatttgtgttggtctaacctcatagaaccaaatacagaaaaggttaactttactacttataagttatacttgacagaaacggtaaagtaataataataataatagtactcaggctaggcatagtggcttacacctgtaactccatcactttgggaggccaaggtagaaggatcacatgagcccagcagttcaagaccatcctggacaacaaattgagaccccgtctctacaaaaaaaattttaaaattagctgagtttggtggtgtgcacctgtagtccaagctactggggaggctgacgtggggggatcatttgagcccaggacttcaaggctacagtgaacatagtcccaccactgtacttcagcctaggcaacagagtaagactttgtctcaaaaaaataaaataaaataattgtatctgcctgacaacattccttcacccacattcagtcaatgttaaggctaggtaccatgtgctaggaacctgcaaggcactgagacacgcagaatccttgcagcttccaatctggtgtagaagacagatgttagacaaataaattagataataagatcatttcagagagtggtatgttctgagagagaataaaatagggtttgggatggggggttgggggaaggatagcattaggagatatatctaatgttacatgacgagttaatgggtgcagcacaccaacatggcacatgtatacatatgtaacaaacctgcacattgctcacatgtaccctagaacttaaaagtataataaaaaaaaaagaagaaaataaaacagggtggtgaacctagatggtaactggggagggagctaaagtgaggtagaattagtaccccctaggtactaagtacattataagcatgaactcactttatcttgggaacaaccctctgagataagtttgtcatttccattttaaagataaagaaaccaaagcgcaaagagatgataagtaatttgtccaagatttcacaaagctagaaagtcatgtaactgggtatcgaacccgggcatctgactggagaccattctcttacccagcactgaggaatgagatatattaatttagcccaacacctagcacagagtaagtgctacataaatggccattgttgctgttgacattacagagcttcaataggctgccacgtctttctgtttttctccagggaccaaagcggatgttggatgctcaagtgcaaacagacccagtatccatcggaccagttggcaaatccaagtaaacaaatcagcacggttcccaccaggttctcctgccaccaagatgtgttctccttactccatctcctccccaaacacgctccatgtatatattcttctgatggccagcaaatgaaattctgcctagaaattaagcccgagctgttgtatattgaggtgtattatttacgtctctggtccagtcttttctggcaaataacagtaaagatggtttagcaggtcacctagttgggtcagaagagtcgatgatcaccaagcaggaaagggagggaatagaggaatgtgttcgggttaagtgatgaaaatggcagtggtggccgggcgtggtggctctcgcctgtaatctcagcactttgggaggccgaggcaggtggatcacctgaggtcaggagttcaagactagcctggccaacatcatgaaaccccgtctctactaaaaatacaaaaattagccaggcatggtggcacacacctgtagtcccagctactcgggagcccaacgcacgagaaccgcttgtacccaggaggtggaggttgcagtgagccgaagttgcaccattgcactccaccctgggcgacagagcaagattctatcaaaaaaaaaaaaaggcagtggcaagtaagttatagaagagaaatgctgctagaaggaattaagcgttgtagtaaatgcgtgcttatcctctaagcttgaagaagggagacgaaaatccatttgtttaaattcacatctcaaggagggagaacccgggctgtgttgggtggttgccaatttcctagaacggaatgtgtggggtatagaaaaaggaatgaataagcgttgtttttcaaatagggtccttgtaagttattgatgagagggaaaagattgactggggagggcttaaaatgatttgggaaaacaattgcttttgaggctcagtgacaacggcaaagattacaactt

SEQ ID NO: 48 - DNA, 156652 bp, Homo sapiens
tgagaaatcactcactattgggaggacagtgccaagccattcatgagggaaccatgcccatgatccaaacatctcccaccatgcttcaccttcaactctggggattatatttgaccatgatatatggaggggacaaacatacaaattatatcaaaggcatagcatggctactgtgaaaggagggtaaaaacacaaagatgacatcaccactgacctcagggagtgcccagtagactgagggagacaagtacatattttcctgaaggagggcactggattgatggcatgtttagaatgtggaagtagagcggccacagaaaggcagcccggcagagtgctcgcacaaagactgggctagagactccccactgcatgtgatgtatctgaggaaagtcattaaaataggtgatggtcactttccatcaagtccctggtatggtccatggaggcagggttgtcaatgtcatttcggcatttcagaggcctctcagggtttggatatggcagaagacaaccagcaatgattatgcattgcagagatgcaggtgagccccaatttcttgccagctgggaagtcggtgctaaggggccttgctgtctttccttggaacataggataccaatttctttctggacagagagtatttggttggctaaagttaaaatctaaattttgctttgggatgaattccaaaaatattagctttattcaaatttactttcactttatctttctgaatcttcaaggtcctaaagcattgcttagtaattttgtttctaaactcacgttacagcactgggcatgatctgtccaaggcagagactataagctactcttatagtactcttatgagatacatacaagtaggtatctcaaaaaatgatactcatgtattcctgttcttatgagtaaatcattggcagtgagtgtgattttttttttttttatgacaggataaatacacgccctctattggggtcaggttttgtgcctgtagttcttccgcctactgtatcatagcagcttagaatcccagctgctggctcgggctgcagttctctcatggctcgcacagggtggaccagccccattcccctatgtgtttctctgctgctgacctgtggctttgctgaggcagggaagctgctggtagtgcccatggatgggagtcactggttcaccatgcagtcggtggtggagaaacttatcctcagggggcatgaggtggttgtagtcatgccagaggtgagttggcaactgggaaaatcactgaattgcacagtgaagacttactcaacctcatacactctggaggatctggaccgggaattcatggatttcgccgatgctcaatggaaagcacaagtacgaagtttgttttctctatttctgagttcatccaatggtttttttaacttatttttttcgcattgcaggagtttgtttaatgaccgaaaattagtagaatacttaaaggagagttcttttgatgcggtgtttcttgatccttttgatgcctgtggcttaattgttgccaaatatttctccctcccctctgtggtcttcgccaggggaatagcttgccactatcttgaagaaggtgcacagtgccctgctcctctttcctatgtccccagaattctcttagggttctcagatgccatgactttcaaggagagagtacggaaccacatcatgcacttggaggaacatttattttgccagtatttttccaaaaatgccctagaaatagcctctgaaattctccaaacacctgtcacagcatatgatctctacagccacacatcaatttggttgttgcgaacagactttgttttggactatcccaaacccgtgatgcccaatatgatcttcattggtggtatcaactgccatcagggaaagccattgcctatggtaagtcacctctcctttagcacattaggaataatctggctttggaaattaaaaaaagattccttactgaattgtgatttgacattttcatttgttgcatttcaaatttctttccagtttaacagattattttgtgccaatttatgtactcatcagttatcaaattttataaaactgcccttcttgaaggtgtgtgtatataatttaaaaattgtagatcgtattcagcttacatttttgagtaccatgtttagaaaagtaccaaaaaccacagtaagaaattgaactttccttttttgctaattctatgtgaccccctagagcaaatgctcttagcagttttgcatacattcttttcattaaaaaaagtattttaggtgtatatatttaatttaaaaattatagatcatatttagcccacgtttttgagtaccgtgtttagaaaagtaccaaaaaccacagcaagaaatgaaactcccctttttcctaagttttctgacccctagaggaaatgctcttatcagttttgtgtatattcttttcagtataaaaaaagtttcatttatatgcaatatctaatgtaaattctcatacctattttgttaaaataaacttttatgctgtgctggacatattcttctttaccttgcattttttatttgccaataaattgtagattcctttatacaccaatacagacagatttgacaagttcttttcataattgcataaaagtctttactttggatgctatgtagttttttaaaccaattaatattgatatatgtttaggcattttccatttttgcttttatgaataaggctgtgtaaacattctttaataatttccttgtgtgaatatatttctatattcttgcttttatcttagtagactagagtcctacatgtagggttagagggttttcctgaattgagaagattggcatctttttgctattatatcttcctgttcaggaatatgtgtgtctcactatttattcaggtcttgttttatatacataaataaaaattttcactatataagcatttatgtttgttattaacatttattccttggcattttatgatttttgaaactatttttttacagggtaatttttccatttctacaattaactgactattggtaattaaagttttggtttttgcgtatgtatcttgtatccagccacattactaacttttcttattattttgtagtatgcattagatgtacaatatgcaataccatctgcaagtaattcccttctctgatatttatactgcttcttttgctttgctggagcatatacttccaaaacattattgagtaatattgttagagtagccagtttaaatagggatttggtagcttgtgactgaaaaatccttgaaaaataccagaataagattcttggcaaacgcatagttgctaaatccagatgaaacacctggtgtctcatctcattatattattttattagggatggagtatacatttttgtctattgttctggcttcttataaggttcagtagactttgtaacagtcatatctgtcattggcagatggttggtgaaagagtgaccgttcagccatctcacaggaaagtgaaataatgctctttctaaaaagcaggaagactacagttgtaggcctttcaaaattaggcatgactttcagctcacggcaagatcaggtgaagagatgcaagttgcaggactctaagaggttggacgtatcaaagcacttttctcctcattatcctccattaattacagtaccaagcaccacccatgtgttgcctgcaccctacaccctttggccgagtgtgaggctctgccacttcctgaacccacactgagtttattgtggcccaaggggtcacccagaggcctttagagatataaaaaagtatatatgattttatatcacctacgatagggagatatccataaaaaaaggaaacattaaactctacatggtttcagttattttgattataaatcttttatgagatatgaaataaatgtgtttctatatctattaaagaatatatatgtatgaaagtttttatacttgcagaaggttatgtgtattaatgtatatatttatgattatatgcataaagccagcagaattctcacagaggaattcagatctgaaagagggctttctgtcaaagagccttggatatggcccaaccacaaaagtaaaagtcaactgtcatcgaaagaaggatggacactgcgtattgctccttccttgtttcagatgccaggatatgtctgggaaaagcatgcagttggttacatcttgctgggaaacaagattcagagtgtgagtctcatctgcctgatgagaaggaagcattacttagtgatagagtatgtgtttgcacatgtatgtgtttgtgtatgtgcaggtgtgtttgcgtgcagtgtcccagaccctgcacaggggatttcttgaagatctcctgtaacaaaatctccttgagtctatccaggagaattacatccagggatgtaattaaatactttaacaaagatggcagatggccccatctccaacgtcagggatcaaatttcaacgtgagatttggaggggataaacttttaaactttatcttttggtatggtcattgttttacatttcagtattccaatgtgtgtgtgttgattaaagatgtgtaaataattcagcagaacagcgaaatagttttaatgagaaaaagaggaagtcactcctagtctctttgaatttttggtgagttccaacagaattgatgactggttttaggtgaaaagaattcgggcttcgtctataccatccatggtaggttcagctctgcagacctggggatggaatatggttacagagcaagaaaagatctgtgcttcccccattcctctaagtttctggctccagtttaagatccaaattcaaagttagcttttggtggacaagactaaggcctcccactaaaattgtttacttcaagtatttattttcaaagttttccaacctatacaaaggagagacttagtgtcatgaccacccatatatcaatcttaggttaaataattttcactattttgctgaactgattcatctatcccttttttctgtctttttaaagaaaacttttaaagagaaatttgtgtcaatctttttttaaattatactttaagttctagggtacatgtgcacaacgtaaaggtttgttacataggtacacatgtgtcatgttggtttgctgcacccatcaactgatcatttacattaggtatttctcctaatgctatcccttcctcagccccccaccccatgacaggccccagtgtgcgatgttcccctccctgtatccatgagttctcattgttcaactcctacttacgagtgagaatatgcactgtttgattttctgtccttgtgatagtttgctgagaacgatagtttccaacttcatctatgtccctgcaaaggacatgaactcatccttttttatggctgcatagtattccatggtgtatatgtgccacattttcttaatccagtctatcattgatgaacatttcggttggttccaagtctttgctgttgtgaatagtgctgcaataaacatacgtgtgcatgtgtctttatagtaccatgatttataattctttgggtatatacccagtaatgggatcactgggtcaaatggtatttctagttctagatccttgaggaattgccacactgtcttccacaatggttgaactaatttacactcccaccaacagggtaaaagcgttcctatttctccacatcctctccagcatctgttctttcctgagtttttaatgatcgccattctaattggcatgagatgatatctcattgtggttttgatttgcatttctgtgatgaccagtgatgatgagcattttttcatatgtctgttggctgcataaatgtcttcttttgagaagtgcctgttcatatcctttgcccacttttgatggggttgttttattcttgtaaatttttttgagttctttgtagattctggatatgagccctttgtcaggtggatagattgcaaaaatgttctcccatttcataggttgccttttcactctgatgatagtttcttttgctgtgcagaagctctttggtttaattagatcccatttgtcaattttggcttttgttgccattgcttttggtgttttagtcatgaagtctttgcccatgcctatgtcctgaatggtattgcctaggttttcttctagggtttttatggttttaggtcttacatttaaatctttaatccatcttgagttaatttttctataaggtgtaagaagggatccagtttcagctttctacatatggctagccagttttcccagcaccatttattaaataaggaatattttccccatttcttgtttttgtcaggtttgtcaaagatcagaaggttgtagatatgtggtgttattcctgagacctctgttctgttccattggtctatatatctgtctgggtaccaatacgatgctgttttggttactgtagccttgtgatttagtttgaagtcaggtagcatgatgcctccagctttgttctttttgcttaggattgtcttggctatatgggctcttttttagttccatatgaaatttaaagtagttttttccaattctgtgaagaaagtcaatggtggcttgatggggatagcattgaatctataaattaccttgggcagtatggccatttttgtgatattgattcttcctatccatgagcatggaatgttcttccatttctttgtgtcctcttttattttgttgaacagtggtttgtagttctccttgaagaggtcttcgcatcctttgtaagttggattcctaggtgttttattctctttgtagtaattgtgaatgccatctagtcattttaaaaagaaattcttggcatgtcattccatcaccgaatacttaattaaatataaaaaataagaaacatttgttacatagccacaatatcattatcatatctatgacagtaaaaattttttaatattatctcatttccagttcataattaaatttcccccattttcttgaacaacatctttccatgtagatcaatggaatagaatggagaattcagaaataaacccatacgttcttggccaattgacaagatgtcaaattttgataagggtgtcaagatcattcaaatgggaaagaatagtctcttcaacagaagacccaccctggggtccttaatctccagcatcagactccaagaccatttgcagagatcatccagacagctcccatcatgcctctgatgaatccttcaccatgtgcatccacaggggtcctgcaaatattttctcacagtccgttgagtgacttttcttacaaatactttattttagaataaatagaggtttatagcaaggttgcaacaaatagttcagagaattcttatctaccctgtacccggtttcccccattgttaaatgttatgtttctatggcacatccatcacaactcattcaccaatatgacacattatgatgagctaaagtctgtttccttcagatttcattgatttttacttaatatccctgttcttttatgggatcccattgataccacctgaaatgtagtcatcatgtctccttagtctcctccagcctgtgacagtttctcagactttccttgtttttggtgacttgggcagttttgagcagtcctggtcaggtgtcctgtagaatgttcctctagaatgtcagtgtgtgtttgcctgacatttttatcatggttaaactggggttataggtttttagtaggaagatgcggaggtcttttcttgttttcttgcatgtgaatattcaactgtagaaaagagtggcctttcctccaatgcacttcttgtacctttgtaaaaacttggctgttcatacatctgtgcatgtatttctagactttgtattctgctccattgaaatatttgtgaaatatttgattactatagctgtgtaataatcttgaaatgaggtagtgttacctatttttttcaaattgtttttgctattgtaggtctgctacattaccacatggattttagaataagtttgttagtttgattttgattgggattgtattgaatttatagatcaactggggagaaacaacatcttagcaattttgaattttccaattcattaacatatctatgttaagtgcctcatcagtgttctgtagttttcagtgtacagtctttcataatttttgtcagatatattcctaagtatttcatgtttttgatgctatttaagtgatatttttattccaatttttaattgttcattgctagtatagttgacccctgaacaatgtgggaatgaaggggaccaacccgtgtgaagtagaaaatccacacagatcttttgattctcgaaaaacataactactaacaaccatttaccaaaagccttaccaatagtataaacagtcaattaacacatattttggatgttattagtattatatcctgtattattacaataaagcaaactagagaaaggaaaatgttatttaaaaacataacatatgaaaaaatgcccaacatcactaatcatcagagaaatgaaagtcaaaaccacaatgagatatcatctcacaccagttagaatggctgttattaaaaagtcaagaaacaatagatgcttgtgaagctgctgagaaaaaggaccacttgtacactgttggtggtgggaacgcaaattagatcatcccctgtgggaagtagtttggagatttgacaaagaagttaaaacagaactgtcattcgacccagcaatctcattacattactggatatatatattaaaaaaatcattttaccaagaaacacatgcactggtatgttcattgcagctctattcagaatagaaaaggcatgaaatcaacctaggtgcctgtcaatagtggattggatgaagaaaatgtggtacatatacaccatggaatatgcagtcataaaaaaagaatgaaatcatgtcctttgtaacaacatggatgcagctggaggtcattatcctaagggaatatatacaggcacagaacaccaaataccatgtgttctcacttagaagtgggagctaaatagtgggtactcatgggcataaagatggcaacaatagacactatggactactaaaggggagaggaagggatgcaggagttgaaaaactattgggtaatatgctcagtacttgggtgatgggagcaatcatgccccaaacatcagcatcacacaatatactcaggtaacctgcacatgtactcctgaatctaaaataaaagttgagtatgtataagaggaagtcattcatcataaaggtctccatcctcatcatcttccattgagtgggctgtggaggaggaggagtagatgttggtcttactgtcttagggtggcagaagcagaagaggtagaggaggtggaagtggaggcaggagaggcaggtgcacttggtgtaaatttatggaaatacatcataattactgtctgtttttttctctttgatgtatttaaaaatgcttttatacagtactaatccttcttccccatttgctttagtttcagtgcccataagggttcatgttgtaatagaagtcaatagcagtcttaaataactggaagcctttccatgaggcttgtattgtgtaaggccattttttttttctggcactgcttcttctacatcttctttctcatcaagtagtgattggaaagcactaatctctatcaggtcatctattaattcctcgagtgtggtgtctattgactcttgaatttctccaagattcatattttgaaacactttatcccccaccttatgttgctgtatccataatccctttcatgacttccttgattggctctgtcttaaatcctgtgaagtcattcgcaacatctggtcacagttttctccagaagaaatgaattgtttggggcttggtggctttcacagctctgtctataacaacaatggcatcttcaatggtgtaatccttctggactttcatgacattctctatccagattctctttcctagtattgacaatcttttccatagaaaactgtgtgtaatgagttctaaagttccttatgacccctgattgagagactgaattagagatgttgggtttggaagcaggtagaccactttgacaccttcagtgttgaactcatggattctgggtggctagcattgtccaatatcaaaagaattttaaaagacagtcccttactggcaatgcattttctgccttcagggacaaagcgttgatggaaccaatccagaaaaagtgttcttgttgtctaggccttcttgttgtacaaccaaaaaactgtcagtgggtgttgatcttgtcccctcaaggcttaaggtttggcagttctacacatgaggtcagtcctgagtgtaaacttgactgcatttacacaaaacagtagagttagcctatcccttcctgccttgcattctggtgcttggtttacttccttgctaataaatgtcttttgtgtcatcttgtttttgtttttgtttttttccagaatagggcactgtcatctgtattaaaaccctgttcaggcagatatgctttcccctcaataattatcttcatggcatctgggaactcatttgtctccttttgcttggcagaggctgcttctcctgttatcttgacaattttaaagctgaacccctttctaaaactagcaaaccatcctttgctgccattaaattttccagttttagattcttcacctctcttttgctttaagttgtcatataatgactttgcattttctcaaatcacattggcatctataaatacgcctttcttatagcaatgctacacccacgttaaagctgcattttcaatatgagacaaaaacgtatttcagaaaaaaatgcaaggtttggctcctgctggcatagctgcagcaatgtcttcatgaatctcccttccttccttcctttcttccttccttccttccttccttccttccttccttccttccttccttccttccttctttctttctttcttttccactggtccttatctagcttcatttattttgaaatggcaggcattcaccacggtagagctcagcctatggtcccaatcaagcaattcgacttttttggttatgtcatgatttctttttgcttcttgggagtaattccagcatcattaggggcactctgtagtcccatgactgtattcaagatttacaatattgcaccaaacatgatgaaaaatacagtagagccatgagagatcactttttactctgacatgcaatttattggagagatgaaatgctcaaacagagagtataaatgttatatcacatgcacttaagccacacttcagctcactggaatagcaacaggaggtagctacaaaattattacagtagtgtagtatatactataggtaattttatgcagttaagatttaatgctgcctctatatgtttgtatttctttcctgtgctaatgatgcaatgtacactttggaaatgtttgtgtgtggtttaataaattttttattgatttgtgcatattttaaagtaataaataataacatggtatctgcacatggtttctgcagtcatggcatagctttaaaaatttttagatatttctagtttatgtggtttatatatatattttttcaaactgttagaaatttcttaaaatttttgcaatatatttatttttaaaaatctgcatataagtggatccacacagctcaaaaccctactgttcaatgtcaactgtatatagaaagaagattagtttttaagtattgtatcttgcaaccatgctaaacttacgtatttgttctaggagatttttgtagtttgttattattcctacatagataaacttattgtctgtgaatgagaccttttttattttttctttacaatctggacactttttacttctatttcctccctgactgcactggctggaacctgaagaacaatgttgagtagaagtggggagggcccctgtcctcggcatgtgtttgccttgaggagtggagcattcagtctttcaccatcaaggatgatattaactgtgggtgcctccaagatgtccttcattagtttaagatacttccctttattttccgagtttgttgagaattttttatcacaaatcgattttggatttttgtcaaacactttttccatacctattgagataattatatgcttatacttttttagtttatttatatggtatgttactttaattgatttataaaattatttatttaatcattaattgtggtgaaaacacatagcataaaatatatcatcttcatcactttaggtgcacagttcagtattgagtacgttcacattgctgtgcaaccaacaccaccattcatctctagaactcgcttcatcttcccaaactgaaactttggacccattaaaaaagaatactccattcccccctcctctcagcccttgccaaccagcattccactcttttattctacgtatctgactattttagatacttcatataagtagaatcatacagcatttgtcattttgtgattagcttagttcactctgcacaatgcccttaagtttcattcatgttagcatatgtcagaattttcttcctttctaagggtgaataatatttcatgctgtatacatacaccacatttttgcttgggttgtttccacttcttgtctgttgtgagttatgctgctatgaacatggtggcacaaccttgattaattttctaatgtcaaaccagccttgcattcctaggataaaccccacttggttatggtgtctaatctttttgtgtagtacctattttaaaatattacagactttgacttgccaatattttgtttaaaatttttgcatctaagctcatgagggtctgtaattttcctatcttttaatgtctttttctggttttggtactgtgataatgctggtctcataaaatgaattaggaaatcccctaggcttcagtttttgggactagtttgtgaataattggtattatttattcttcaatgtttgctggattcatcagtgttgtcatctgagcttcactttgttttgtgtgggaaggtttgaattacaaatacaaattcaatttaaaagatacaggttacttctattggggttatgcatttattcttgtgacaagtctggcagtttgtgtctttaacaaaatgtgtccattctatctaagttgtagacttttttttggcataaacttgttcatgttattctcttaacattttaacatctgtagaatctatggtgataccacctctctcattcctaatattgataatttctttcttctctctttttttttcagatcaaggtggctagagctttaccaaattaattgatctcaacaaatcagctttggtttcattaattttctcaacaaaccagctttggtttcattaattttgcctgttttttaaatgcattttccatttcattgatttctgttctgaagtaagcctccaggggaggtagatcactgaccatcatgtttatttttcaaggacagtcatctgcaagtgccccagtcaccaaaagaaaaggtgactaagcaaatgtctagtaccagttagggtgtcccgaaaggagccatcttgtgctcctacaaggattataccccgaggttgtctgcagaatctctcactaaatgttccttaaggtgttgcctgacacacactgcttagctcatccatgaaggtatcaagaaaacctgcagaatataattctgtccagtgcaacaaatattctggttgattttctttgtgcagggctgcatttgtctgtttggattgctgtaaaggatacctgaggctgggtaatttataaagaaaagaggtttaattggctcacagtttggcagactttatatgaaacatggtgctagcatctgcttctggtgaggcctcaggaagcttacaatcatgacagaaggtgatggagagctggcatgtcacatggcaagagcaggagcaagagagagacaggggagatggcacatacttttttattttaatttttatttttatttctggggtacatgtggaagatgttcaggtttgttacataggtaaacatatgccatggtagcacatacttttttttttttcctgctctaaaactctttttttttttttatactttaagttctaggatacatgtgcagaacatgcaggtttgttacataggtatacacgtgccatggtggtttgctgcacccatcattccttcatctacattaggtatttctcctaatgctttccctcccctaggccctcaccccccgacaggccctggtgtgtgatgttcccctccctgtgtccatgtgttctcattgtccaactcctacttgcaactccaactccaacatgcagtgttttgttctctgttcttgtgttagtttgctaagaatgatagtttccagcttcatccatgtccctgcaaaagacatgaatgcatcctttttaatggctgcatagtattccatggtgtatatgtgccacattttctttatccaggctatcattgatgggcatttgagttggttccaagtctttgctattgtgaatagtgctgcaataaaatacatgtgcatgtgctttataatagaatgatttataatcctttgggtatatacctagtaatgggattgctgggtcaaatggtatttctggttctagatccttgatgaatcgccacactgtcttccacaatggttgaactaatttacactcccaccaacagcataaaagcgttcctatttctccacatcctctccagcatacgttctttcctgagttttaatgattgccattctaactggcatgagatggtatctcattgtggttttgatttgcatttctctaatgaccagtgatgatcggctttttttgatatgcttgttggttgtataaatgtcttcttttgtgaagtgtctgttcatatccttcgaccgctttttgatggggtttttttttcttgtaaattggtttaagttccttgtagattcaggatattagccctttgtcagatggatagattgcaaaatttttctcccattctgtaagttgcctgttcagtctgatgatagtttcttttgctgtgcagaagctgtttagtttaattagatcccatttctcaattttggcttttggttgtcattgcttttggtgttttagttatgaagtctttgcccatgcctatttcctgaatggtattgcctaggtttttttctagagttttcatggttttaggtcttatgtttaagtctttaatccatcttgagttaatttttgtataaggtgtaaggaaggggtccagattcagttttctacatatggctagccagttttcccaacaccatttattacataggaaatccttgccccatttcttgtttttgtcaggtttgtcaaaggtcagatggttgtagatgtgtggcataatttctgaggcctctgttcagttccattggtctatatatctgtttgggtacaagtaccatgctgtttttgttactgtagccttgtagtataatttgaagtcaggtagcatgatgcctccagctttgttctttttgcttaggattgtcttggatatacaggctattttttagctccgtatgaactttaaagtagttttttcctattctgtgaagaaagtcaatggtagcttgatgtggatagcattcaatctataaattaccttcagcagtacggccattttcacaatattgattcttcctatccatgagcatggaatgattttccatttgtttgtgtcctctcttatttacttgagcagtggtttgtagttctccttgaagaggtctttcccatcccttgtaagttgtattcctaggtattttattctttttgtagcaattgtgaatgggagtttacaatttggctctctgtttttccattattggtgtataggaatgcttgtgatttttgcatattgattttgtaacctgagacttttctgaagttgcttatcagcttaaggagtttttggactgagatgatggggttttctaaatatacaatcatgtcatctgcaaacagagacaatttgactttctctcttcctatttgaataccctgtatttctttctcttgcttgattgccctggccagaacttccaatactatgttgaataggagtggtgagagagggcatccttatcttgtgccagttttcaaagggaatgcttccagcttttgcccattcagtatgatattggctgtcggtttgtcataaataacttttattattttgagatacgttccatcaataactagttcatcaagaatttttggcatgaagtgctgttgaattttattgatgtaatcatgtggtttttgtcattggttctgtttatgtgatggattatgtttattgatttgtgtatgttggaccagccttgcatcccagggatgaagccgacttgatcatggtggataagctttttgatgtactactggactcagtttgccagtactttattgaggatatttgccatcgatgttcatcagagatattggcctgaaatttttttggttgttgtgtctctgccacatcctggtatcaggatgatgctggcctcataaaatgagttatggaggagtccctctttttctattgtttggaatagtttcagaaggaatgataccaggccctctttgtacctctggtagagttcggctgtgaactcatctggtcctgggtgtttttggtgggtaggctattaattactgcctcaatttcaaaacctgttattggtctattcaggaattctgcttcttcctggtttagtcttgggaggatatacgtgtccaggaatttatccatttctcctagaatgtctagtttatttgtgtagaggtgttgatagtattctctgatggtagtttgtatttctgtgggctcagtggttatctcccctttatcattttttattgtgtctattgattcttctctcttttcttctttattagtctggctagtggtctatctattttgttaatcttttcaaaaaaccagctcctggattcattgattttttgaagggttttttgtgtctctatctccttcagttctgctctgatcttagttttttcttgtcttctgctagcttttgaatttgtttgctcttgcttctctagttcttttaattgtgatgttatggttttgattttagatctttcctgctttctcctgtgggcatttagtgctataaatttccctctgaacatagatttagctgtgtcccagagattctggtaggttgtgtctttgttctcattggtttcaaagaacttatttatttctgccttaatttcattatttacccagtagtaatgcatgagcaggttgttcagtttccatgtagttgtgcagttttgagtgagtttcttaatcccgagttctaatttgattgcactgtgatctaagagactgtttgttatgatttctgttcttttgcattttctgaggagtgttttgcttccaattatgtggtcaattttagaataagtgcaatgtggtgctgagaagaatatatattctgttgatttgggttggagagttctatacatgtgtattaggtttgcttggtccagaactgagttcaagtcctgaatttccttgtgaattttctgtctcgttgatctgtctaatattgacaatggagtgttaaagtctcccactattattgtatgggagcctaagtctctttgtaggtctctaagaacttgctttatgggtgctcctgtattgggcgcatatatatttaggatggttagctcttcttgttacattgatccctttaccattatataatgcccttctttgtcttttttgatctctgttgatttaaagtctgtttttatcagagactagattgcaacccctgattttttttgctttccatatgcttggtaaatattcctctatccctttattttgagcctatatgtctttacacgtgaaatgggtcttctgaatgcagcacactgatgggtcttgactgtttatccaatttgccagtctgtgtcttttaattggggcatttagcccatttacatttaagattaatattgttatgtgtgaacttgatcctgtcattatgatgctagctgtttattttgcctactagttgatgcagtttctttatagtgtcaattgtcctgacaattgggtatgtttgtgcagtggctggtaccggttttttctttccatatttagtgcttccttcaggagctcttgtaaggcaggcctggtggtgacaaaatctctcagcatttgcttgtctgtaaaggattttatttctctttcacttatgaagcttagtttggctggatatgaaattctggattgaaaattctttcctttaggaatgttgagttttggtccccactgtcttctggtttgttgggtctctaaagagaggtctgctgttagtctgatgaacttcttttcgtgtgtaacaggacctttctctctggctgcccttaacatttttccttcatttcaacgttggtgaatctgatgattatgtgtcttggagttgcttttctcgaggagtatctttatggtgttctctgtgtttcctgaatttgaatgttggcctgtcttgctaggctggggaagttctcctgaataatatcctgaagagggtttttggcattttttaaaaaattatactttaagagatctgggatacatgtactgtcgtatacttttaaacaatcaaatctcatgagaaatcactcacaattgggagggcagtgccaagccattcatgagggatccatgcccatgacccaaacacctcccaccatgcttcatctccaacactggggattatatttgaccatgatatatggaggggacaaacatacaaactacgtcaaaggcaaagcatggctactgtgaaagaagggtaaaaacacagagatggcatcacctctgacttccaggagtcctcagcagactgagggagacaagtacatattttcctgaaagaggtcactggagtgatggtgtgtttagaatatagaagtagagcagtcacagagaggcagcccagcagagtgttcgcacaaggactgggccagcaactccccactgcatgcaacgtatctgaggaaagtcattaaaataggtgatggtcactttccatcaagtccctggtatggtccatggaggcagggttgtcaatctcattttggcatttcagaggcctctcagggtttggatatggaagaagacaaccagcaatgattatgcattgcagagatgcaggtgagccccagtttcttgccagttgggaggtcagtgctaagagccttgctgtctttccctggaacatgagatgccaatttctttctggacagagagtatttggttggctaaagtcaaaatctaaattttgctttgggataaattccaaaaatattagcattattcaaatttactttcactttatctttccgaatcttcaaggtccaaaagcattgctgaataattctgtttctaaactcacttgcagcgtgctctccctccaaggcgaagaccataatctactcttgtctggaaatcatacaagtaggtatctcagcaaatgatactcgtgtgttatcgttcttatgagtaaatcattggcagtgagtgtgatttttttttttttatgaaaggataaatacacgccctctattggggtcaggttttgtgcctgtacttcttccgcctactgtatcatagcagcttagaatcccagctgctggctcgggctgcagttctctcatggctcgcgcagggtggaccagccccgttcctttatgtgtgtgtctactgctgacctgtggctttgccgaggcagggaagctgctggtagtgcccatggatgggagtcactggttcaccatgcagtcggtggtggagaaacttatcctcagggggcatgaggtggttgtagtcatgccagaggtgagttggcaactggaaagatcactgaattgcacagtgaagacttactcaacctcgtacactctggaagatcagaaccgggaattcatggttttcgcccatgctcaatggaaagcacaggcacaaagtatattttctctattaatgagttcatccagtggttttcttgacttatttttttcgcattgcaggagtttgtttaatgaccgaaaattagtagaatacttaaaggagagttcttttgatgcagtgtttctggatccttttgatacctgtggcttaattgttgctaaatatttctccctcccctctgtggtcttcaccaggggaatattttgccaccatcttgaagaaggtgcacagtgccctgctcctctttcctatgtccccaatgatctcttagggttctcagatgccatgactttcaaggagagagtatggaaccacatcgtgcacttggaggaccatttattttgccagtatctttttagaaatgccctagaaatagcctctgaaattctccaaacccctgtcacggcatatgatctctacagtcacacatcaatttggttgttgcgaacggactttgttttggactatcccaaacccgtgatgcccaacatgatcttcattggtggtatcaactgtcatcagggaaagccattgcctatggtaagtcacctctcctttagcacattaagaataatctggctttggaaattaaaaaaggattccttactgaactgtgatttgacattttcgtttgttgcatttcaaatttctttccagtttaacaaattattttgtgcgaattcatgtactcatcaattatcaaattttataaaactgcccttcttgaaagtatatgtaataatttaaaaattatagatcatattcaggctacattttaaaatacgatgtttagaaaagtaccaaaaaccacagcaagaaatgaaacttccgttttttgttaattctatgtgaccccgtagttgaaatgctcttaagttttgtgtacattcttttcattgaaaaaaagtattttaggcatatgcaatatctcatgtaagttcccatacctatttagtaaaaataaaatctagtattgggctgaacatattcttctttatcttgcatttttcacttgccaataaattatgggtacctttatagagcaatacagacagatttgacaagttcttttaataattgcataaaattctttactttggatacaatgtagttttttaaccaattaatattgatatatatatagccattttccactctttccttttgtgaataaggctgtgtaaacactcttcaatactttccttgcgtgaatatatttctatattcttgcttttatcttagtagactagagtcctacacgtagggttacagggttttcctgaattgagaagactggcatctttttgctattaagtcttcctgttcaggaacatatatgtctcactatttattcagatcttgttttatatacataaataaaaattttcactatataagcattttatgtttgtttttaacatttattccttggcattttattactttagaaactattttgtacagggcaatgtttccatttctacatttaactgattactggtaattaaaattttggtttttgcatatgtatcttgtatccagccacatcactaacttttcttattattttgtagtatgcattagatgtacaatatacaataccatctgcaagtaattcccttgtctgatatttgtactgcttcttttgctttgctggagcatatacttccaaaatattattgagtaatattgttagagtagccagtttaaatagggattcggttgcttgtgactgaaaaatccttgaaaaataccagaataagattcttggcaaacgcatagttgctaaatccagatgaaacacctggtgtctcatctcattatattattttattaggggtggagtacacatttttatgtattgttctggtttcttacaagattcagtagactttgtaacacagttatatctgtcattggcagatggttggtgaaagagtgaccgttcagccatctcataggaaagtgaaataatgctctttctaaaaagcaggaagactacagttgtaggcctttcaaaattaggcatgactttcagctcatggcaagaccaggcgaggagatgcaagttgcaggactctaagaggttggacttatcaaagcacttttctcctcgttatcctccattaattacagtaccaagcaccacccatgtgttgcctacaccccacagccttcggccgagttgaggatctgccacttcctgaacccacgctgagtttattgtggctcacagggtcacctagaggcctttaaagatataaaaacctatatatgattttatatcacctgtgatagagggatatctataaaaaatgaaacattaaactatatatggtttcatttattttgattgtaaatatcttttatgagatatgaaataaatgtgtttctatatctattaaagaatatacacatgtatgaaagtttttatagtttgcagagggttatgtatattaatgtatatttttatgattatacctgtaaaggcagcagaattctcacagaggaattcgatctcaaagagggctttctgtcaaagagccttggatatggcccaaccacaaaagtaaaagtaaattgtcatcaaaagaacgatgaacactgcatattgctctttccttgtttcagatgccaggatgtgtctgggaaaagcatgcagttggttacatcttgctgggaaacaggattcagagtctgagtctcatctgtctgatgagaaggaagcattacttgatgatagagtatgtgtttgcacatgtatgtgtttgtgtatgtgcaggtgtgtttgcgtgcagtgtcccagaccctgcacaggggatttcttgaagatctcctgtaacaaaatctccttgagtctatccaggagaattacagccagggatgtaattaaatactttaacaatgatggcagatggccccatctccaatttcaacatgggatttggaggggacaaacttttaaactatatcaattggtatggtcattcttttacatttcagtattctaatgtgtgtgtgttgattagtgatgtgtaaataattcagcagaacattgaaatagttttaatgagaaaaagaggaagtcactcttagtctctttgaatttttggtgagttccaacagaattgatgactggttttaggggaaaagaattcaggcttcatctataccatccatggtaggtgcagctctgcagacctggggataggatgtggttacagagcaagaaaagatctgtgctttccccattgctctaagattctggctatagtccaagatccaaattcaaagttaacttttggttgacaagactaaggcctcccactaaaattgtttacttcaagtatttattttcaaagttttcaaacatacaaaatgaaaagactatagtgtaatgtgcacctgtatatcaatccttaggctaaataattttcagtgttttgctgtattaattcatctatccccttattctgaccttttaaagaaactttttggctgtcatttttttagtggaaattcttggcttgtcattccatcattgaatattttattaaatataaaaaataagtaaaatttgttacacggccacaatatcgttatcacacctaacacaataataatactttaatattatctcatttctagcccataattaatttacctccaattgcctcatacaacatctttttatgttgatctatggaacagagaattcagaaataaacccatacatccttggtcaattgagtaagttccaaattttatgagggtgtcaagaccattcaaatgggagagaacagtctcttttttaggctgcaaatgctgttcttccatagtccaacagtgaccctccccaatttaggggccaacccagggatctaggtccatgtaacctcctgataggccaacaatcttaggtagggccaactctatacccttggtcagtaggaagcagttggaagatgagaccttcactcacatgccaaagatttgtcattgttgctatgtcaggggggaaatgtggagccctaattagggaaaaagagctaggctggcaggaccaggggaaagcaaaaaagaaaaagcagatgaactataagtctccctttcttcatggtctaggacacatagccctcctgcaaaaataacataatcttcctgcacccagcgatcaccagaccctcagctgatagaaaaatgcaagttatctcactgcaaccttggcattatcaatactgcatctagctctctgcagcacaagcaccatcctataaaatcctcagcaagcctttgtctccttgcagccagctcttctcttgctgactatcttgcaacatattttcctactttctctaataaatctgcctttctttacctacaagtatcttggtaaattctttttacctcccatgccacaccagtctcagagagttgccacccatgacagttaccataaggcttgcaaatactatcttataaaccttattttaacctgataacaacttaacactatttgcataaacaaacacacagcaagaagaaaactaatagaaactagtcttaactttgctccctactttttaactctttgtgattttcatttatatcttgttgtactgcctatatcttaaaaagttgtttagttattatttttgatttgttcattgtttagtctttatatgtaggataacagtagtttgcacacacagttacaatgttataatattctgtgtatttctgtgtacttactattaccagtgagttttgtaccttcagatgatttcttcttgctcatgagcttccttttctttctgattgaagtactccctgtagcatttcttgtaggatcggtctggaattgataaaattcctcaacttttgtcttggaaagtctttatttctccttcctgtttgaaggatattttcaccagatatactattctggggtaaaaggtttttttttcttcagcactttaaatatgtcatgccactctctcctggcctgtaagggttccactgaaaaggctgctgccagatgtattggaactccattgtttgttatttatctcttctcttgctgcttttagaatcttttctttatccttgacctttgggagtttgattattaaatgccttgaggtagttttctttgggttaaatgtgcttggtgttctctagccttctcatacttgaatataggtatctttctctaggtttggaaagttttctgttattatccctttgaataaactttctactcctatctctttctctacctccactttatgggcaataactattagatttgcccctttgaggctattttctagatcctataagcatgcttcattgttgtttattcttttttcttttgtctcctctgaccatgtattttcaaatggcctgtcttcaagctcagtaattatttcttgtgtttggtccattctgctattaaaggactttgatgcattcttcattatgccgattgcatttttcagctccagaatttctgcttgattctttctaatgatttcaatctctttgttaaatttatatgctggaattctgaattcctcctctgtgttatttggaatttctttgagtttcctcaacacagctattttgaattctctgtctgaaaggtcgcttatatctgtttctccagcgttagtccctggcaccttatttaattcatttgatgaggtcatggttttcctgaatggcgttgatgctagcagacattcttcagtgtctgggcattgaagagttaggtgtttattgtagtcttcattgtctgggcttatttgtagccgtccttcttggaaaggctttccagatatttgaaaggacttaggtgttgtaatctaagctgtttctgctttagggggcaccccaagcctagtaacgctgtggttcttgcagacttgtagatgtattgccttgatggtcttggacaagatccaagatacttctctggattccagcacatactcttgctttcttcccttacttcctcccaaaaatacagagtctctctctctctctcactctctctctctctctctgtctctctctctgttctgagccacctcaagctgggggtggagtgacacaagcatccttgtggccatcaccactatgactgtgctggatcagacctgaaaccagcacagctctgggtctcacccaaggcctgctgtaaccacctcctggctactgcctatgtttgctcaacgcccttgggctttacaatcagcaggtgatacagccagccagacctgcatccctcccttcagaatggcaaggtcccccaggccctgggtgggtccagaagtgccatctaggagtcagggactagagtcaaaaaccttagcattccacctggtattttattgtattgcagctgagctggcactcaaaccacaagatgcagtccttcccattcttccctcttatttgcaaagacagaggagcctcaccttgtagccactgccacccctggccatggacagtactgccagacttctgctggtgttcccttaaggcccaaggtcttaagtcaacttgtggtgaatgctgcctggcctgagacttgcccttcaaggcagtgggctcccctctatcccaggggagctccagaaatgctgtccgagtcaagtcctggaatcagggaccccaaaagccctcttgatgctctatccccctgcagcagtgttggtacctaagttataaggcaaagtcccctttacctttccttgtgctttcctcaagcagaatgagttttgctccatagccatcacagctgggaatgtgctgaatctcacctagagccagtaagtctcagaggctcaccaaggcccttgacgtagtacgaggtttcactgctggtattcaggttccaaggtctcttcagttagcaggcgatgaacgctggcaggactgggccctttcttttaaggcagcaggttcccttctagcccagggtgtgttcagaaatgtcatctggaagctagggcctggcacaggggcctcatgattctgaccagtgccctatcctgctgtggctgagctggtctcctaaatgcaagacaaagtcctccccacttttccctctcctctcctcaagtagaaggaaagggtctcttttggagccgcaagctgtgcatcctgggattaggggaggagtgatgtcggtactcccttggctgcttcagctagtgtttcagtatgtcatactcccctttacccagttcactgtctctgggcctagtacagccctagaactcacctaagagttgcaatctttatggactagactgcctttcaagtttacttgaggccaagaccattttggccctcggtggtgaggtctgtgggcattcaagttcagacctctgagatcagcaatttccctcagcctagggctggtttaaatgctccctcaatgctgggcacggtggctcatgcctgtaatcccagcacttagggaggctgaggtgggtggatcacttgaggccaggagtttgagaccagcctggccaacatggcgaaacccaatctgtactgaaaatacaaaaattagccaggtgtggtggtgcatgccggtaatcccagctactcaggaagcagagattcgcttgaacctcggaggcagaggctgcagtgagccaagatcataccactgcactccagcctagatgacagagtgagactccatctcaaaaaataagaataaataaataaataaataaataaacgctctctcagtgggtgggtgtcagctgagtttggtctgggtttcctttctgctctaacagaatagcactgatttcagtgcctcccaattgtctcccaccagggctcagggattctctttatgccacaccgccactgtgggttcagggggttgggtgacataggagatgcagaacttttttttttctatttcttcagtgtctctgagttatataaaatgaaaaccaggtactatgagtgctcacctgagttttggttcttatgaaggtggtttttcctgtgtagatagttgctaacttggtgtcttctctgtccagattcttttccagtattgacaatcctttacatagaaaactgtgtgtaatgagttctaaaggttcttatgacccctgattgagaagctgaattagagatattgggtttgggagcaggtagaccactttgacacctttagggttctgggtggctagggacattgtccaatatcaaaagaactttaaaaaacaatcccttactggcaatgcattttctgccttcagggacaaagcatcgatgaaagcaatccagaaaaattgttcttgttgactaggcttcttgagagacttattcactatcaagagaacagcatgggaaagacctgcccccatgattcaattttcccaccaggatcctcccacaacagtgggaattgtgggagttacaattcaagatgagatttaggtggggacacagccaaaccatatgattccaccctggtccctcccaaatctcatgtcctcacatttcaaaaccaatcatgccctcccaacagtcccgcaaagtctcagcattaactcaaaagtccacagttcaacgtctcatctgagacaaggcaagtcccttccacctatgggcctgtaaaatcaaaagcaagttagttacttcctagacacaatgagggtacaggtattgggtaaatacaccattccaactgggaaaaattggccaataagggggctacaggccccatgcatgtcagaaatccggcagggcagtcaaatcttaaagctccaaaatgatctcctttgactccatgtctcacatccaggtcttgctgatgtaagaggtgagttcccatggtcttaggcagctccacccctgtggctttgcagggtacagcctcccttccagctgctttcacagagtggcattgagtgtctgtggcttttccaggtgcacagtgcaaactattggtggacctaccattctgaggtggagggatggtggccctcttctcacagttccactaggcagtcccccagttgttgctctgtttgggggcttcaaccccaaatttcccttctgcactgttctagcagaggttctctgtgagggtcctgcccctgcagcaaacttctttctggacatccaggcatatccatacagcctctgaaatctaggcagaggttcccaaacctcaattcttgacttctgtgcacccacagtctcaaccccacatggaagctgccaaggctcggcacttgcaccttctgaagccatggtgtgagctgtactttggctccttttggacacagctggagcagttgggatgcaagacaccaagtccctaggctgcacacagcagggggccctgggcctgtcacacaaaaccattgtttcctcctaggcctccaggcctgtgatgggagggactgctgtgaagacctctgacatgccctggagacattttccccatggttttggggattaacattcggctcctcattacttatggaaatttctgcagccggcttaaatttctcctcagaaaatgggattttcttttctatcacattttcaggctgcaaattttccaaacctttatgctctgtttcccttttaaaactgaatgcctttaacagcacccaaatcacctcttgaatgctttgctttttaaaaatttctcacaccagttaccctaaatcatctttctaaggttcaaagttccacaaatcactaggtcaggggcaaaatgctgccagtctctttgctaaaacataacaagagtcacctttcctccagttcccaacgagttcctcatctccatttgaaaccacctcagtctggactttattgtccatattgctatcagcattttgggcaaagctattcaacaaatctctagggagttccaaactttcctacattttcctgtcttcttctgagccctccaaactttgccaacctctgcctgttacccagttctaaagtcccttccacgttttcaggtatcttttcagtagcaatccactctactggtaccaattgactgtattagtctgttttcatgctgctgataaagacatgcctgagactaaggaatttacaaaagacagaggtttaattgacttagagttccacatggctggggaggcctcacaatcatggcaaaagtcaagaaggagaaagtcacatcctccatggatggcagcaggcaaagaaagagagcttgtgcaggaaaacttccatttttaaaaccaccagatctcgtgagacttacttactactatgagaacatcacgggaaacgcccagccccatgattcaattatctccctccaggttccttccatgacacgtggaaattgtgggagttccaattcaagatgagctttgggtggggacacagccaaaccatatcattattgaatttgatttgctgaaatattgttttacattttcgtatctaaggtcatgaggatctgtagtttttgtatcttgtcacatctttatctggttttggtattgtggtaatgttggtctcacagaatgaattagggcatttcacatccttctgttttccggactagattgtgagaaattggtattatttcttccttcagtgtttggtagaatttatcagtgaagtcatcagaactttaccgttttgtttgtgggaacatttgaagtcaaaattcaatttgaatttaaaaggtacagattatgtcatttgtgttattaatttcttcttgtgtaaagtctgacagcttgtgtcttttaagaaatttgtccattccatctaagttgtagattttattggcatgaacttgttcatgtttcttattgttttaatacctgtagaatttatggtgatactactgctctcattcctgatattggtaatttatatcttctgtcttttttcctaatcagtctgggtagagatttatcaagttaattgatttgccccaaaagctagctttggtgtcattggttttctccattgtttttctatttcctatttcattgatttctacactgaagttagcctccagggaaggtagatcactcactgcccatggatgggagccactggttcaccatgtggtcggtggtggagaaactcattctcagggggcatgaggtggttgtagtcaggccagaggtgagttggcaactgggaagatcactgaattgcacagtgaagacttcttcaaccttatacaccctggaggatctggaccaggagttcatggcttttgccaatgctcaatgggaagcagaagtacgacgcttattttctctattaatgagttcatccaaatgtttagaatttaatttttcacattgcaggagtttgtttaatgactgaaaattagtagaatacttaaaggagagttcttttgatgcggtgtttctggatcctttagatatgtgtggcttaattgttgccaaatatttctccctcctctcggtggtcttcgccagaggaatactttgacattaccttgaagaaggtgcacagtgccctgcttctctttcctacagtcctagatatgtctcagggttttcggatgctgtgactttttattattattattatttttatttatttatttatttttgagacggagtcttgctctgtcacccaggctggagtgcagtggcgtgatctcggctcactgcaaactgcacctcccgggttcacgccattcctctgcctcagcctcccaagtagctgggactacaggtgcctgccaccacgcctggctaattttttttttgtatttttagtggagacggggtttcaccgtgttagccaggatggtctcgatctcctaacctcgtgatccgcccgccttggcctcccaaagtgctggaattacaggggtgagccaccacacccagcctggatgccatgacttttaaggagagagtaaggaaccacatcttctacttagaggagcatttattttgcccatattttttcaaaaatgccttaaacatagcctctgaaattctccaaacacctgtcatggcatatgatctctacagccacacatcaatttggttgctgcgaatggactttgttttggagtatcccaaacctgtgatgcccaatatgatcttcattggtggtatcaactgcaatcagggaaagccagtgcctatggtaagtcattgctcctttagcacattaaaagtattctggatttgaatatttaaaaagattccttacggaactgggatttgacatttgtgtttgttgcatctaaaatttcttttctgtgtaaaaaattattttgtgccatccacgtgtttgttggttagcaacttttatataatggcctcgttaatatgtatgtgtatacgattggttaattgctcataatttccactgcatttttaaaattttgaaacagagtattgctatggtgccctggctagactcaaactcctgggctcaagtgatcctcctatctaagccttccaagcaattatgacttttttagtatttttggaaaagtatttaaaagcacaataagaaatgaaaatttcatttttaactaacctgtactacctgctgcagtaaaatgttctttgcagttttgtatgcatgtgtttccatctgttgaaattatatataagcatatatgtaaatatttatacttattttatgaaaatcaaatcaactatcaggctggacatgttgttctttactatgcgtttttacttgccagtaaaccagagacatcttcacagatttgacatgttcttttaataattgcataaaagtctttactttggatgcaacatagacacaagctttcccaggtgtttttctgctaaagatttggctaacttcttcaaaacaacaatgataagcagatgttatctttctttgaccctgaagaaagtataaagcagaatgcccttagccacccaaaaaactgttaccatgatgtttggtcttgtccagtctgcttttgatttgactggatcactttcatctcttggtagccattgctttgcttgtgctttgtcttcattatcatactggtaaatctatgtttcatcttctgttacaatctttgaagagatacttcaaggttttttgtttgtttgtttgttttgagacagagtttcactcttgttgtcgaggctggggtgcaatggtgcgatcttggctcaccacaacctctgcctcctgggttcaagcgattcacctgcctcagcctcctgagtagctgggattataggcacatgccaccacacccagctaattttgtaattttagtagaggcagggtttctccatgttggtcaggctggtctcgaactcctgacctcaggtgatctgcctgcctcggcctcccaaagtgctgggattacaggtgtgagccaccgtacctggccaaggtctggatcccacttgtttataatttccattgaagggtttgttcttgtctgcagctgatctggctgcaatgattttggcacccaacaagtagaaaatttgttcaactgaaatttttgtcagaattgtgtaaactgtcctgactgagatatctattgtgttggctattgtttctgctgttaattgtcagtcttcttcagttagagcatgagcaagatgaattgtttccttgcaaattggtatggatggtctgctggtgtaggctttatttgcaaccttgtcctgtcccttcttaaaaggaattactcatttgtaaactgcaaatttcttttgaccatttttcccattaacttttttttaaagcatcagtgatttcaccattcttccactcatatctcagcataaattttatgctattgcttcaattgctgcagaattcatgttgttttgatgggggcttttttccaactgatgtcctatccttcttagtgcctcaaactagatcctattcagacatgttttaacaagttagtaaaagtttgtttggcacaaagaaatttgaaatccatgcttaagtttttcataatatgaattttcatgaattgtttgatgatccctcatctattacttttttagcaatggaccatgcaattttggctatgttctggcttcttacaaggttcagtagactttgtaacacagttgtatgtctcacacatcggcagctgtttggtaaaggattgacttttagccaactcatgggaaaatgaaataatgtaaaaaacaggaagactacagttttagacctttcaagtgaggcatggctttcagctcttggcaagaacaggcgaggagatgcaagcctctacaaggctagacttttcaaagtgcttctctcccctttaccctccttcagttacagcaccaagcaccacccaggtattacctgcagcctcaccctctacccagttgtgggatcctgccacttcctgaacccacactgagttccttgtggctcacagggtcacccagagggcttccgagatacggaaagctatgtgtgattttatatcacctatcatgttaagatatgtataaaataggaaacatattggccatatatcattttatatatttttggttttacatgtctaaaaaatacatgtttttttgtatgtattaaaggataggtatgtataagaggttttatagaagtggaaagttatattttttgcatatctttatgaattataataaaggaaggaaaattctcaaagaggaattcagatatcaaagagtgccctttgacaaagagccttggttacaacatacctacaaaagtgaactgtcattgaaagacctatggacactggatttctctttccttatttagaagggcaggctgtgtcttggaaaagcatacagtttgttgtatcttgctggacaacaggagtcatagtctgaagtgtctgatgagaaggaagcatcacttgatggagtgtgcatctgtgcctgtgtgtgtccacgcgtgtttgtgtgtgtgcatgcacacatgtgtcagcatgcagtgtctcagatcctacataggggtttttcctgaaggtctccagtagcaaaaactcattgagtctatccaggggaattacatccaatgctgtaattaaatactttaaccaagatagcagatcatcattcaagagaacatcaagatagttttaattaagaaaaaaaaaaggaatcactgccaggcttttttagtttttggtgagttccagcagaattgatgactaggtccagtaggaaggaattcaggattactctttaccatccagggtgagtgtagctctggagaactggggatgggaggtgactgcacagcaagaaaagatctgggcttcccccattgctctaagatctggttccattgtgagattcaaattaagagtaagctgttaatgggcaagtccaaggcctctcaccaggattatttatttcaacttttttttgtcaaagttttcaaatgtatagcaaggagagactacagtgtaatgagcacccatatatccatctttgtgttacataattttcaatattttattatactgattcatgtatctgctcttttgttctttttttaaaaataaattttggctataattttttaatggaaatgctggagatatcattctatccccaaatacttcactaaatgtaagaaataaggaaaaaaggaaaatttgttacatagccacaatatcattatcattcctcacaaaatcaataactctttaatattgtctcactcataatgcataatgaaatttcccctaattgtctcaaaaatgtcttgtacatgcagatcagtagaacggagttgagaatccagatataaacccatacatccttggccaattgatttttactgtggtgccaagactgttcaaatgggaaagaataatctcttcaacagaggtcgctgagacagctgcatatccacatgcaaaagaatgaagatgcacccttatatgcaaaaactaacttgaaatggatcaaatagctaaatagaaaagctagaagtgtaaaagtttagaaggaaacatttggggaagtatttatgacccagatttggaaatggtttctgtgatgtgacacacacattgttgtgtatgagaaacaacaacaacaaaaaacacagacatcaaaataaaacacttttgtgtgtcaaggacactatcgagagagtgaaaagtgaacccacatggcctctctaagatgtgcaagtaaacatgtacgtgcctgacatggaggctcctgggaggcaaccacagtcccaaaagacctgaaatttcaaaatcctgaatgttaagagcctgagagatcaacgtcctacaaatgtaattccagaaaaaataactttaaaaattatttatttgaaagataatctgtttacgttttaaaaggggatttatttgaaaaacatataaaaacacgacagaccacttcataggccactttacaccataaaataggtaataataacatacaggtatctttgcaagcgtaaaccctcaggtgtactaatgaccttcatataggtgtatcaattgtgagaagatgaatcatattcttaaagtaataggttaaaaaaggaaaagtatcaatatttattactgtggttggtaatcttgtgcactcaggtttgcagctttgatcatctgaaataccatgaaaaatgacctgagacttatcatgaggtcagtcagaaacctctatgggtcaccaccgcatacacagttgcttaaagtgcccaagtcttgagaaattttgttttgttttgtttttttgagacagagtctcgctgtgttgcctatgctggagtgcagtggtgcgatctcagcttactgcaacatctgctgcccgagttcaagcgattctcctgcctcagcctcctgggtagctggaattacagatgcccaccaccacagtcagcaaatttttgtatttttagtagacatggggttttgccatgttggccaggttggtcttgaactcctgacttcagatgatctgcccttctcagcctcccaaagtcctgggattacaggcatgggccaccacgcccggccaagaaatgttatctttcacagatgcagatgtacaaaagggacatctcttcattattgaggacatttcaacatttgtacgtacatgcctaatgcttacacacttactcttgtgctaatgcacttccatggagtcaaatttgtgagcataaaatgaattagaattctccataagtctatacacagtctctgccttcagtattggaaatgatatgaagatgaaatacatagcatagcaaattgtaaaaataatgctgacaatttaaccttgtgaaaaaacctaaaaagaagaaaaagtaaaagaaaaaaaggaaaaaaacctccaaattaacctattctgtgattgtgatttttgggattttagctgttagagagtttagatttcagggagttagaccttagggatttggatccttagggaatcaatatttcagaattcaaccttcaggattatgtgttttggggttatgtctttcaggattgtgatccaaaccctatagcatcttgtttcttagcataacctgtactaatcgtagatatatctctgtactccagcagagcatcataaaattaagtagtttacagcagagagtctcaacctatcagtgattaaggaatagaaaaaaacgttttctgcagttgattatatattcataattgtttgtaatatataacaaaaatgaaaagctagaaagtgaaatgaaataaaccacagccctataaaatgcaaaactactgatgattgcttggcgacatagcaacaccaattgctacaggaatttctaagcatttcctgcagggtctgcacccatgctgaggtggttaggtaacacaacgagctgcaaaccacatcttgaacagactgttttagacccagtccagtggctctatgtgagtagtgtttaatcagaaataaggcccagcacagtggctcacgcctgtaatccctgcacttagggaaactgaggtgggcggatcacctgaggtcaggagttcgagatcagtctggccaacatggcaaaaccccgtctctactaaaaatacaaaaattagcacagtgtatggcgggcatctgtaatcatagctactcgagtctgaggcagaagaatcacttgaacctggaagatggaggttgcagtgagccgagatcataccactgcactccagcctgggcaacagagcaagattctctctcaaaaaaaagaaagaaagaaagaaaaagtaaacagaatactaaagaaagaaagaaagaaaaagtgaacagaatactttctgttttgttaatgtgctaattacatggtcacaaacagtgactaatttgtgatcaccagggcaaagtctattatcagctacctgttttccttgtaaccttgtgttttgggaacctagcaactctactccccactaagtgacaacccatgcaggtttgcccagattattcccagtttaacactggaagtctcacgtcctgggagactcttcattccccaaggagcagggacagcaggtcactgtcactggagcactggaagctggccacatcattagcagattcagaaggggcacgacttaaggaggctcatgcttctcttgtcttctgccttaggctgtcatttccaatgggtgacaagttccttccatgcagaagccaggccaggagataaagtcatcttgtcctagaaaaactgttagaaagaagggaaactgtctagtgtgtttcgccaaaagagtttcacagactcttctcttgtaggggatatgggggtgggtgatcactgtcctggtctccctgaagcaaggacgcctctctggcctcagggtgcctgtcaggcaagtctctcctgtccctggaggttcacagagccccatccctgcaagagcaatgctaagtggggttggctttgagccccagccattctcttaacaattcttttagttaagtatcagttcccccatcccctcactccagcattttttgcctcttgctatgatcagttttctcactttcacttttacacctctgatcactgaaaaattacagaattataagtttggaaaaggagtctatatttcttggaaaaggttacaaccttcaaggtggccatctagctggctgggaagcatgacctctggcaaataccagagacaggcccttgaaaggagaagggatggggtaggagctttatgctgaacaaacagggtaaacatacatattcaccaggttacagaaggagctatgaatatttatgaaggccatcctgactcatgcgtattgaacacacatgcatgttacatatgacccgtgttcaccctggggtggagacatcatatttaaatggattacaattaggccctatacatcaaaaggtctcttcagggcacaaaggcactcaaattcacagtctccgtaaactggccagaaccagtctgtgatcaccagtcactggtcttcttaccaggagaaagttactgaaatcagcctcttgtccaatgaaagcagtatttgtggcttatggaacaaggaatggacgtcagttagtcagtgtccggtggaggtgcacttgtttaacattgtttttctctagacctgtgcttatttagctgctagagaaaaagaaaaactctgtggcagttggaacatagtttattctttaagtgtaggcgcccatgactcaactcttgcctggcgtggtttgaggtcttgtgtgtagttttgtatctgattgccacaaaaagtccactgagtccatctcatctctattttaacactaaagtgggtcagttgtgtttaaaccacaaaagggagggagtgtgacgaggcgtgtccagccttctgtcccgtcgtggctgtgactcagttttgaaggtttctttggggtcccgctggccaggagggttcgattcacttgttgtgggagacgggcggcacttagtattttcttttcagtttacacgttcctgggcatccctattaagatgtgcagataaacacgcacatgcttcatgtggcatctcccttagttaaacatcttttttttttttcctttcctgtgagtcttcctgaaacaggtgagcccaggtggagcctccgcctgcgttaggacctaacctttctacgtctttatgaaatccctggtgtcagttactgctgcttcccctcaccagcttctttcctttggtctaccctaagaatgtgatacccaacacaatacaccgtctctttggcccactcaagacattctggtgatgccctgtggcctgctggcccccactagctatcaaggtcccccatcatctcacctttcctggctcatgggctttattttatgccactcttcatgctcagaagcacctggcggtttagtttttttgtgttgctctaaaggaatacctggggctgggtaatgtataaggaagagataatatctggccctcagttctgcaggctgtataagaatcatggtaccaacatctgtttctggcaaaagacttgggctacttccactcatggcagaaggtgaatgtggaaggtgctgatcacaaggtgagaaagaagcaagagaaaaaggaggggttgccaggatctttttaacaatcagttcttgcaggagcaataggacaggaactcacccattatcgggaaaaacatactaggtcatttgtgagagatccatccctgtaacccagatacctcccactaagccccacctccaacattagggattaaatttcaacacttgacttgagggagtcagatatctaaactatatcatttgatatggtcagtctttttgattgcagctattctaatgggtatgtaaattaaattgcaattttaatttgattttcctatttaaatatgatgttgagcatctttatgtgtgactgtttgccatctgtatatgttctttggtaaatgttcaggtctatgccactttttaagaaattgggttttctcttcattattgaggtttaaaagttatttatatattctggatatttatactttatcagtttctgggcttttttccatgaaactttttattttagaagaaatttagatttatgcaaggttgcaagaactagcacagagaattttcatatcctgtgcctagtttcctcctcttttttttttttttttttgagacaaagtgtcactctgtcacccaggctggagtgcagtggggcaatcttggctcactgcaacctctgcctcctgggttcaaatgattcttgtgcctcagcctcctgagtagctgggattacaggtgcacaccaccatgcccagctaatttttgtatttttagtagacacagggtttcaccatgttgaccaggctggcctcaaactcctgacctcaagagacccacggaccttggcctcccaaagtgctgggattacaggtgtgagcaatggcacccatcctcccctatggttaaatgttacgttactatagcatattatcacaactcattaaccaacatttgatacattatgatgaactaaagtctgtgttctctgcagatgtcattaatttttacctaatgtcctttttcatttctaggatcccatcctggataccaaatgacatttagcccatcacgcccccttcatctcctgtaccgtgtgacagtttttcagactttccttgttttcgatgactttgacagttttgagcagttctggtcggatgttctgtagaatgtttctcagtcttggtttgtctgatgttttgatcatggttagactggggttataggttttaggaagtaagaccacaaaggtaatgtcttttcttgctttcttgactatggatagccaactcttgaaaagagtagtcttttctccactgaattgtctttgcacttttgtaaaaacttggttgttcatactgctaaacatctatttctggactttctactctgttccattgatccagttgtgaaatatgtgataattatagctttgtaatgtcttgaaatgagtagtattagctctctaatttttttcaaagttgtttttgctattgtaggttttctacatttctgtatgaattttagagtcagtttgccaatttgcacaaaaaaaagcctgttgggattttggttgaaatcatatttaagttacagttcaactggggagaaacagcatcctaacaattttgagttttccaattcttgaacatatctctatattcagatctctcctcagtgttttagttttcagtgtagtctttcacatctttgatcagatttatccctaagtatttcatgtttttgatgttaagtggtattttcattcaatttgcaattgttcattgctagtacagttgacccttgaacaatgtggagattagggataccaacctcgcaggtagtctaaaatccacatatcattttgacccccataacttaactattaatagcctactgtatagcagaagccttaccaataacgtaaatagccaatgaacacatatttgatatgctttatgtgttatatactgtattattgtaataaagtcagctagataaaagaaaatgttattaagaaaattttaaggtttgagaaaaaattttagggttgagaaaaaatgtattaagtattcattaagtgggagtggatcatcataaagatcttccttttgattgtcctccactgagtaggctgaggaggaagaggaggggttggtcttgctttttcagggatggcagatgaggaagaggtggaggaggtggaaagggaggcaggagaggcaggcgcactcgatttaacttaatggaaatacatcataattactgtctgacatttttgctctttcagttctttaaaaatgcttgatatagtatgaattcttcttcaccatttgctttagtttcagtgcccatatcatagaagggtacaatttgcaaaagaagtcaaaagcagtcttcaataatcggaatccttctgcgagattgtctaatgtcaatttattttctgacactgcttcttctgtatcttcttcctcattgtctggtactgattcaaaagcactcatctcatcaagtcatcttctgttaattcctcaggtgtggtgtctattagcttttaagtatctccaagatctctgtcttcaaactctttatgcccaccttgtttttcttgcctgccatatccacaatttctttcatgagtcccttgattggctctgttttaagtcctgtgaagtcacgcacaacatctggacacagttttctgcagcgataatgtattgtttagggcttgatggctttcacagctttttctatacaacaaggacatcttccacagtgtaatccttctagattttcatgatgttcgccccgctgacattctcttccatagtgttgacaatcctttccatagaaaaccatgtgtaatgagccttaaagtgccttgtaaccccttgttctaatggctgaattagagatgatgtttgaggacatggagaccactttggctccttttgtgttgaattcatggggttctggatggctagaggcattgtccaatatcaaaagtaatttaaaagacagtcctttagtggcaaggtatttctgatttcagagacaaagcgttggttttcatggaaccagtttggaaaaagtgtttctgttgtactggccttcttgttctacaacaaaaagactgggagctggcgtttattttttcccttaaaggctcaaggattagcagctttatagataaggttattcttaatcataaattggactgtatttgcataagacgacagagttagtctatctcttcctggcttaaatcctcgtgcccgcttctcttccttacttataaatgtcttttgtggcattttttttctctagaatagggcacttttgcatgaattaaaaactggctcaggcagatattcattctcctcaatgcttctcttcatggggtctgggaagtcacctgctacctcttgtttggcagaagttgcttctgttatcttgagatttttaaagtcaaacctctttctaaaactagcaaaccatcctttgctgccattaaattctccagctttatatccttcagttttatttagctttatgttgtcatataatgactttgtttttctcaggtcatattagagtatataggtatgcctttcttataaccatcctacacccacataaaagctgcattttttataataaaattttatgtagataatcatgatacagaattactctttgacaaattatctatggatgtaatgactctagtttcagactttttttttctgaaatatgtgagcgttccccaacagtctggtctattttcctaccttaattttctacttttggtcttgaatttgttgatagggcacagaggacttcccatgaggctgtaaagaacttatttctctgtgtgggctgtgcacaccatggtgctgtcattaccattaccaccaggagactccttaaacacttaggatatatgatagttttcacttggttaaaaaatctgccagtttctcagtaagacctttctcactattaatctttaacccacagatggaatcctagttctttttatccattaactctttgaatatccttctttctaccttggcagtggagtccattgagattgaaaagctgcatttttaatatgagataaaaagatattttggaaaaagtgcaaggtttgaagcctgctggcatcactgcagtgaagacttactgaattttctttctttctttctttctttctttctttctttctttctttctttctttctttctttttaaacaaaggtccttatctggattcttttttttttttttaatgatcgccaaccacagctgcagtcctcaacctatggtacatatcaagcaattcaacttttcttgtaatatcatgaatttctctgcttcatgggagcacttgaggcatcactagcgacactttgtatgggtcctatggtattatttagagtttctgatatgcaccaaacatgacaaacaatgcatgagaactgtgagatcagtgtttactgtgatacacaatttactggagggatgaactgtacacatggagatgatcagcctcacacggcgtactgagtggatacttgcaacacttgaactccctgcaatagcaacagggggtggctatgaaattatcacaatagtacagtaggcacagttaactctatgcagttatgacttaatgctgcaaacttacctttgttacttttctcttgactacaaatggtgtcatgtatagtctgtaagtgtttgtgtgcataagttttgataaattttaactatttaaaatagatttgtgtctataatatggtagtaaatgataaaatagactcgttgctatatatattttaggcattcctgacatactcaagtttttcttaattttttcactattgtaggctatgtggcttatctgcaagtttttcaatttgttgcaaatctccataacattttctaatatatttattgcaacaaatctgcccataaatggaccaacaccgttgaaactcttaatgttcatgagtaaccatttatataaatgaaattaacttttacttattgtatcctgcaaccatgctaaacttacttatttgttcttggaggttgttgtagagtttgttggaatttccccatagatgatcatgttgactgtgaatgagatccttttacttttcagatctggatattttaaatttctttttcttgtttgactgcattgaatagaacaatgttgaatggaagtagtaattagcccccattcttggcatgtgtctgatctgaggagtggagcattcagtctttcaccattaaggatgatgttagctgtgggtttttccaagatgcccttcattagctttggaaacttctcttcttttcctagtttgctgagagtttttttttttttttgtcagatatgaattttggactctgtcaaacactttttctgtaactattaagattgctacatggttatacagttttagtttatttatatggtatgttacttagatttatttttaaagcttatttattttatcattaattatggtgaaatacacatagcataaaccttgtcatcttcaccactttaggtgcacagttcagtatccagtgtattcacattgctgtgcaaccaacaccaccattcatctgcagaactctcttcatcttcccaaactgaagcttgggacccattaaacaataattgcccattcccctctcctccaagccctggtgtaaccacccgggggattcaccttgcctgctgcctagacagagtcaatataacaagacaggggaattgcaatagagaaagagtaattaatgcagaactagccgtgtggtagaccggagttttattattactcaaatcagtctccccaagcaatttggggaacagtttttaaggaatacttggtgggttgggggaatccagtaatccaggagtgctgattggtcagggatgaaatcttaggcagttgaagctgtcttcttgcactgaatcagttcctgggtgggggccacaagagcagatgagccagtttattgatctgggtggtgccagctgatccatcaaggacagggtctgcaaaatgtctcaagcactgatcttaggagtggtttagggagggtcagaatctcgtaacctccatctgcatgaatcctaaaccataatttctaatcttgtggctaatgctagtcctacaaagggaatctagtcccctggcaagaaggaggtctgctttgagaaagggctgttattgtctttgttttaaacaactataaaataagtttctcccaaagttggttcagtctatgtccaggaatgaacaaggacagcttggaggttagaagcaagatggagtcagttaagttagatctttttcactgtctcaggcataattttgcaaaggcggtttcatttgcaaccaccattcctctttttgattctatgaatttctctattttagatacctcatacaagtagaatgatataacttccaactttaagtcatttctttgtccttgcatctaagtgtaggtagttacaagcagccaggccacatctggaatactttactgcttagaaatttcttctgccagataccctaggtcatcactctcaagtttaaagttccacagattcctagagcatggactcaatgcagccaagttctttgttaaggcatagcaagggtgacctttgctcaagttccaaataacttcctcattttcacatgagacctcattagcctggccctcactgctgatttttctatcagtattttggtcacaagcatttaaccagtctctaagaaggtccaagctttccttcatcttcctgtcttcttctgagccctccaaactcttcaaacgtctgcctgctaccaagttccaaagttgcttccaaattttcagtatctttatagcaacatctcagtaccaattttctattagtactattttctgttggtaccaattttctacccttcattacgttgccataaaggaatgcctgagactgggtaatttataaataaaagaggtttaattggctcaagattttgcaggctgtacaagcatggcgctgccatctgttcatattctggggaagcctcagggagtgtttactcatggtagaagatgaagcaggagcatgtcacatgacaaaagcaggatcaagagagagttggtgggggaggtccacacacttgaccatatcttgtgaatactcactgactattgcaaggacaacacaaagccatgagggatccacccccatgatccaaacacctcccaccaggccccacctccaacattgggtatcatatttcaacatgagatttgggtggggacaaatatccaagctataacactgaactgtgatttgacattttcatttgtctcatttggaatttttttccagtttcatgaatccttttgtgccacttcatggacctctcagttaacaaattttataattgtagatcatatccaagttgcatttaaagatactctttttgggaaaataccaaaaaccacagtgagaaatgaaacttcccttttttgccaattctatagaaaatgctcttagtagttttgtgtgcatcattttcattttttgaaattattttatgcatatgcagatatctaatgcatattctcacacctattttgttaaaatgtagtaccaggctggacatattgttctttactttgcatttttcatttgccaataaattatagacatctttagaggccaatacagactgatttgacaagttctttcagtaatgacatgaaagtctttactttggatttaatgtagttttttcaaccaattaatattgatatagatttaggcattttccaaatttgtctttttgcacattagtatgtaaacactctttaatactttctttacattactatatttccatattcgtagcctctgatgaattcttcatcatgtgcatccccagcagctttacttctctcattgaaccctgactgctatagaatggaagtagtggctgtggcaaagtagtgccttgtacactttttgacttgaaatacaggaggcagaagcaataggaatgagggtagaggctagaccatagctctactggagtttctgcaggaaaggcaaggtagggcaggagaaacagtttagcattggttggtttgaataatttcagtgggctctgaggtctaagggcaggccctttgctatctgtaataattggctgacccagggaggtgcactgcatccctaccagatagggatttttaagatgcaaaaatataataatatacagaaaatttaaaaatacacacaatacaggaagtattttattcttatggataaatacccaacagtggagtagttgtgatctatggtaggtgtatggttacctttttaagaatttgccagacaatatttacaagcggccagaccaaggtgccctcccaccacctgcatatgagaggtccagctgttcatactcaccaacactggatgtcttagtccgtttgcattgcgataaaggaatacctgaggttggttaatttataaagaaaacatgtttatttggctggtggttcattcaggcgatacaagaagcatggcaccagcatccgcatctggcgagagactcaggctacttccactcatggcagaaggtgagggtggagggtgctgatcacatggctagagagaagcaagagaaaaaggaggcaggtgccaggcttttttttaataatcagttcttgctgaaactaatagatgggaagttcactcattactgggagggggcactaggtcattcatcagggatccactcaaacacctcctgctaagccccactttcaacattagagatcaaatttcaacacttgatttgggagggacagataattcagctatatcatttgatatgctcaatctttttcattgcagctattttaacgggatgtggattaaacctcagttttagtttgattaccctaatcattagttatcttgaacgtctttacatgtgcctgtttgccatctgtgtaccttcttgggttattctctgttcaaatctttgctcattaaaaaacattttttaaaattgaattttaaagattatttatattctggatatttatcctttaccagtctgtagatgttttttttaaagtaaactctttttgtttgtttgtttttatttttttatttttattttttattattgtactttaagttttagagtacatgtgcacaatgtgcaggttagttacatatgtatacatgtgccatgttggtgtgctgcacccattaactcgtcatttaaccttaggtatctctcctaatgctatccctcccccctcccccaatcccacaacaggccctggtgtgtgatgttcaccttcctgtgtccatgtgttctcattgttcaattcctacctatgagtgagaacatgcggtgtttggtttcttgtccttgtggtagtttgctgagaatgatggtttccagcttcatcaatgtccctacaatggacatgaactcatcattttttatggctgcatagtattccatggtgtgtatgtgccacattttcttaatccagtctatcattgttggacatttgggttggttccaagtctttgctattgtgaatagtgctgcaataaacatacgtgtgcatgtgtctttatagcagcatgttttacaatcctttgggtatatacccagtaatgggatggctgggtcaaatagtatttctagttctagatccctgaggaatagccacactgacttccacaatggttgaactagtttacagtcccacaaaaacaagaaatggggaaaggattccctatttaataaatggtgctgggaaaactggctagccatttgtagaaagctgaaactggatcccttccttacaccttatacaaaaattaattcaagatggattaaagacttaaatgttagaccttaaaccataaaaaccctagaagaaaacctaggcattaccattcaggacataggcatgggcaaggacttcatgtctaaaacaccaaaagcagtggcaacaaaagccaaaattgacaaatgggatctcattaaactaaagagcttctgcacagcaaaagaaactaccatcagagtgaacaggcaacttacagaatgggagaaaattttggaatctactcatctgacaaagggctaatatccagaatctacaatgaactcagacaaatttacaagaaaaaatcaaacagccccatcaaaaagtgggtgaaggatatgaacagacccttctcaaaagaagacatttatgcagccaaaagacacatgaaaaaatgctcatcatcactggccatctgagaaatgcaaatcaaaaccacaatgagataccatctcacacaagttagaatggcaatcattaaaaagtcaggaaacaacaggtgctgtagaggatgtggagaaataggaacacttttacactgttggtgggactgtaaactttttattttacaataaatttagatttaaagcaagggtgcaaaaaattgcactaagaattcccatatatcttttgccagtttcccctattgctaaatgttagtttactgtgcacatttttttttattatactttaagttctagggtacatgtgcacaacatgcaggtttgttacatatgtatacatgtgccgtgttggtttgctgcacccattaactcgtcatttacattaggtatttttcctaatgctatccctcccccatacccccacctctcgacaggccccggtgtgcgatattccccgccctgtgtccaagtgttctcattgtttaaatcccacctatgagtgagaacatgcaatgtttggttttccgtccttgcgatagtttgctcagaatgatggtttccagcttcatccatgtcgctacaaaggacatgaactcatccttttttatggctgcatagtattccatggtgtatatgtgccacattttcttaatccagtctaccactgatggacatttgggttgcttccaagtctttgcttttgtgaatagtgccccaataaacatacgtgtgcatgtgtctttatagtaccatgatttataatcctttggatacatacccagtaatgggatggctgggtcaaatggtatttctagttctagatccttgaggaattgccacactgtcttccacaatggttgaactagtttacactcccaccaacagggtaaaagcgttcctatttctccacatcttctctagcacctatgtacatttatcacaactcattaatcaacactgacacattatgttgaaccaaagtctatgttttctttagatgtcattaatttttacctaatgtccttgttcttttctgggatcccatccaggataccgcatgacatttactcatcacatttgtttcatctcctctagcctgtgacagtttttcagagtttccttggttttgattactttgtcagttttgagcaattctggtgaggtattctgtagaatgttcctcagtttgagtttgtctgatgttttgattatggtaacacaggggttataggtttttaggaggaagaccacaaggtaatgtgttttcccgctttcttgcgaatggatacccaactgttgaagagtcatcttttccccacagaattgcctgtgcacctttgaaaaaacttggttgctcatacttctatttctgggtattctattctgttccaatgatctttttgtgaaatatttgattactatagatttgtaataagtcttgaaattaggtaataattgctctccatttttttttctattttttaaaagttatttttgctattgtaggtcttttacatttccctatgaattttagaatcagtttgccaatttgtacaaaaagatagcctgctggaatttagattggggttgtattaaatttatagatcaactaaggaaaaataacattttaacaattttgagttttctgattcatgaacatatctatttattcaggtctctcaccaatgttttgttgttttcagtgtacaatctttcacatcttttgtcagatttatctgttagtattttttatttttgatgctatttaggtgctgttttcattccaattttcaattgttcattgctagtacatttgacccttgaagaatgtgaggattgaggtaccaacccccgagcagtaaaaaattagcatagaaaggttttgtgggtttctttttgttttttatttttgagacagagtcgtgctgttttgcccgggctggagtataatggcgtgatctcagctcaatgcaacctccgcttcccgggttcaagtgattctcctgcctcagcctccagagtagctgggattacaggcatgcaccaccacctgcagctaattttttgcatttttagtagagatagggtttcaccatgttggccaggctggtctccaactcctggcctcccgtgatacgcccaccttgacctcccaaagtgctgggactacaggtgtgagccaccacgcccagcacacatagaatttttgactccctaaaaatttaactattaatagcctactgtgcactagaagccttaccaataacagaaacagttgcttaacacatatttggcatgttatatgtgttatatactgtattatcataatgaagtcagctagagaaaagaaaatgttattaagaaaatcttaaggaagagaaaattaagtattcattaagtggaagtggatcatgataaaggtcttcctcttgattgtcctccattgagtaggctgagaaggaggaagaggtgggttggttttgctgtttcaggggtggcagagggggaagaagtggaggaagaaggaggagagacaggtacacttggtgtaactttacagaattacatcataattattatttgacttttttgcctttgcaattctttgaaaatgcttttttacagtactagtccttcttccccatttgctttagtttcagtgcccattcatggaagggtttgtgttgtaaaataagtcaaaagtagtcttaataattggaagcctttgccaaactgtttaataggaatttgttttctggcatggcttcttctatgtcttctttagtatctggtactgattcaaaagcactcatctccatcaagtcatcttctgttgattcctctggtgtggtgtctattcattcttgaatttctcacagattcatatcttgaaagaccatatcccccaccttttgttgctgaattagagatgttgggtttgcaggcaagtagaccactttgacaccttcagtgttgaactcatgggttctgggtggctaggggcattgtccaaaaatcaaaagaactttgaaagaccgtctcttactggcaagatattacctgacttcagggacaaagtaatgatagaaccaatccagaaaaagtgttcttgccgaggccttcttgtacaacaaaaaaactggcagtgggtattgatcttttccctttaaggcttggaggctagcaggcttatggatgggggcagtcctatttgtaaacccaaacatacaaacatacaaactatgtcaaaggcatagcatgggtactgtgaaaggagggtgaaaacacaaagttgacatcacctctgacctcaaggagtgctcagcagactgagagagacaagtacatattttcctgaaggagggcactggagtgatggcgtgtttagaatgtgcaagttgagcggtcactgagaggcagctcagcagagtgctctcgcaaggattgggcgggcaacttcccactgcgtgcgatgtatcttaggaaagccatttaaaataggagacggttactttccatcaagtccctggtatggtccatggaagcagggttgtcagtctcatttcagcattttagaggcttctcagggtttggaaatggaagaagagaagcagcaatatgtatgcattgcagagacacaggcgagccccaatttaggaggttaggaggtcagtgctaagggccttgttttctttgcttagagcatgagttgccatcttctctggacagagagtatttggttgcctaaaggtaaaatctaaattttgctctgggacaaattccaaaaaaaattagctttaatcaaatttacttttactttatctttctgaaccttcaaggtccaaaagcattggttaataattctgcttctaaacttaacattgcagcacagggcatgttctgcccccaaggcaaagaccataagctactgttgtctggaaaacatacaaatagatatctcagcaaaagctactcatatattcttgttcttttgggtaaatcattgtcagtgactgattttttttttatgaaaggataaaaacacgccctctattggggtcaggttttgtgctggtatttctcccacctactgtatcataggagcttagattcccagctgcttgctctcagctgcagttctctgatggcttgcacagggtggaccagcccccttcctctatgtgtgtgtctgctgctgacctgtggctttgccgaggcagggaagctactggtagtgcccatggatgggagccactggttcaccatgaggtcggtggtggagaaactcattctcagggggcatgaggtggttgtagtcatgccagaggtgagttggcaactgggaagatcactgaattgcacagtgaagacttattcaacttcatataccctggaggatctggaccgggagttcaaggcttttgcccatgctcaatggaaagcacaagtacgaagtatatattctctattaatgggttcatacaatgacatttttgacttatttttttcaaattgcaggagtttgtttaaagacaaaaaattagtagaatacttaaaggagagttcttttgatgcagtgtttctcgatccttttgataactgtggcttaattgttgccaaatatttctccctcccctccgtggtcttcgccaggggaatactttgccactatcttgaagaaggtgcacagtgccctgctcctctttcctatgtccccagaattctcttagggttctcagatgccatgactttcaaggagagagtacggaaccacatcatgcacttggaggaacatttattatgccaccgttttttcaaaaatgccctagaaatagcctctgaaattctccaaacacctgttacggagtatgatctctacagccacacatcaatttggttgttgcgaacggactttgttttggactatcccaaacccgtgatgcccaacatgatcttcattggtggtatcaactgccatcagggaaagccgttgcctatggtaagttatctctcctttagcaccttaagaatacttcacctttggaaattaaaaaaggattctttactgaactgtgatttgacattttcatttgtttcatttcaaatttctttccagtttaacaaattattttgtgccaatgcgtgtactcgtcagtagcaaattttataaaactgcccttcttgaagatatgtatttataacttataaaattgtggaacatattcagcctacatttttaagtaccatgtttagaaaagtaccaaaaaccacagtaagaaatgaaacttcccttttttgttaattctatatgcccgccccagaggaaatggtcttagttttgtgaacattcttttaatgtttttaaaaaagtactttaggtatatacaatatctaatgtaaattctcacacctattttgttaaaataaaatctagtattgggctggacatattcttcttttctttgcatttttcacttgccaataaattataaatacctttatagaccaatacagacagatttgacaagttctattaataattgcataaaatactttactttggatgcaatgtagtttttaaccaattaatattgatatagatttaggcattttgcattttttgtctttatgaatagggccgtgtaaacactctttaatactttccttacatgaatatatttccatattcttgcttttatcttagttgactagagccctacatgtagggttacaggatttccatgaattgagaaggattggcatttttttgctattgtgtcttcctgttcaggaatatgtatgtctcactatttattcagatcttgttttatatacataaataaaatttttcactatataagcattttctgtttcttattaacatttattcctcagcatttcattatttttgaaactattgggtacaggacaatttttccatttctacatgtaactgactatgggtaattaaggttttgttttttgcatatgtatcttgtatccagccacattactaacttatcttattattttgtagtatacagtagatgtacaatatacaatgtcaactgcaaagaattcccttctctgatatttataccacttattttgctttgctggagcttatacttccaaagcactattgagtaatattgtgagagtagccagtttaaattttaaatagggattcaatcacttgtgattgaaaagtccatgacaaataccagaataacattcttagcaaatgtgtagttggctgaatccagattaaacacctaatgtctaatctcagtatattattttggagggatggagtatacaatttatctattgttctggctccttacaaggttcagtagacttggtaacacagtcatattctctcacatattggcagatgtttggtgaaagagtgactgttcagccaactcatgggaaagtgaaataatgctctttctaaaaagcaggaggactacagttgtaggcctttcaaaattaggcatgactttcggatcttcacaagactaggctaggagatgcaaatggcagaaatctaagaggttagacttgtctaagcacttttctcccctttaccctccataaattatagtatcctccattaattgtagtaacaggcaccacttatgtgttgcctgcaccccacaacctttggctgagggtaaggccctgccacttcctgaacccacactgaatttattgtgcctcacagcgtcacccagaggcctttagagatataaaaacctatatatgattttatatcacctatgatagagggttatctataaaatatgaaacatcaaactatatatggtttcatttattttgattataaatatcttttatgagatatgaaataaatgtgtttatgtgtctattaaagaatatggatgtatgaaagtttttatacttgtggaagattacatatattaatgtatgtatttatgactatacgtgtaaagccagcggagttctcacagaggaattcagaactcaaagaaggctttccggcaaagagccttggatatggcccaaccacagaagtaaattgtcattgacagaaggatggacacttcatattgctccttccttgtttcagatgccaggatgtgtctgggaaaagcatgcagttggttacatcttgctgggaaacaggattcagagtctgtgtcttatctgtctgatgagaaggaagcattacttgatgatggagtatgtgtttgcacatgtatgtgtttgtgtatgtgcaggtgtgtttgtgtgcagtgtcccagaccctgcataggggattttcttgaaggtctcctgtaacaaaatctccttgaggctatccaggggaattacatccagggatgtaattaaatactttaacaaggatggcagatggccccgtcttcaatgtcagggatcaaatttcaacgtgagatttggaggggacaaacttctaaactatatcattccgtgtggtcattcttttacattccagcgttctaatgtgtgtgtgttgattaatgatgtgtaaataattcagcagaacattgaaatagttttaatggcaaaaagaggaggtccctagtctttttgaatttttgatgagttccaacagaattaatgactggttttaggtgaaaagaattcaggctttgtctataccatccatggcaggtgcggctctgggggtgggatatggttacagataaataagagatctgtgcttccccccttgctgtaagattctggctatagtccaagatccaaattcaaagttagcttttggtggacaagactaaggcctcccactaaaattatttacttcaagtttttattttcaaagttttcaaacatacacaatggagagactcagtgtaatgagcacccacttatccattcttaggttaaataattttcactattttgctctactaattcatctatccctttattctatctttttaaagaaaacttttaaaaataaatttgtatgtttttaaaaagaaattcttggcatgtcattccatcactgaacaattcatttaatataaaaaataagaaaaatttgttacatagccacaatatcattatcatatctaagacaataaaaattctttaatattatctcatttacagtccataataaaatttccccggattgtctcacacaacatctttccatacagatcaatggaatagaatggagaattcagaaataaacccatacatatacatccttggccaattgactaggtgccaaagtttgacaagtgtgtcaagatcattcaaatgggaaagaatagtcttttcaacagaagacccaccctggggtccttgagctccagcgtcagactccaaaaccatttgtggaaatcatccagccacctcccaccatgcctctgatgaatccttcaccgatggattcatcagaagcatggttgatgatgaattcactgatgaatcacccctgtgtgcatccacaggggtcctgcaaatattttctcacagtctgttgagtgacttttcttacaaatacttcattgtagaataaatataggattatagcaaggttacaacaaatagtttagagaattttcatctaccctgtgtccagtttccaccattgttaaatctcatgtttctatggcacatccatcacaactcattcaccaatattgacgcataatgatgagctaaaagctaaagtctgtttccttcagatttcattaatttttacttaatttccctgttcttttatgggatcccagtgataccacctgaaatgtagtcatcatgtctcctttgtctcctccagcctgtgacggtttctcagactctccttgtttttagtgacttgggcagtttcgagcagtcctagtcaggtgtcctgtagaatgttcctctagaatgtcagtgtgtgttttgcctgatgttttcatcgtggtaaaactgggtttatagacttttggtaggaagacacagaggtcttttcttgttttcttgcgtgtgaatattcaactgtagaaaaacagaaccttttctccactgcattgcctttgtacctttgtaaaaacttggttgttcatacatctgtgcacgtatttctagactttgtattctgttctgttgatctatttgtgaaatatttgattactatagctgtgtaataatctataaatgaggtagtgttacctctaattttttttttcaaattgcttttgctattggaggtcttttgcattaccatatgcattttaaaataagttcattaatgtgtgcaaaaatcctgctaggattttgattgggattgtattttatttatagatcaactggggagaaacaacatcttagcaattttgagttttccaattcattaacatatctttttatttaggtccgtcatcagtgctctgtagttttcaatgtacagtctttcacatcctttgtcagatatatccctaagtatatcatgtttttgatgctatttaagtggtatttttaatccagttttcaagtgttcattgctagtatagttgacccctgaacaatgtgggaatgaaggggaccaacccgtgtgtagtagaaaatccgcatagaacttttgattctccaaaaacttaactactaatagccaactgtttaccaaaagccttgccaataccataaacagtcaattaacacatagtttgtatgttattagtattatatcctgtattatgacaatgcagctagctagagaaaagaaaatgttattaaaaaacgtaacatatgaaaaaatgctcaacatcactagttaccagaaaaatgaagatgaaaaccacaataagatatcatctcacaccagttagaatggctgttattaaaaagtcaagaaataatagatgctggtgaggctgctgagaaaagggaacacttgtaccctcttggtgggaatgcaaattagttcatcccctgtgggaagtagtttggagattttgcaaagaacttaaaacagaactgtcattcgacccagcaatcccattactagatatatgtaaaaaaaatcgttttaccaagaaacacatgcactggtatgttcattgcagctctattcagaatagaaaagacatgaaatcaacctaggtgcccgtcaacagtggcttagatgaagaaaatgtggaacacatactccatggaatatgcagccataaaaaaagaatgaaatcatgtcctttgtaacaacatggatgcagctggaggtcattaccctaagggaatatatacaggcacagaacaccaaataccattgttttcacttagaaatgggagctaaatagtgggtacttttgggcataaagatggcaacaatagacactatggactcctaaaagggagaggaaaggctgcaagagttgaaaaactattgggtactatgctcagtacttgggtgatgggagcaatcatgccccaaacatcagcatcacacaatatactcaggtaacctgcacatgtactcctgaatctaaaataaaagttgagtatgtataagaggaagtcattcatcataaaggtctccatcctcatcatcttccattgagtgggctgtggaggaggaggagtagatgttgattttgctgtctcagggtggcagaggcagaagaggtagaggaggtggaagtggaggcaggagaggcaggtgcacttggtgtaaccttatggaaatacatcataattactgtctgtttttttctctttgatgtatttaaaaatgcttttatacagtactaatccttcttccccatttgctttagtttcagtgcccataagggttcatgtcttaatagaagtcaatagcagtcttaaataattggaagcatttctatgaggcttgtattgtgtaaggccaattttttttctggcactgcttcttctacatcttctttctcatcaagtactgattggaaagcactcatctctatcaggtcatctattgattccctgagtgtggcatctattggctcttgaatttctccaagagtcatattttgaaataccttatccccaacattttgttgctgtatccataatcccttcatgacttccttgattggctctgtcataaatcctgtgaagtcatgtgcaacatctggtcacagttttctccagaagaaatgtactgtttggggcttggtggctttcaaagctctttctataataacagtggcatcttcagtggtgtaatccttctggactttcatgacattctctatccagattctcttccatagtattgacaaccttttccatagaaaactgtgtgtaatgagttctaaatttccttaagacacctgattgagagactgaattagagatgttgggtttggaagcacgtagaccattttgacaccttcagtgttgaacttgtgggttctgggtggctagggaatggtccaatatcgaaagaactttaaaagacagtcccttgctggcaatgcattttctgccttcacggacaaagccttgatggaaccaatccagaaaacgcgttcttattgttgagtccttctttttgtacaacaataaaactgtcagtgagtgttgatcttttcctttcaaggcttgaggtttggcagttctactgatgagggcagtcctgactgtaaacttgactgcatttacacaaaacagtagagttagcctatcccttcctgccttacattctggtgcttggttttcttccttgccaataaatgtcttttgtgtcatctttttttttgtttgtttgtttttgttttttccagaatagggcactgtcatctgtattaaaaccctgttcaggcagatatcctttgtcctcaatgcttttcttcatggcatctgggaactcatctgcctccttttgcttggcagaggctggttctcctgttatctggacaattttaaagccaaacctctttgtaaaactagcaaaccatcctttgttgccattaaattctccagttttagattcttcacctctcttttgctttaagttgtcataaaatgactttaatttttctcaaatcacattggcatctataaataagcctttcttatagcaatcctacacccacattaaagttgcattttcaatatgagacaaaaatgtatttcacaaaaagatgcgaggtttggctcctgctggcatagctgcagcaatgtcttcatgaatcttttcttctcttttctttctttctctctctctcttttttctttttctctttctttcttttgcaatggtccttatctatcttcattgattttgaaatggcaggcaatcatagcggcagagctcaatctacggtacctatcaagtaattcaagtttttttggtaatgtcatgatttttctttgcttcttgggagtacttgcagcatcattagttgcactttatagtcccatggtggtattcaaggtttaaaaaattacactaaacatgatgaaaaatacagtagaaccataagagatcattttttactctgacatgcaatttactagagagaagaaacgcgcagagggtataaacgtcatatcacatgcatttaggccacactttagctccctgcaatagcaacaggaggtagcaacaaaattattatagtagtgtagtatgtactagaggaaagtgactaagcaaatgtctagtaccagttagggtgtcctggaaggaaccatcttgtgcttctacaagaattatgccctgaggttggctgttgaatccctcacgaaatgctcctcagtgtgttgcctaacacacactgctgagctcacccattaaaatctgcatgatggaattcagcccaatgcaatgagaattcccatggacttcctctgtgcaaggcaaagcatgggtgctgtggaaggaggatgaaaacaggtagaagatgtaatctcatcctcaaggggtgctcggtagaatggaggaaacaatacatagattcctgaagatgagcaccaaagtgattggggtgggcccatagcaaaggcctgcagctctgttcagaatgcagaagcagagtgggcagagagagacagctcattagagtgcttgggcaagcatagggacggcgactcaccactgcagacaatgtatctgaggaaagccatttaaaataggtgacagtcacattccatcaaatttctggaagggtccatggaggcagggttgtcaatctcattacagcatttcagaggcctcagaagatttggaaatgaaaaaagacaagcagcacttgtggctcacctgtgtcacaattgtggctcacctgtgtctctgcaatgcgcaagtgagctgtgtattgcagagacacaggtgagccgcaatttcctcccagttaggaggtcaacgctaagacccttgctctctttccgtcgaacatgagatgccaatttctttctgggcagaggacaaaataaaaattgtctataaactttggccaggtgtagtggctcacgcctgtaatcccagcattttgggaggccgagatgggcagattgcctgagctcaggagttcgagaccagcctgggcaacatggtgaaaccccgtctccactaaaatacaaaaagttagctgggcatggcagcgtgcgcctgtaatcccagctactgaggctgaggcaggagaatcgtttgaacccaggaagtggaggttgcagtgagcctagatcttaccactgcactccagcctggatgacacagtgagactccatctcaaaaaaaaaaaaaaaaaaaaaaaattgcaaatttttctttgtgacaaattccaaaattattagcttcgttcaaatttactttcctttttatctttcaatgtcgtcaaggccaaaagcattgcttaataattttgtttctaaactcatattgcagcacagggcatgatctgtccccaaggcaaagatgatgagttactcttttcttgaaaacatataagcaggtatctcagcaaaggctactcatgtattattatgagtaaatcattggcagtgaatgtgaatttttttttaaatgaatgaataagtacacgccttcttttgagggcaggttctatctgtacttcttccacttactatattataggagcttagaatcccagctgctggctctgggctgaagttctctgatggctcgtgcagggtggactggcctccttcccctatatgtgtgtctactgctgacctgtggctttgccaaggcagggaagctgctggtagtgcccatggatgggagccactggttcaccatgcagtcggtggtggagaaactcatcctcagggggcatgaggtggtcgtagtcatgccagaggtgagttggcaactgggaagatcactgaattgcacagtgaagacttactcaacctcatacactctggaggatcaggaccgggagttcatggtttttgccgatgctcgctggacggcaccattgcgaagtgcattttctctattaacaagttcatccaatggtatttttgacttatttttttcaaattgcaggagtttgtttaatgaccgaaaattagtagaatacttaaaggagagttgttttgatgcagtgtttctcgatccttttgatgcctgtggcttaattgttgccaaatatttctccctcccctctgtggtcttcgccaggggaatattttgccactatcttgaagaaggtgcacagtgccctgctcctctttcctatgtccccagacttctcttagggttctcagacgccatgactttcaaggagagagtatggaaccacatcatgcacttggaggaacatttattttgcccctattttttcaaaaatgtcttagaaatagcctctgaaattctccaaacccctgtcacggcatatgatctctacagccacacatcaatttggttgttgcgaactgactttgttttggagtatcccaaacccgtgatgcccaatatgatcttcattggtggtatcaactgtcatcagggaaagccagtgcctatggtaagttatctcccctttagcacattaagaataatctggctttggaaattaaaagatttcttacagaatcataatttatcatttacatttgtcccatttggaatttctttctggtttaaggaattcttttgtaccaattcacttaattgttgggtagcaaattgtataaagcagctcttgttgatatgtaagtgtatacaattgatataattgtagatcatatctaggctgcaatctaaatgctatttttggaaaaatacaaaaaaaccacagtaagaaatgaaacttccctttttttgctaattctacactacccccagaggaaaatattcttagcagttttgtgtgaattgttttcaatttttttgaaattatactatgtatatgcatatatttagggtaaattgtcacttctattttatcaatataaaatctactatcatgctggctatgtttttttatgttagatttttctcttgtcaataagttaaagatatctttacaggtcaatgcatacagatttgacatgttcttttaataattgcatggtagtctttactttggatgcaatgtagttttccaaccaattaagattgatagagatttaagtgttttccacttttggggtttatgagcaataataagaattcttgtatactttctttacattatatatattttcatatttttgcttttatctcagtagggtatcatcctatgagtatggttgcttggttttcactaaatgagtgagattggccttcttttgctattacatcttcctactcaagaatatgaatccctcattatttattcggattctgttttatttccataaataaaattttgcactttataaaagtatttcatctttcttattaacctttattcctctgcatttcattatttttgaaaccattatgtgcaaggcaattttcccatttctcttttgaattcactatgcataattaatgtactgctttgagttttacacatttatcttgtatgtagtcatattactaaactctcgtattagtatgtaaggtgtattaagtatgcaatatcatctgcaaattattccctcccctggtatttatacctcttattttggcggagcatatagttccaaaatattattaatattgttggtctagccagcttaaattaggatttggtcacttgcaattgaaaaagtcgtgacaaatacaagagtaagattcttggcaaatgcatagttgctaaatccaggtgaaacacctggtgtctgatctaagtatattattttgttagggatggagtatacatttttatctattgttctggcttcttacaaagttcagtagactttgtaacacagtcacattctctctcatattggcagatgtttggtgaaagagtgactgttcaaccaactcatgggaaaatgcaaccaagcgctttctaaaaatcagggagactacagttgtaggcctttcaaatgaaacatgactttcagctcttggcaagaccaggcgaggagatgcaagttgtaggacgctaagaggatagacttgtcaaagtgtctctcccctgtttaccctccatcaattacagcaccagccatcactcaggtattgcctgcagcctcaccctctagccaagtgtgtggcctgccactttctgaacccatgctgagtttgttgtggctcaaagggtcacccaaagggatttagagatgtagaaattatatatgattctataccacctataatggtatatgatagagagatctataaaatatgaaacattgagccatatatagttttacatattttggttatttgtatatcttcagtggtgtataaaatatatgcatttatatgcctttaaggaatatacatatgataggatttatagatgtggaaggttatgtattaatgtatatatttataaatagaaaataaatataattatcaaagaagaattcagatcataaagagtgccctttggcaaagagccctggatatggctcaaccacaaaagtaaattgtcatagaaaaatttatggacactgtatagtgttcctttcttgtttcatatgggcagggtgtgtcttggaaaagtatacagttttttgtaccttgttagacaacaggattcatagtctgcatttcatctgtctgatgaaaagaaagcattgcttgatgatgcagtgtgtgtgtatgtggtgtttgtgcacgtatgtgtctgtatgtgcaggtgtgtttgtgtgcaatgtcttaagctctgcacaggagattttttttctgaaaggtttcctataacaaaatcttattgagtctatccaggtgaattacatccagggatgtaattaaatactttaacaaggatggtagatcatcattcaggagaacattaaaacggttttgttttgtatttttaatagagacggggtttcaccatgttggccaggctggtctctgactcctgacctcaagtgatccgcccgcctccgcctttcaaagtgttgagattacaggtgtgaaccaccacacccggacttaaagtggttttaatgagaaaaaaagaaaatcacttccacttttcttgacttgttggtgaattacagcagaattgatggttgaatccagttataaagaattcgagctgaatctacaccatctagggccagtgcagctctggagaactgggactgggatgtggttacagcaagaaaagatctatgctttccccattgctctcgcattctgtttttgatccaaattcaaatttacctgttactgggcaagcccaaggcctccctccaagattatttatttcaactttttatcatcaaagttttcgaacatataccaaggagaggctatggcataatgtgtacccatatagccattcttaagttaaataattttcaatatcttgctgtactgcttcgtctttctccattttttcttccattttaaagaaaaattttgactttttgttttaaagaaaatcttggcatgttgtctcatcacgaaatacttcactaaatataaaaaataaggaaaatttgtttcatagacacaatacctaagacaatcaataattctttaatattatctcattttcaatccatcattaaatttatcctgattgtctcaaaaaagtcttttatatgtagatcaatggaatagaatttaaagtccagaaataatcctgtacatcctttgccttgattttcatcatggtgccaagagcattgaaatggcaaagaatagtgtcttcagcagagggttctgggacaactgcatatccaagtccaagagaatgaagttgcacccttaccttgtatcatatataaaaattaacttgaaatggatcaaagacctaaatagaaaatctaaaactgtaaaactcttagaagaaaaaattagaaaaatatttgtgaccttggatttggaaatggtttctgagatttttttttttcttgtaccaaaagtacaagaaactaaaacaagaaaaacaagagataaatctgactttatcaaaatgtttttatacaaaagcttttgtatatcaaaggatactatcaagagaatgaaaagacaactcgtgtgggcgcccttattaaggtgtgcagataaacacacgcatgcttgacatggaggctctcccatgaaacatcctattttttcctttcctatgaaactttctgaacaggtgagcccaggtggagcctccacctgcgttagaacctaacctttccgtggctttctgaaatccctggtttcagaagttagtgtggattactgctgctttctttgactgtctctctctctccttcaatctatcttgataatgtgatatcaaacatgatacactacctctttggcccactcaggatattctggtggtgccctctggcctgcaccctcccaccggctatgaaggtcaacctcttgccttccctagcctcactggctttattttatgcaacactccaactctcctctttccacctcccctgttacttttccctacctattttattcctcttttctatctccttccccacctatgtctttcctttctgtcactttttctgcatgattcctgccccagaggggtcaacaagaaagggcatcccactggctgactcatgcagggaagctgtcagtaattaattagcaaggcagggaagttgtaccccaagtcttggtttcaacactagaggactttaggaggtggttcaatgtagtgtttgagcacgcggaccctggagtcctccaagcctgatttcataagtacttcagctgtgacacttgcgtaaacttgggtaaaaactcagcgttatctagattaaatatgataatacatgcagatgactggcatgtggatatgaatcagcaatacccgtaattgggtgggtgatatgcattttccagcacaattatctccaacctccacaagattaatgatcttaaccatgcattcagactctcttcagaacaacatggtgagatatcaatgttgtcttcttgatgcaagtttcccttgaatgatttaaacttcagatgggtggactgtctccttagggagaatttgcaaattaaatataataaaagctaacatatattggaggcttaccgtgtaccaggtgctaccctaagtatttacatggaagctggcattattggcagacctatttttcagatgatgaaactgaggcacagaggggttgagtgacttgcccaaggttatgcctcaagtaagtgggggagccagaattcaagaccatacattctttgtaaaaaaaaaaaaaaaaaaaaaaaaggaaagaaaaaaaggctgagtgtggtggctcacacatgtaatcacagcactttaggaggccaaggcaggaagatcacttaagcccaggagtttgagaccagcctggacaacatagggagacactgtctctacaaaaaatgttttaaaaattagctgggcctggtggcatatgcctgtggtcccagctactcaggaggctgaggtgggaggatctcctgtaaacccaggaggttaaggctgcagtaagccatgactattccactccactccagcctgggtgatagactaagaccttgtctcaaaataaataaatcaataaatacatgaataaataaaatttaaaaattgatatgtaattcatgtatcgtaaaattcagtggttttctgtgtgctcccagatacaatcaaccatcaccaatatctaattccagatcattttcctcactccaaaaagaaaccccatgcccactggcagtcactccttatttctcccccttcttctacccctcagcactaatttactttctgtctgtatggatttgcctattctgggcatttcatggaaatggaagcctttatgaccggcttctttcacttagttttgtggcttatccatgttgtagcatgaatcagtatttcattcctttacatggccgaatattccattgtatggatttaccgcattttttttatccattcatcagttggtggacatttgggttgtttcccattttcagccatgaaaaataatgttgttgtgaacatttgtatacgataaaccctgatgttctaattttcgagcccatgtgcctaacctctatacctgactgcctccctgtgttgacaggaaacttcttgggaaatgtcctatctccatccttttgggaatgtcacatgcagtgaaatgcgcctagagtgggtttgacttacatcacatggtctctaatccctcagcaaacatgagttcatcttgttttggttggtgttacagaataacaccctcagcaaacatgagttcgtcttgtttttgttggtgttacagaataacatgcagctggctcttttttaaaaaatttaatattaaacgtccttcattgaacaaatatctgttgagagtctttgagtgactgggatatggccataatcaaatgaacatggctttgccattctaatggagaggaaggcattgattagctacaaactgtgaaacatactttgaaagaaaaggatgtaaagagagctgatcatagggggccttgcaggataaggagtggcaatcttgggagaagttggggggatggtgtgccaagcagggaagatggcaggtgcagcatgaagccaaatgtttggaatcatagcatgttctttcccttcatccctatgtcccagggtctctttacttcataaacatggccaagtggaaatcctactttatgtctcttctgtataatccctttgtcatggcttaacttagtggcctgtgcccctccccactgctcctggaaccacaacccacattgttacaagcccctgaaggaagttataaacaccttatcttctactaggacaggtgcccctggaactgtctggctgggcaagccatacttacctgcacttccctattccatctgtgagtgattcagacttgactattgttatcatactaaactaaactggggttcactcacccagcacagtaagaccaaacatctacactgagatttgcaatgggagaaaggaaggcatttatgtgcagggcacaaagcaaggagtgttaggaggcttatacttgagacccaatctctctaatggcttgcaagtaaaggtttttaagagcaaggatacattttaggaaaacagaagttacaagaagaaatcgcaaatcaatacgcagaggttacacattggtttggtcatgagaagtgagggcttgcaggtcataggtgaattcagagattttctgatttgcaattagctaaggaagagaagcttggtttaaaattcggggttagcagaaaagaatgtttgctcttgctcatgagtgtgacttcctccaagaacaaagaatggctgtcagagttcagtcgttatttccccttatctgaggtctgcctgccaaagaatccatttggtgggagtccaggtttctgaaaaacaactcggggacatatgttatgatgtgatctgtagtttctataggaaaccaaacatctctggactctaactttcttggatattgttttaggctactattaccttcttgcttatcaagtgccttatttatttctcagggccaggtaggtgcctggaatttccttcgaaagaacccaagattttcctttatttccatgcttggaggaacccacaggcccctaaaagggattctcacttcatctcaccattttggaccttcctcaagatctgggcccagagcattctgacttctgcagccccacctcacagcctatcaaatagattaaattgctcctgcatcttatgtcacatatgtctttgtaacttggtgagctaatctgtagtggattcattgacatgtagttatgtttttatagccatttcataaaatattcataaattcaatgtttgccattttagtattctagattcagcaaatttcttattttaagtctcaaacattttgcaggtcctttgaaatcttgcaggtgggtcctggctccattacttatgggtcgtaggtcatacaagggtctgaaagagttagcaccttagaagcaaacctctccatagggtccacgtttccagaccttcctattcccaacatgaaattaccttcatgcacatctttgggtctctcctctattcaaaatgccagctatcctccatttactttttgggaaatctgctcttgccaacagagatttgttttatcttaggatctacttctttcaccccactggaatatgtcccaagcctgagtcattcagcctgcagcaatccctgagaaaaaaaaaaaatcggcctttgcctggacactcaagtgatacctgaggacaccttgactcctacagcaccaaccagggcaggcctgggtctccagcggagctactctttagggatcgtcattatgacgaacagacatgccagattcctctggctagtgtccagtgcagacatacacacacacacacatacacacacacacacacacacacaccattcttagtacagtcaaagctcacaggagaaagaaaaatgttttctaataccttcttaatttgcaagaaggtgttaggaattcaagggatggtatgcatagtgatgttagtttcatttcttcagctccttcctccaactcatgttctgtagggacttctgggactaagaacaggacccacatatgagcaacaggattttcagagcaaggctgtggttggaagggctcagaccaacgtccacagcagagtggaggtctagtataaagaatgtgaagtttgtagcatctcttgatcccgctattcctacatgcttgcttaagccattcttcctctagatgaactgttctttgaaggaaacctgcctaatgtctgcctgctcaagaaggtggacctgagctctgttccctttgcaaccttcctggagtcttattgctatctagatgaactcaaagcaagatgctgccgcccccatgactttgatcattgtaagctgccaatcctcttgggaggctgctcccagcttggactgagctgagtcttcgcatgccttgaacaatgaatttgcatcctggttatgttccccatgggggccagccctgtccttggagtggcccctctaatcatgttgctcaggcttcttctcccttcctgggccccagaacacctccggtgccaaacttgtgggtgggaacaggaactcgcgtgccagccaggtgtgcatgactagctctgggcaagtctgttctagtaattcaaggtaccacctctcactgggacagcctagtttctacacaggtcttgctctgggaccgccctcagcagtgtggttagcaggcagggccagtgtgaccctccctttctgggcctcagttgagaaacctgaagctcaggagaggagtcactcccctggcagatgggtggctgggccagaagcagataccaggctttctgactcctgctctaggattctcaccacgtactggctagacttatacttctcaaatcttaatttcctaaaggcaagtaacagtttgaatgttgttatattgtgatgtataataagaaatatatgtttgtctttgtttcctggacacagctcctgaaaccataagtggtgggagcgataaacgtgaacaaagaatcttttgttattcaaaacagatccctttcgatcacacctaagtttatgtaaaggagatgtaaagtctctaaggatgagggctagttgccagggaacaaaacccttgcgattagagggaagaaaggagagagagattgaagattgatttgatcaccgatgggcaacaatctaatcaatcatgcctactatgtatggaagcctacataaaaactcagaagggcagggttcagagagctttcaggttgctgaaggtgtggagggtggggcacccagagatggcagatggggctccatggccatacccccatatcttgttctttgtactttttcctctggctattcatccgtattgtttgcaatatcctttgtaataaaccaaacctagtaaataaactgttttcttcagttctgtgagccattctagcaaatgattgactccaagaaagagggtgtgtgaacctctgatttttgccaagtcagacagaagttgtgggtaacctggggacctactacttgcaattggtgtctgaagtgagggcagtcttgtaggactgagcccttaacctgtggggtccgtgctaactcagaattcagttcagaatggaattgaattgtaggatacccagctggtgttagagaataggtccgtgtgcaagaaaaattcccgcacatcatggacataacagacaacgtcaatgatgaggaatccagcaagttcgggatagagaattggcagggggtcctcaggggtctctccaagtcatcttcaaagtgttgctataacttttcagagagggagaagcagacttgtggagctgaagagaaacacccagaagctcaggtgaaagctgacacggccatagttggttcatattaaccatgtgattaaaatggttaaatattaatttgggttcttacatatcaaagggtaaaattcagagcaagggagaggtagacaggacctgtgaaaagcagtggttagtttagggaaaatacctaggagccctgtgatttggagagtgaaaactctttattaccgttgttactttaactctttccaggatggcctgcctccttcgctcatttcagagaatttctgcaggggttttcttcttagcactttggggcatggttgtaggtgacaagctgctggtggtccctcaggacggaagccactggcttagtatgaaggatatagttgaggttctcagtgaccggggtcatgagattgtagtggtggtgcctgaagttaatttgcttttgaaagaatccaaatactacacaagaaaaatctatccagtgccgtatgaccaagaagagctgaagaaccgttaccaatcatttggaaacaatcactttgctgagcgatcattcctaactgctcctcagacagagtacaggaataacatgattgttattggcctgtacttcatcaactgccagagcctcctgcaggacagggacaccctgaacttctttaaggagagcaagtttgatgctcttttcacagacccagccttaccctgtggggtgatcctggctgagtatttgggcctaccatctgtgtacctcttcaggggttttccgtgttccctggagcatacattcagcagaagcccagaccctgtgtcctacattcccaggtgctacacaaagttttcagaccacatgactttttcccaacgagtggccaacttccttgttaatttgttggagccctatctattttattgtctgttttcaaagtatgaagaactcgcatcagctgtcctcaagagagatgtggatataatcaccttatatcagaaggtctctgtttggctgttaagatatgactttgtgcttgaatatcctaggccggtcatgcccaacatggtcttcattggaggtatcaactgtaagaagaggaaagacttgtctcaggttggtgggtttatttcttttggactgccttgtttcttccaggctctgtcctccctcactcatttggctccttgagccgactgtcccttggaggatttcctggagaaacggtggggggaagtgatacccggctcggagcagcgggaacacataggagacctgaggctgaagtgatacagaggcattcggatgaagacagggctcatgcttggcaagagtaggagatttgcttagttggataatctgggacagtcacatactcattgaatgagccttagaaatgtcccagttcaaacagaggtgaaggcttgactaagggaacaggtccaggttaaaatccattttcccaactctgtcccatgctttgtctctggaccttgagccagggaccagcgaactacagcctgtgagcccaatctgcccaaaggcctgttttttgtttttttttttccttttatgttgagacctgtttttatatggcccagagctaagaatggtttttgtagttttaaaacaatttaacaatgaagaatatgtgccacagaagtatttggtctgcaaagcctacacatttactgactggccttttcagcaaaaggggtatggcctctgacctaagacaagtgtttacagatgccctcctgacatgtaggaaaagggcccagagttactttggaaaataaaaatctgtgagttttaaatttcaatgtaaatatttacaactttgaagggcttcaggcaactccctctatcttttatgcctcaattttcttttccagttccttttttatcagagagaaagcctcaaacaggtcccaaagacccttacctctcttctttacacctgctgatttctctgttaacaatttgaacagttggcagtagccactgtgaaaaggcaagggtgaggggatggggataactgaaatggttccagggattctggggcatgaaataaaaacatagaatgtcaggattcttttaattgggacataatatagttgtacacatttggggggttcatgtgatattttgatacacgtatacaatgtgcgatgatcaaatcagggtaattgagatatccatcaccttgaacatttattccttccttatgttgggaacattcccattcttcatttctagctattttgaactgcagtatacattcttgttaaccatagtcaccctactgtgctatcgcactttggacttactcattctatctaatggtgtttttgtgcccattaaccaacccttttcttttcttttttttttttttgagacagagtctcactctgtcatcaggctggagtgcagtggtgcgatctcagcccactgcaacctccacctcctgggttcaagcgattctcctgcctcagcctcctgagtagctgggactataggcatgtgccaccattcccagctaatttttgcatttttagtagaggcggggtttcaccacgttggccaggatggtctcaatctcttgacctcgtggtccgcccaccccagcctcccaaagtgctgggattacaggcgtgagctaccgcgcccggccttcttcttcttcttttttttttgatcaacgtgctttattggccctttagatgtttttctcttttctatcaaagtttttggagtattacaaattttatttcttttttctttttcttttttaaattttaaccaaccattttcacccccccttccctacttaccctttccaccttctggtaattaccaatgaactctctacctccatgagacccacttttttagctccacatataaatgagaacatgtggtatttgtctttctgtgcctagattatttcacctaacataatgacttccagttacatttatgttgctgcacatgacaggtcttcatccttttttatggctgaataattttccattctgtatatgtactatctgtgagtggaaaacaaaaccaacaaaaaactcaaagggtttttcctgttttctcactcaacaacaaacaacgcagaaaacttcagtgaacaaatgtgtggggttttttttctccacacaccaagcaagcaggcaattctgccagataccagctgggtgtcctctaattcagttctgaagatgtccacctgaagatagcatcaggtcccacagacatggggctcagtccctaatttacatttgaagaatgtaaattagtacagccactatgaagaacagtatggagagtcttcaaaacaaaacaaaacaaaaagaactagaactgccccaatatatcccattgctgggtatatatccaaaagaaaaaaatatatattgaagagctatctgcactcccatgtttattatagcactattcacagtagccaaaatatggaatcaacctaagcacacatcagtgaatgaatggataaagaaaacgtaggactgtaatatcgtgaaatatatatttggtcttcatcctcatttccttatacagatctttcacttccttccttaaatttattcctaggtattatatattctttgtacgttttgtaaatggggttgatttccttttcagttttttctctgttggcatttataaatgctactgatttttgtaagttgatcttgtatactgcaactttaccgaatttgcttgtcagttctaacagcttttgggtggaatgtttaaatttttctgaatatattatgtcatctgagaacaagaataatttgacttcttcctttccaacttggatgccctttctttctttctttctcttgcttaattgctttggataggacttccagtactatgaagaataacagtgctgacagtcagcatctttgtcttattccagattttagaggaacagttttcagttttacccttttcagtatgatgttagctgtggatttatcatatatggattttattgttttgaggtatgttccttctgtagccagtttattgagagtgtgtatcataaagggacgttgaattttgttgaatgttttttcagcatctacaacatatgagttctgtcctaaattctgtcaatgtattcatatcaatatatcaataaatgcatcaggattaattatctttttaacatattattggatttggtttgctggtgtttcgttgagatttttgcatctatgttcgtcagagatatgggcccgcagttttctttttttttgttgtgtccttgtctggttttggtatcagggtaacactggtctcacaggatgagtttggaagtattctctcctcttcatttttctgtaatagtttgagtggaactggtattaattcttttaaaaatggttggtagaattcagcagtgaatccatctggtcctgggcttttctttgatgagagactttttattactgcttcaatcttgttacttatattggtttgttgaggttttctatttcttcttcattcaatcttggtagattgtttgtgtttggaaatgtatccatttcctctaggttttctaatttgttggcatatagagttcacaataatcgctaatgatcctttgtatttctgtggtgtcagttgctgtgtttcctttttcatttctgattttatctgagtgttttctctttttcttagtctagctcaaggtttgccaattttgtttatctttttttttttttaaaaaactttttgtttcattggtctttgcattgtttatttagcctcaatttaatttattttttccctgatctttattatttctttccttctacaaagtttgagtttggtttacttttgcttttttagttccttgaggtgcattcttaggttgtttattcaaaatatttctgctttttggatgtaggcatttattgttaaaaacttctctcttagttctggttttgctatagcccatagattttgatacattgtgtttccattttcattcgtttcaagtaatttttaaattttctttttaatttcaagaaaatctaattaagaagttagtaagcaaaagttatgcatttatttaatgatttcttaccattgattgaatcaaatctattgactccttctcctagaagtctagggtattggaaaaaagtaaatgaaagctatttattcttattacaaagaaatatttggtgtaagaaggaaaaaatatcatttctgcacattggtaccaattatcttattttttcaaaaagttgtactcagttatattgagaaactgggctctaatgaatgtactttttgagccctgtgaccctgtatctggtgcttgaccttgtttgtgtctcaactgtattcccagcatgtcgtcctagagaacattctgtattatgatatgtaattatcaacatgcacttttaattattaggaattaaattaaagtgatcaaaatagaatttcttttgtccaataatcaaaccatttcaacactatgaaaaaaaatgtgtctttggacagatggaaatgtctggaaccagatagaggtgtcagttgcaaaacatgaatgtgctgaatgccatgaaattgttcactttagcgtggtgaattttatgtgacttcatcgcaataaattatttaagaaaagaagatatatcacagatcatagaaaatgaagccctgatttatagcttaaaaatgcagtcctcattaggcaaatcacataatcggcaatacataaagtaaacagaacacgagtggccaacaaaactttaagaacatgtttaatttcagaaataatccaagaaattcggattaataaacagtggaattcaattttgcctaacaggttagtaagcatgctttataggtaactattggcccaactataaaacaaatacatttctaaaaaaaatgtgcaaagccttttgaaaaccatagcttggtgaccattttttacataatgctatgattcagaaagaaagagtatcctttctcatggtaacctctgggctcccagcctcgccttgtggaagagtaaggcaggatcacttccctcttattcccatgttggtgtgactttgcgactttgaccaaagccttacctgcctcctctgcccaaggagggacgtggccgtctcagagggctgcttggtttctgtccaagctggcccttggggaagccctttggccacccaggtggtgattcctgctgtaagaacatgagaggctgagccaccaggcagtcccagatgtcctgaaacaacttatcccagccctgcccagggccttctctctagccctgtgcacctcatcacctgccccaaaacagttctacttatgtcagattctcatgggtgccttgcaacctttctgtctgtctctctgatcctcacttcttcttcagaatctcatgctgttgcatgaaaaaaaaacaaaaacgaacttttgtttttaggcccctttcctcttcctataggggcttgaatccaggccagatgctgggacactcttatgctgtcctttttgctattttgttgagtttcatccaccctagggctaacctcttttcttattggtatggctagatttcaaatatctcaattttagaagagaatttagctttgcatttcattattagaagggtcattggagtgttttccttagaacaaaggaggtcagaagtaaatcctagtctcttctacttgtaatacaaagaactgttcaagccttccgaaggacagggccattcacatcatagagccaggtcatggccagagctctggctctaggacatcctttcttcccagcctggtctatagaaaggaatagaatgcaagctcaggcctagagcctagctaggcctgaatacaggctgaaactttctcgctgagaggtgataaaaacaatgaatgtggttttcttgcagcattttttacggagcgttttcccagaaaactagaccccagttcctcaggactagttctgttcccaagtttcctcctctcatattctggagtcatctaaatagtagttctcaaatagaactaatttttcccctaggacagatatgtctgaagacatttttggtgttgcaattggagaggcgaaatagtcagtaggatatacgtagaggccaaggatgctgttgaaagttgtacaatgtgtgaaaaatacccgtcccccaactcccaacaaagaattactctggctcaaaatgtcacgagtgctgaaattgagaaactctgatctaaatcaattccaagtgaatccagtggtgtctacccagcaaggcccccagcctggaggtgtggagggcagcaaggatcctgtgcccaccctctgagctgtttgtctccctataggggtctttacaaggaatgctcattcaggctgaaatctcagcctttgttggctgagctgtgggttcattctaggcaactcagtagaacaaaagccccaaaatgccaagtcattcttaataggcactttttaaaatacgtgacttaggccaatgtctacaatgcctttaaaattctgcctctctttcaaaaccctgtgcttatctttatggctgattatctggggcatttccaggcatgtggaacattttggcagcagtgtttctgttaatagataattatctaaagagtagctgaatgctagaatgattcagctaaaaaaagtattcaacatgagtacataaaagcctagaaacttgactgtctagtaatttagataactctaggagaatgagaataaggggttataaaaatataactttattatgatgcaatttattatgatacaattcactctttttttgggggggttccagtaagatttaatgactttaagtgtttacatatttctacttttcagcacaaattcgtgataatatataaactacactttgaatgtttttttctttttttaaaaattttattattattatactttaagttttagggtacatgtgcacaacgtacaggtttgttacatatgtatacatgtgccatgttggtgtgctgcacccattaactcgtcatttagcattaggtatatctcctaatgctatccctccctcctccccccaccccacaacagtccccggtgtgtgacgttcctcttcctgtgtctgtgtgtgattgttcaattcccacctatgagtgagaacatgcggtgtttgattttttgtccttgcgatagtttgctgagaatgatggtttccagtttcatccatgtccctacaaaggacatgaactcataattttttatggctgcatagtattccatggtgtatatgtgccacattttcttaatccagtctatcattgagggacatttaggttggttccaagtctttgctattgtgaatagtgccgttataaacatacatgtgcatgtgtctttatagcagcattatttataatcctttgggtatatacccagtaatgagatggctgggtcaaatggtatttctagttctagatccttgaggaatcgccacactgtcttccacaatggttgaactagtttacagtcccaccaacagtgtaaaagttcttagagatctacaaagagacttagactcccacacaataatagtgggagactttaacaccccactgtcaacattagacagatcaacgagacagaaagttaacaaggatacccaggaattgaactcagctctgcaccaagcggacctaatagacatctacagaactctccaccccaaatcaacagaatatacattcttttcagcaccacaccacacctactccaaaattgaccacatagttggaagtaaagcactcctcagcaaacgtaaaagaacagaaattatagcaaactgtctctcagaccacagtgcaatcaaactagaactcagaattaagaaaatcactcaaaaccgctcaactacatggaaactgaacaacctgctcctgaataactactgggtacataacgaaatgaaggcagaaataaaggtgttctttgaaatcaacgagaacaaagacacaacataccagaatctctgggacacattcaaagcagtgtgtagagggaaatttatagcactaaatgcccacaagagaaagcagaaaagatctaaaattgacaccctaacatcacaattaaaagaactagaaaagcaagagcaaacacattcaaaagctagtaaaaggcaagaaataactaagatcagagcagaactgaaggaaatagagacacaaaaaaaaacccttcaaaaaattaacaattcactaattttaatggtttttggtatagtcacagatttgtacaaccatcaccatagtcaaccttagaacattttcagtcactcccaaagataccttatatctattatcagtcactcttctttctctccttcctccagcccctggcagccattaatcaactttctgtccttatgaatttgcctatttctatggattccattcacaaaatacatgaatagctttttccctttagcataaagagttttgtatattgatcttgtacttcaacatttctgaacttgtttatttgttctaatagtttttttttagtggatttcgtaggattttctacattccagatcatgttatctacaaatagagatagcgttacttcttcctttctaataaggataacatttatttcttttgcttatctaattgccctggcttgaacctctagtaccgtgttgaatagaagtggaaagaggagattcttatcttgttcctgatcttaggtggggaagtattcagtcttttagcagattaggtcttaactggagattttttgagtagatgccccccacattatgagattgaggaaattttcatctattcctagctcgttgagtattcttatcatacctgaggtgtttggttttgtcaaatgctttttctgtgtctattgaaatgaacatggttttctttttggtcccctattctagtgatatgtgttaattgatttgcaggtgtaaacgaaccttgtattcctagaataatcccacttgattgtgttgtataatccttttacatgttactgaatttggtttgacagcattttattgaggacttttgcatcatatccataagagatattggaagtcttattttcttgcggagccttggtctgtgtttgctatctgaatattactggccttgtagaagaaactggggaatgttctcttctattttttgggaacagtctgtcaagaattggtattcattctttacatatttgatagaattcactagtgaagctgtctgggcctaggcttttcttgcaggaggttttaaaattactaatttaatctttttacctgttatggctttatttagattttgtatttcttcttgattcaatttcagtagtttgtttctttctaggaatttgtcaattttatctaagttatctaattccttggcataaaatggcccagagtgttcccttataatactttctgtttctgtaaggttggtagtaacattccctctttcatttcatatttttagcaattttgagtcttctctcttttttctttgttaatctaactttaggtttatcaattttgtctatattttcaaataaacaattttggttttgtttatttttctctattgcttctctatttctatgtcgttaatttcccctctattctttattattttctgccttcttgctttgtgtttagtttagcttcctggtggagtgacacttatcattacacaatttcccactttattgctagtaatattttttgttttaaggtctatattatcttgcttcatgatactgtgtcattaaaaaagtctattttatctgatattagtataaccaatctgcatttcttttggttgctgtttcatgatatattttttttccaccatttaactttgtaaaatttaagttttaaatataaacttttttttgtttttaaatctcaaatgtatcttctgcagacaagatattattagtccttgtttttaatgcagtctgataatctctgtcttttaattgagttgtttaatccattcacatttaatactattattgatgtagatggaattatgtctaccatcatttttttcttttcttttttttttgagacaaaatctcattctgttacccagactggagtgcagtggtgtgatcttggcccactgcaacctccgcctcctgggttcaagcagttctcccacctcagccgcccgagcagctggaactacaggtgtgcaccaacatgcctggctaatttttgtattttttatagagacagagttttgccatgttggtcagtctggtctcaaactccttacctcaagtgatccacccgcctcagcctttcaaagtactgggattacaggtgtgagccactgtgcctggccccattttactttttatgctctatatctctcatgtatttatttgttcctctgttctgcctttattgctttttttttttttttgcattgagtgaatattttctagtgcaacatgtaaaatcctttaatgtttttctttccactatttaaaaagttgtgttctgagcggttgttctagggcttagcacatcgattttaacttaccagtatctacttcagatttataccaacttaattccagttaaatattgaaatgtcattcctatatagctctatttcctttctcccctttttatgatattattgttatacgtggtacatctatatatgttacaaactaaacaatacatggtgataatattactttatataaatacacatgctttcaagaatcagagagaagaaagaagagcaagtatgtatttatagagtttgttatattaacctttttgcttatcatttttggttcttttcctttgttcttatggatctgagttaccttatggtatcatttcttagcccaatttgcctttgctcccaactgcctcccttgtgctattattgtcaaatatattacgcttccatatgttatagtcccaacaatataattatatatatgtatattgctttttaggattgcttttaaaatcagttaagagaatagggccgggcacggtggctcactcctgtaatcccagcactttggaaggctgaggcaggtggatcacctgagaccagcctagatcaagaccagcctggccaacatggtgaaaccccatctctacttaaaatacagaaattagccgggtatggtggcaggcgcctgtaatcccagctactcgggaggctgaggcaggagaattgcttgaacccgggaggcggaggttgcagagagccaagatcgtgccattgcacgccagcctgggggacaagagcgagacttcgtctgaaaaaaaaaaaaagagagagagagagagaataaaggggaagtatgcattggtactgccttttataactacatgattactattatcagtgctttttttctgtatgaattcagattattctatggggtcacttgctttcaacctgaagaacttcctttagtatttcttgtaagttgagtttttcagcaacacattctctcaatttttgtcttattacatggggttttgcttttattttgtttgtgcctttaaaatgatactcatcagagacttgtcttcagaggtggctcataacttatccttcagaattgcacatattttttagcagacacacatgaggcaaatttaatgataataaatacctttttaagaatcagggtggggagattaccttcagctgtgaagagcagctggtgatattgcttgtggcaagggatagaaatggtttatggatctgggaaaggctctgaagagagaagaaactgagttgacagttctaggaagttgaaggtcttctcataaattatagttgtgagataatattcacaacgactggtataaaaattcaccagtatattgttatcttttaataccctgagcaggtaggtcggtaacagatcagctgcatactttgagtgtcttagtgcaaaatgccccttgttcaaaaattattaagaatttcaggccgagcacagtggctggagctgaagtgggaagctgaggcaggcagatcacttgaggccaggagttcaagactgccctggccaaaatagtgaaactccttctctactaaaaagacaaaaaattagctgggtgtggaggtgcatgcctgtggttccggctactcaggaggctgaggtgtgagaatcacttgcacttggacctgggaggcagaggttgcagtgagccgagatcacgccactgcatgccagcctgggtgacagagctagattctgtcttaaaaaaaaaccaagaatttcaggacactgacagcaaagtattaaacaaagcatgagaaccttctaaatgtggaatgtggtgtgtctgcccaggctgctcctccacaaagctggcccaggcaggggcaaatgtgcagctgggagagtgagagaaccagggcagctggattgcccaacctcaggggtggggcccagtgccaggtactatgtagatagtgccttttggaactattcaagctggtgaccctgaaaaaacattcttccaatttaggccattgtacaaaagcagaggccaagtacatttaccactcaaacttcacgtggtctttcagccacagacttggtcaaagcaaatgaccattgaggtttcaccataggctgggtacatgagggtgtccaggctggtgtgatgctgaggattttacagcggcttagaaacacagctttttttctaggtgtttctcaaaccttagggtaagagtggagatgggaggtggacctaagtatgtgataagaagactagagaaatgagtgtttctactgtgtctgtgccccatcactgtaggtctgatttctactccccaccccactccttcttgtcactgaaaagtcatggaattctggaatctcagggttgacagtgactgtgaagcagagtgccgtacactggtatccatctctgggagagaaataccatgcaccaattaggttgggttgccaatcccagggcaggactctaaacacctcagcagtctttactaagattcctagacctggcacttcccagctctggttggaggcattttacaatcctagctgccagagtatgagtctggtgagatggaatgcttgtgcaagtcaggcaaagaaacttgattcttcacagataggcagtaagaatcaacaggaacctaggatccatggtcagccagcccccaaggtagaggaagctgctcaggtggacagagtcccatctgcatgtgctccactttgcatggcagctgagggacccccaaaatactctgcattaggctttctatcccggaggtcactgcagtttatcagcacccagacatccatcctgggtgcctgccctccgttctattccctttccatcttttctctgacttttgtgatgattatttctcttgtgtttttcttcatcagcatttattttaagttccagggcacacatgcaggatgtgcaggtttgttacatagctaaacatgtgccatggtggtttgctgcccagatcaacccatcacctaggtattaagctcagcatccatgagctattctttttgatgttctctctccctcgactatttctttgcttttctttacaattttgccacctaaatttgcatctgtaaataatacagatgattttacctgtttcggtacttaacataaatagaattttactgtttttctttgtcttgccttttttttttttttggttcaaccttatgtttgagagattcatgatgtgtgtttttacaagttgtagtttgtggattgtcagtactgaatatatcccattgtatgaatacaccacaattttatttatccattctactgttgatgggctttgggttgtatctagcttttcactactgtgaacaatgttacaacgaacattcttttacattctgaaacacatgtgagtgggtttttagagtatatacctaggggtggagctgctgcgttggagggcgtgcatatcattaatttaataagatgtaactatttttcagagtggttgtacatatccctgattgctaaggcattagttatgtacatgactgattatattgagggttttaaaatatacttatcagtcatttggatttcctcttttgcccattcaagtctattgcccactgggttgtctactcgaattatgtatgcattctggatactagttctttggcagttatagatattgcaaatatcttcccccactctgcatcttgctttttacttttattcaaacgaattagaataaacatcttagtatatgactcactgtgctcctgtgtgggagtttccacaggggagttgccggaaaatggacttactgtgtcgtgcacattttaaatgtcattaggcattaacaatttattcttcccttagcaatgtataagtgtacactttccttcatatccttgccacatgtattatcatcaaatgctttcagtttttgacaatccaataggtaaaaaatatctcaaggttatttgaattttcatttcccttattaattcttcatttaaacgtcttttgtgtgtgtgtgtttactttcatcaagttgtttcaccagtgaagataagaactggtatttaccttctgcatttaatagaattgatgcaactggctgagcgtggtggctcatgcttataatcccagcactttgcggggccgaagcaggaggatagcttgagcccaggagtttgagaccagcctaggcagcatagtgagattccttcactacagaaagtaaaaacctagctggacatggtagcgtgtgcctgtagacctaactactcggaaggctgaggtgggaggattatttgagcccaggagttcaaggttccagtgagctatgtttgcatcattgcacctcagcctgggcaacagagcaagaccctgaccaactccccacccccccccaaatcaatgcaacctgtgatcactttatttgggcaacttccccaaattcttgactcagtgaatttgttgcagggcttttcttttttaatctcttttattggttcacatactagaacaatctcaggggctatctggttaggtattgcttgctacagagccaaactatgtcaccagaacccatttatatgtttccatttcttgtctctgtttcctcggccgtggcatccttctcagtgtcataatacccaagcagcaggggcttcagcctgagttcttttcccaggattcctagttaaagttcttctgcctcattggctctaatgaagtcacatgcccatctctgaactaatcatggtggccaaggggatgagacgtgctgattggttgaggcctaggtcacatgttctatcctgagctgggagtggatcctcaccagaagtacatttgagagtttgggggaggggtggccgctgggatgagataggaaataacttgtccacgctgtgaattacccttcaattaatgatattttctatttagatgtcagattttttgttactagtttgtcatataaacctattactatatagatttttctgtgtcctaatctaaatttcttttaataatctatgggtgaacactcaataagaatgtcctccagaaaggatgacctgccgacttttaaagcaatcattttggggcttataagtatttagtatttgaagtctctgcctcttgctctcttttaggaattctttttcctactgtgatatatgtaagtacttataaatttaaacttaaaattcaaaaaatataccaggatgtgaaagaaacattattaaatataggtgttttgctgtgagtgtttcttggaataggtagggctttgtatagtaggttttggtcttttggtcagcttgggaaaattttgttcttttttaattgaatgatatgttttcaattgatactactaaaataaacattattggagtattatttacatgcaataaagtgcaccgttttaatgatacatttctgagttgtaatgattttatttagctgtgcagccatcaccacattcaagacacggagcactccattacccagtaacttcccttctgtcctatctcagtcacctaatacctcccctcaccttaggcaaccctggatggtttctgttgctggataacagaattgtcttttctagagtttcatctgaatggaatcatacaattatgaatgaaaaacacacaggtatactgttttgtgtctggcctctttggctcggcataatgtctcttcagatcctttcacattgttgcatgtatcaatatttcattcgtttctatttccgagtagcatttcattgtatagatatatcatcatttgcttatgcatttatttattgatggacatgtggatagtttccagttgttggctattatgaataaagctgctatgactattcgagtacgagtgtttctgagatttcatttttcttgggtaaatacttaaaagtgggattgttgggttgcatggtaggtgtatgtatgacttcataagaaacagtcgaactgtttccaaagcagttatacaattttacattcctaacagcaacgcattagagttctggctgctctgtatttgtgctaagacttgctatttttagtcttttacattttagccatcctaatgggtgtgtagtagaatttcattgggtttgaatttgcattcctcttatgactgatgataatcttttcatgtgcttattgatcatatgcctgttttcttttaaaaggtgccctttcaaaatcttccgcacacctttattggtttgtttgtcttcttatatttgagtagtgagttctttacatattctggatacaagtgctatgtcagatagttgtgtttctgtttacttctggtgtgtggtgtcctttgtttcattttttaaaaaacaacgtctttcaaggagcaaaagttgcaagttttgattaagtcaattttagcaaacgttttgtgttttgtacccctcgtgccctatctaaggaatctttgtctaccaaaaggtgggaggatttgtttctatgttttttaaaaaagttaaacagtttaagtttgtaggtttgggtggaaagaggtctttagaccacttagtctttgtttaggtctttgtttatgtctctgagattggcagaggggaatatacaatcattcagatcaggctattggatgcctttttctatctctgaatttttctggggtgacctcactgacacccatggcttcaatcaccacttatgctgatggctccaagtctatctgtgcagcccagacccctcctcatctccagaccctggaagctgatgccttgggctgctcctcctatttcctgggcaccaggaatatgagctactccctccccacagtcctgctctccccagtgctcccatgtcgctgaaggcaccaccatcttccaagatacatgggcctccccagggtctaggagtcctagacgtgggagtagaaattagatgacattggtgtctaaacaaaacaccactgcatggagatagaacaggggagccccctgaatgtggtgagagcaccctcccaggtgtgttccaccctcaccccgggctcatcaggagggtgcttaggatgcatacagttttaagggggttggaggaatagttcagaggctgagatgttgcacccacagctgagaatccctttctagcgctctgtgtcctcacaactccccgggaatcatcctcccctggagagttcccaaagcccttgcaggcctgccttctctgtgccttcctgcctgcgccctctggtggacagctccattcgctgcctgtcccatgggttctgtccaaaggtggaatctattatcaatgtggatttctaatgggggtaacttcctccctaagggaagcctcagcttcaccagcaatggcagacacggccaggcatgtagacacagaggaagtgagatagaaagtgtgcacagcccagagagcctgcccacatcatcctggggcgaccaggacaaggaggcgtcagcaatcttgccaagcacaagtatgagtgactttctggagcaggacgagtctcatgggcgtgagaccattgtgagtgctcagggtctctccattagaaaggcacacgtttaattctccattttgaaatttgaactagagcccccacaaattattctgttctggaggaaccattcttatcagaacttggtgctggattgacttggaaaaaagcctgaccataatcttcaggatgaaataaaggcctggatgaatggacacttcagtctctaagcagacttgcagaagactggagccttcagcattcagaagaggaattcagactgtgcaagatctgaggccaggctccagctcccccggtcccttggtgagcaggagctccctgaacccaccatgggtctttgctagggttgtcttgcacatgtgtgctttagacagcagcacctcttcttccatggtgtagatggagaatcctcaacaaagcctttccaagaatctgatcatcacatcttgagctcagcctccctgcagctttttttatattgacagccacttcagagagagtcctctttgagctttacaagaaatatcctggtgtgaaaaacgaccaaaaccagatagccagcctccccactccctgtttaaagaaagctggcttagcaatgttgtctgcattttggatgtgctgtgttacccatatgtgggaagaaagagtattaagagttagcaaatagggtcacatccagcagagaccatatggttggggactagggcaatggtgactcctcagacctcagctgcagcctgataaacgtggttaagagagaagtaggagacagtgacatgaaatgggggttcacagccttgtgttgggaattgaatgagaaacaagagcttgaacttggatgttccccagagcgagcgcaaggtcagatgagtttttcaagataggagtgatcggtctttcccagggtggggcccataatgcaagacaattatagattaacgggtaataagtaactggaggagggcactctgtcttcaattacatgttgatttgctaggtgtctcagtgacaaggtaattaagacgaaggaaacaattctaggaggcacaacgtggggtggacagtcagctgtcggtggcttctgctgagatggccacaggactccaggttcccctgccgcagctggccacaggactgctgcttctcctcagtgtccagccctgggctgagagtgggaaggtgctggtggtgcccactgatggcagccactggctcagcatgcgggaggccttgcgggacctccatgcgagaggccaccaggtggtggtcctcaccctggaggtgaatatgtacatcaaagaagagaactttttcaccctgacaacgtatgccatttcatggacccaggacgaatttgatcgccttttgctgggtcacactcaatcgttctttgaaacagaacatcttctgatgaaattttctagaagaatggcaattatgaacaatatgtctttgatcatacataggtcttgtgtggagctactgcataatgaggccctgatcaggcacctgcatgctacttcctttgatgtggttctaacagacccctttcacctctgcgcggcggtgctggctaagtacctgtcgattcctgctgtgtttttcttgaggaacattccatgtgatttagactttaagggcacacagtgtccaaacccttcctcctatattcctagattactaacgaccaattcagaccacatgacattcctgcaaagggtcaagaacatgctctaccctctggccctgtcctacctttgccatgctgtttctgctccttatgcaagccttgcctctgagctttttcagagagaggtgtcagtggtggatcttgtcagccatgcatctgtgtggctgttccgaggggactttgtgatggattaccccaggccgatcatgcccaacatggtcttcattgggggcatcaactgtgccaacgggaagccactatctcaggtctgtattggtgcctttatccaatcaatgttccaggcaaaacactttttaaaaaatgtatttacttacaagtgcttccatatctacttatctttccaaagatttcatttctgcttctcattgttgtaatagtcttcagtgagataaacttttaaagggtcaatggtagtgcagttcagggtttcaatggccactgagaggaaggagaggcagggacgaggatctgtcaaaggatgggcaagagtggtgtgactcacggagactgttcgtttgtaaaagcaccatcttcatggctgtggatgtgcttcagctgggcaggagcagggacactacactgagaactgatccatccaatcttgctggcaagattttcagtagaaaggaggaaggaatagaaatttacaattgttgacgtgacaatttttagtggtcccatcttgcaaaagatagagaggtgaccacaggagacctaagcactcagaggaagtagaggtttcaaagaagttgactcagttcagtggaattgggccaatgtaggtgcaatggatgtctgtgatcagagaatgaaacacagagttcagtttccagagagggagtgttggattgtaataggagaatgtttcttgtgaagacactacttaaaaaaaattcttactaggttaacttcatggtctaataccgaagtgtccaatagaaatatcatgtaaaccacatacataatttaaacttttctagtgggcatgttaaacaccagcaaaaagaaaccactaaaattaatgtgaataatgcattttatttaaccagatgtatcccaaatattatcctttcaacatgtgaactgtttaacgtagctttttttgttgttaagtcttcaaaatctagcatatatttgacacttacagtatatctcaatttggaatagccacatttcaagtgctcaatattcatatgtagttagtgacaacaatatggtgaatgtttataaatattccatggataaaactaaaattctatcttttaaatttttctatcttttgagatggagtcttgctctgtcacccagtctggagtgcagtggtgggatcttggctcattgcaacctccacctcccaggttcaactgattctcctgcctcagcctcccaagtagctggaactacaggcgcatggcaccacatccagctaattttctttttttttgtattttttatggagatggagtttcatcatattggccaggctgatctcaaatgcctgatctcaagtgattcactcacctcagcctgccaaagtgctggaattacaggcgcgagccaccacacctaggcaatttttctatcttttaaaagaccctctactgaatctgcccaattctgtgaaggatgtcttttaaaaaatccccttacataacaaattctcctccagttatattttggctcttgaataggttttgctttatacatagtgattagattggtgcatgtaggtttgaggtttgagacttatattttcttcacagtttgctgttatcattaaataataatccttaaaatacattttatctgatatcagtaatgtgactcctatgttattttttgaattccccatctcttttaatttgaaaatgatttgtgtgcaagtgggtagctcacacctgtaatttcagccctttgggagaccgagggaggaggattgcttgagcccaggagtctgagagcagcctgggcaacatgctgagactccatctctacaaaaaattaaaaaattatccaggtgtgatggtgcacacctgtggtcccagctactcgggaggctgaggcaggaggatcacttgatcccaggaggtggaggctgcagtgtgccatgttcacgccacctcactccagcctgagtgacagagcgaggacccatctcaaaaaaataaaaatttatttggaatgtgaaaatcttgttttaaagttagaaaacatttttttaaaactccaatatgaaaagctgggtgcagtagcttgtgcctgtggccccagctacttgggaggctcaggtgggaggatcattgagctcaggagtttcagctcttgtggtttgttgactgactgactgattgactgattgattgatttaaaacacaacaaaacccaaaatgactttaatctgatagtttcttttgatgtcagcattctgattctgtccattcttagttgtattctttccactgagtgtaagctcattcctttaacagaaatttagtttttccatcttagttttggaattccatggcccttttccatttccatggagatgcagtgcagcatcttcaagtctctaattcttacatctgtctctttcacttgcaagagcccttgtgattacattgtcctgcccggacatccagcataatctccccatgtcaaaacccttaatataatcacatctataaagtctcttccacctgtaatggaatatattcccaggtttgcgcaactacaatgtagatactttgtggggctgtgattctgcctaccacagacactaagcttaaagtgaaacccacatcttattcaaaacttggaggttttccttcatttggccatttaaatttaatttttgtttctgtcctccgtagtcttctattctccaggcttcagagctctcagcttaccattcaattatctcctttctctccttatattccttttttcattttttaaaaacaatactttcaaagagcaaaaattttagaatttgatgaggtttattctagtgaagtttttatcgtttgtactttttgtaccctaaggaagctttgtttaccccaagatatagtttctacattctcttaaaaacactaaagagttccagtttatatgtttagctctgtgagattgggagaggggagctagatcactcaggtcaggctttcgggatgcctttttctgtctctggacgttgctggggtgacctcactgacacccatggcttcagctaccacatatgctgatggctccaagtctatctgtgcagcccagacccctcctcatctccagaccctggaagctgatgccttgggcagctcctcctatttcccaggcaccaggaatgtgagcttctccctccccacagtcctgctgtcctcagggcccctatgtctctgaaggcaccaccatcttccaagatacatgggcctccgcagggtctaggagtgccagacacgtaaccagaaatcagatgacatcactatctaaataaaacaccactacatggaaatagaacaccactacatggaaatagaacatgggagccccttgaatgtggcaagagcaccctcccaggcatgttccaccctcaccccgggctcatcaggagggttcttaagatgcagacagttttaagggggttggaggaatagttgagaagctgagatgttgcacccacagctgagaatccctttctagcactctgtgtcctcacaaatccccagaaatcgtcctcccctggggagttctcaagcccttacagacctgccctctctgtgccatcctgcatatgcctcccttgagctgggtgtccctctgatggacgcatccattcactgcctgtcccatgggttgtgtccaaaggtggaatctgttatcaatgtggatttctaatgggagtaacttcctccataagggaagcctcagcctcaccagcaatggcagacatggccaggcatgtagacacagaggtagtgagatggaaagtgggcacagcccagagagcctgcccacctcatcctggggcgaccaggacaaggaagcatcagcaatcttgcgagcacatgtaggagtgactttctggagcaggacgagcctcatgggcatgagaccattgtgagtgctcagggtctccccctagaaaggcacacatttaattctccattttgaaatttgaagtagtgcccccacaaattatgcagcccgttctgttctggaggaaccattcttatcagaacttggtgctggattgacttggagaaaagcctggccataatcttcaggatgaaataaaggcctggatgaatggatacttcagtctctatgcagacttgcagaagactggagcctttggcattcagaagaggaattcagactgtgcaagatctgaggccaggctccagctccccaggtcctttggtgagcaggagctccctgaacccaccgtgggtccttgctagggttgtcttgcccatgtgtgctttagacagcagcacctcttattccatggtgtagatggagaatcctcaataaagccttcccaagaatatgatcatcacatcttgagctcagcctccccggagcttttttttatattgacagccacttcagagagagtcctctttgagctttacaagaaatatcctggtgtgaaaaaagaccaaaaccagatagccagcctgaacactctctgtttagagaaagctggcttagcaatgttgtatgtcttttggatgtgctgtgttattcacatatgagaagaaagagtttcaagggttagcaaatagcgtcacattcagcagagaacatgtggttggggactagggcaatggtgactcctcagacctcagctgcagcctgataaatatggttaacagagtagaaggcagtgacatgaaatgggtgtccacagccttgtgttgggaattgaatgagaaagaagagcttgaacttggatgttccccagaggcagcacagggtcagatgagcttttcaagataggcgtgattggtctttcccagggttgggcccataacgaaaggcagttatagattaatgggtaataagtaactggaggagggcactttgtcttccaattacatgctgatttgctaggtggctcaatgacaaggtaattaaggcgaaggaaacaaatgtagcaggcacagcgtggggtggacagtcagctgtcggtggcttctgctgagatggccagaggactccaggttcccctgccgcggctggccacaggactgctgctcctcctcagtgtccagccctgggctgagagtggaaaggtgttggtggtgcccactgatggcagcccctggctcagcatgcgggaggccttgcgggagctccatgccagaggccaccaggcggtggtcctcaccccagaggtgaatatgcacatcaaagaagagaaatttttcaccctgacagcctatgctgttccatggacccagaaggaatttgatcgcgttacgctgggctacactcaagggttctttgaaacagaacatcttctgaagagatattctagaagtatggcaattatgaacaatgtatctttggcccttcataggtgttgtgtggagctactgcataatgaggccctgatcaggcacctgaatgctacttcctttgatgtggttttaacagaccccgttaacctctgtggggcggtgctggctaagtacctgtcgattcctgctgtgtttttttggaggtacattccatgtgacttagactttaagggcacacagtgtccaaatccttcctcctatattcctaagttactaacgaccaattcagaccacatgacattcctgcaaagggtcaagaacatgctctaccctctggccctgtcctacatttgccatactttttctgccccttatgcaagtcttgcctctgagctttttcagagagaggtgtcagtggtggatcttgtcagctatgcatccgtgtggctgttccgaggggactttgtgatggactaccccaggccgatcatgcccaacatggtcttcattgggggcatcaactgtgccaacgggaagccactatctcaggtctgtattggtgccttcatccaatcaatgttccaggcaaaacactttttaaaaaatgtatttacttacaagtgcttccatatctacttatctttccaaagattttattttggcttctttataacagataaactgttgaggggcctagtgtatttcaagttttcagtggtcactgagaggaagaagaggcacggatgagggtctgtcagaggatggacaaggactgctgtgactcacggacagtgtttgtaaaggcaccatcttcatggttgtgcatgtccttcagctcggcaggatcagggacactacattcagaactgatccatcctggggtttttgcttgcctgattttcagctgaacggtgatgcaacagtaaattagaattgtggacatgataatttttagtggtcccatcttgcgaaagatacagaggtgaccacaggagacctaggcactcacaggaagtagaagtgtcaaagaggttgactcagttgagtggaagtggggctgtgaaggtgggatggatgcatgtgatcagagaatgaaacatggagttcagtttccagagagggatctgtcctgagaaaagtttttctgaccaggagttgggggtctggtgtatgatgtggggacatcgtagagtttggaaggtatggtgatggttgcatgtcaaaagggtcttctacttggaatgctgaaattatcaagagtgggtggaagggactagggaggagataagaccgtgaatctataagcccagtgaagctgggaccagtgatgaatggacatgtgtccaagaagggaagtgtttctcaggtgaagctgatcatatcaccaaactcaccctatcccactccaagtttctatagtgggatctattctttttccaaaaatttcagaggtgactttcattaatacagaatatttgggtttcattgaaatagtactctgggatgtgaaaaaccaaattcacacaccaatgaatttggtttctaaatccattaagggagccatccttttttttttttttttcttgagactgagcctcgttctgtcgcccaggctggagggcagtggccggatctccgctcactgcaaccttcacctcccgggtttaagaaattctcccacctcagtctcctgagtaactgggactgcaggcatgtgccactgctcctggcaatttttttttttttttttttagtagagatgaggtttcgcaatgttagccaggctggtcttgaactcctgacctcatgtgatctgcccgcctcggcctcccaaagtgctgggattacaggcaagagccaccaagcccagtgagggagccatctttcttgtgagagaattgagcccttttttgtcatattcactgaatttatatgaacttccatgagtttaggtcctttgtattcttatttctgtacttctttttattagtgtaggtattattgcaaaggacactaaactttatttttgtttttgatcaaaccacaagatatttgttctactggttttcttttccccttatgcaatgtagttactgaattgtaaaaaatatatatgttctttagctttgtaaaaatgtggaaaattaggaaggcatttgaatagtgattgtggctcttttcttgtggtttttcactatgaatatattctttagactgaactgcactggctcaaatcttcactctcatttttctagctatgtgacctaggacaggtaccctaagcattgtggttttaatgttgttatagtgagcacccaataaatattatctgttatcattcttattattttagtttaattgcatttattttatgctgaatttcttccagagccataggtaaattttttcttcagtttcttctgggatatctttttcttctgtgcaacctcatcctcaggtttaggaacaatttgttccttatcagtaaagatcatcttgaatgtggcagtggggggtcatgtaagggttaatccaataatgagctctgcaagacgcatggctcatcttggatgctttgtttacttggataagcttaatgatgagagaatctacatctaaattgttatatttagcattattctctgcattttaaagcacatgcagcaaaaatccagcaccctatttgggccaccgaccttgtgtccagccccactgctcggccctgggcacacttgccagcccctccattgcaatatcgaaatggtgcacactgcttccataaagtgacatccttcagacacttggtggctctttgtatatgcatacattgatggcctgggtagtttcacgaatgtcctttaagtgaacaggaaaactgaaacctcttgaattgcatgattttgtggtgtttctgggtcaagtgaataaagaagaattttcacagatcaccttaggcctcttagaggaagagctatcatcatcattagtagagtttaagactcctgcaggacaagatgtgtcacctggagacctttgccatgttcgtgccaatttactgagtgcatgaaagatcatttacaccaaaatctttatcatgtattatctgtgacagacacgccattatcatttttattacattgatttcctttgttattttgtcacccttacttacttggtttggttgacccttagatttgaaatttttctacaaatatacaagactaaagttgaaatcttacgtttcttctccctctctttctccttgatttaaagtttatggataggttgaattatttgattggtcttctcaaagaaataactgtggaatttgtatattcttttcactgtttcattttccgtttcgttaattgcagcttatttttgccttaatgatttcatcctagtttcttttggttgatttgtagctgcttttgcaacttcgttagaggactattacacttctttacatttgatttttcttaatgaagcattgagggctcgagtaaaagatttcttttacttaggttttggtaaaaattgctgttcttttcattgcttttagataatttaaatatcagtttttaaatttctcctttgatgcagtgactgtctataaggctgttacctaattctgatattgttaataattttgtagtcatctccctcttattttttcaagttattttgtattataataagaatgtttcttttttttttttttgaaggaaaaaataaatttattgctcattaagtggaagtggatcatcataaaggtcttcatcctcattgtctccatgctgagtgggctgaggaggaggaggaaggggagggattggtcctgctgtctcagcgtggcagaggcagaagaggatgagaaggtggaagggccagcgggagaggcaggcacactcggtgtaactttatggaaatatatcatcatttttgtttgacttttttcctttctcatttctctgaaaatgtttctgtacagtaccaattcttcttccaccatttgctttagtttcagtgcccaaaccatagaagggtccatgtggtaaaaaaagtcaaaactgacttttttttttttttttgagttggagtcctgctgtcacccaggctggagtgcaatggcacgatgttggctcactgcaacctctgcctcccaggttcaagcaattctcctgtctcagcctcacaagtagctaggactacaggcacacgtcaccacacctggctaatttttgtacttttagtagagatggggtttcaccatactggtcaggctggtctcgaactcctgacctcaggtgatccacccgcctcagcctcccaaagtgctaggattccaggtgtgagccactgcacctggtcaacaatcttttttttttttttttttttaatttatttttttattgataattcttgggtgtttctcacagagggggatttggcagggtcatgggacaatagtggagggaaggtcagcagataaacaagtgaacaaaggtctctggttttcccaggcagaggaccctgcggccttccgcagtgtttgtgtccctgattacttgagattagggattggtgatgactcttaacgagcatgctgccttcaagcatctgtttaacaaagcacatcttgcaccgcccttaatccatttaaccctgagtggacacagcacatgtttcagagagcacagggttgggggtaaggtcacagatcaacaggatcccaaggcagaggaatttttcttagtgcagaacaaaatgaaaagtctcccatgtctacttctttctacacagacacggcaaccatccgatttctcaatcttttccccacctttcccgcctttctattccacaaagccgccattgtcatcctggcccgttctcaatgagctgttgggcacacctcccagacggggtggtggccgggcagaggggctcctcacttcccagtaggggcggccgggcagaggcgcccctcacctcccggacggggcggctggccgggtgggggggctgacccccccatctccctcccggacggggtggctggccgggctgaggggctcctcacttcccagtaggggcggccgggcagaggcgcccctcacctcccggacggggcggctggccgggcggggggctgacccccccacctccctcccggacggggcggctggccaggcggggggctgaccccccccacctccctcccggacggggtggctgccgggcggagacgctcctcacttcccagatggggtggctgccgggcggagaggctcctcacttctcagacagggcagctgccgggcggaggggctcctcacttctcagacggggcggccgggcagagacgctcctcacctcccagatggggtctcgccgggcagaggcgctcctcacatcccagatggggcggcggggcagaggcgctccccacatctcagacgatgggcggccgggcagagacgctcctcacttcctagatgtgatggcggctgggaagaggcgctcctcacttcctagatgggatggcggccgggtgaagacgctcctcgctttccagactgggcagccaggcagaggggctcctcacatcccagacgatgggcggccaggcagagacactcctcacttcccagacggggtggcggccgggcagaggctgcaatctcggcactttgggaggccaaggcaggcggctgggaggtgtaggttgtagtgagcggagatcacgccactgcactccagcctgggcaccattgagcactgagtgaacgagactccgtctgcaatcccggcacctcgggaggccgaggttggcggatcactcgcggttaggggctggagaccggcccggccaaacagcaaaacccggtctccaccaaaaccagtcaggcgtggcggcgcgcgcctgcaatcgcaggcactcggcaggctgaggcaggagaatcaggcagggaggttgcagtgagccgagatggcagcagtacagtccagcttcggctctgcatgagagggagaccgtggggagaggcagaggcagaggcagaggcagaggcagaggcagaggaggcagaggcagaggaggcagaggcagaggaggcagaggcagaggaggcagaggcagaggcagaggcagaggcagaggcagaggcagaggcagaggcgcctggtcaacaatcttaagtccaataagaatgtttcttatgaagacactacttaaaaaattcttaataggttaccttgatggtctaatacagaattgtccaatagaaatataatgtaagccacatacataatttaaacttttctagtgggcatgttagaaaccagcaaaaagaaaccactgaaattaattttactaaggcattgtttaaccagacatatcacaaatattatcctttcaacatatattcgatataagattatgacttaactatttgacatagttttttcttgctaagtcttcaaaatctagcatatatctgacatttacagcatatctcaatttggaatagtcacatttcaagtgctcaatagtcatatgtagttagtgactaccatatggtcaatgtttacaaatgtaaacattgtaagagacttacattttcttcacatagtttgttgttatcattaaataataatccttaaaatccattttattggataccagtattgctactcctatgttattttttcaattccccatctcttttaatttgaaaatgatttgtaggcaggtgggtggctcacacctgcaatttcagccctttgggagactgatgcaggaggattgtttgagcccaggagtctgagagcagcctgggaaacgtgctgagactgcatctctacaaaaaatcaaaaaattatccaggtgtgatggcgcacacctgtggtcccagctactcaggaggctgaggcaggaggattacttgatccgaggaggtggaggctgcagtgtgccatgttcacaccacctcactccagcccgagtgacagagtgaggccccatttcaaaaaaataaaaatttctttggcatatggaaatcttgtttaaaaagtttagaaaacattttttaaaactccaatatgaaaagctgggtgcagtggcatgcgcctatggtcccaggtacttgggaggctcaggtgggaggatcattgagctcaggagtttcagcacctgtggttttttgatttatttatttaaaacacaacaaaaaccaaaattgcttccatctcatagtcttttgatgtcagcattctgattctgtccactcttaatcttattctttccactgaatgtaagctcatttctttaacagaaatttcctttttccttattaattttggaatttcatggtacttttccacttttagggagatgcagtgcagcgtcttcaagtctcccactcttacgcctgtctccttcacttgtaagagcccttgtgattacactgtcctgcccagatacccaggacaatctccccatcttaaaactcttaatttaatcatatctgtgaagtctcttccacctgtaacggaacatattcccaggtttgaggaagtacaatgtagatacttttgtggggctgtgattctgcctaccacagacactaagcttaaagtgaaacccacatcttattcaaggcttggaggttttcctctattcgaccatttaaatttaatttttgttccttttctccatagtcttctattctccaggcttcagagctatcagcttaccattcaattatctccttttttcctgatcttccttttttcatttttaaaaaacaatacctttcaaagagcaaaagttttagattttgatgaggttctttctagcaaagttttatcatttgttgtttttgtaccctaaggaatctttaccccaagatgtgaagattagtttctgtgttctcttacaaacattaaagaattccagtttgtgtgtttaggtctgtgagattggcagaggggaacaagaccacacaggtcagtctttcaggatgcttttttctgtctctggactttgctggggtgacctcactgacacccatggcttccacatatgcggatggctccaagtctatctgtgcagcccagacccctcctcatctccagaccctggaagctgatgacttgggcagctccttctgtttcccaggcaccaggagctcctccctccccatagttctgctatccttagggcccctaggtctctggagtaccaccgtcttccaagatacatgggcctcctcagggtctgggagtcccagacatgtgacaagaaatcagatgacttcactgtctaaataaaacactactacttggaggtagaacatgggagcccatgaatgtgggaagagcacactaccaggcgtgttccacccgtcacctgggctcatcatgagggtgcttaggaagcatatagttttaagggggttggaggaatagttcagaggctgagaggttgcacccacagctgagaatccctttctagtgctctatgtccttacaaattcccaggaatcatcctctactggacagttcccaaagcccttgcagaccttccttttctgtgccatcctgcgtgtgctgcccttgagctgggtgtcccccagtagacgcttccattcactgcctgtcccatgggttctgtccaaaggtggaatctgttatcaatgtggagtaatttcctccctaagggaagcctcagcctcaccagcaatggcagacacggccaggcaagaagacacaggggcagtgagatagaaagtgcacaccccagacagcctgcccacatcatcctgaggtgaccaggacaaggtggcatcagcaatcttgtgagcacagcacatgtgggagtgactttctggagtaggataagcctcattgggcttgaggcccttgtgagtgctcagggtctctcctttagaaaggcacatatttaattctccatcttgaaatttggactagggcccccacaaattgtgcagcccattctgttctggaggaaccattcttatcagaacttggtgctggattgacttggagaagagcctgaccataatcttcaggatgaaataaaggcctggatgactgaaataaagactggagccttcggcattcagaagaggaattcagactgtgcaagatctgaggccaggctccagctcccccagtcccttggtgagcaggagctccctgaacccaccatgggtctttgctagggttgtcttgcccatgtgtgctttagatagcagcacctcttcttccatggtgtatatggagaatcctcaacaaagtcttcccaagaatctgatcatcacatcttgagctcagcctccctgcagctttttctatattgacagccacttcagagagagtcctctctgatccttacaagaaatatcctggtgcgaaaaacgaccaaaaccacatagccagcctccacgctgttcagagaaagctggcttagcaatgttgtatggtttttggatgcgctgcgttactcatacatgagaagaaagtttcaagggttagcaaatagggtcacatccagcagagagcatatgactgggggctagggcaatggtgactcctcagacctcagctgctgcctgataaacatggttaacagagaagtaggagacagtgacatgaaatgggtgttcacagccttgtgttgggaattggatgagaaacaagagcttgaacttggatgttccccagagtgagcacagggtcagacgtgtttttcaagatagtcatgatcggtcttttccagggtggggcccacagtgaaaaacagtgatagattaatggttaataattaactagaggagggcactctgtcttccaattacacgttgatttgctaagtggctcagtgacaaggtaattaagatgaagaaagcaaatgtagcaggcacagcgtggggtggacagtcagctgtccgtgtcttctgctgagatggccacaggactccaggttcccctgccgtggctggccacaggactgctgcttctcctcagtgtccagccctgggctgagagtggaaaggtgttggtggtgcccattgatggcagccactggctcagcatgcgggaggtcttgcgggagctccatgccagaggccaccaggcagtggtcctcaccccagaggtgaatatgcacatcaaagaagagaactttttcaccctgacaacctatgccatttcgtggacccaggatgaatttgatcgccatgtgctgggccacactcaactgtactttgaaacagaacattttctgaagaaatttttcagaagtatggcaatgttgaacaatatgtctttggtctatcataggtcttgtgtggagctactacataatgaggccctgatcaggcacctgaatgctacttcctttgatgtggttttaacagaccccgttaacctctgcgcggcagtgctggctaagtacctgtcgattcctactgtgttttttttgaggaacattccatgtgatttagactttaagggcacacagtgtccaaacccttcctcctatattcctagattactaacaaccaattcagaccacatgacattcatgcaaagggtcaagaacatgctctaccctctggccctgtcctacatttgccatgctttttctgctccttatgcaagccttgcctctgagctttttcagagagaggtgtcagtggtggatattctcagtcatgcatctgtgtggctgttccgaggggactttgtgatggactaccccaggccaatcatgcccaacatggtcttcattgggggcatcaactgtgccaacaggaagccactatctcaggtctgtattggtgccttcatccaatcaatgttccaggcaaaacactttttaaaaaaatgtatttatttaaaattgcttccatatttacttatctttccaaatatttcatttctgcttctccttgtcataatagccttcagtgagataaactgttaaggggtctctagtagcgtatttcaggttttaaatggtcactgagaggaagaggaagtagacacgaatgtttgtaaaaggatggacaaggactggtgtgactcatagagactgttggtttgtaaaggcaccatcttcatggttgtgcatgtccttcagcttggcaggaacagggacactacgtttggaactgatccatcctggattttttgctagcatgattttcaggggaaagatgatgcaacagtaaattacaattgttgacatgataatttttagttgtcccatcttgcaaatgatagacaggtgaccacaggagacctaggcactcacatgaaatagaagtgtcagagaggttgactcagtggaagtggggcaatgaagttgggatggatgtctgtgattagagaatgacacacgaagttcagtttccagacagggatctgtgctgtcaagagattttctggtcaggatttggggtctggtgcatgatgtggggacatctcagagttcggaaggcaaagtaatggttgcatctcaaatgattcttctacttggaatgctgaaattatcaagaaatggcggaaggggctagggaggagataagactgtgaatctataagcccagtgaagctggggacagtgatgaatggacatgcgtccaagaagggaagcatttctcaggagaggctcatcacatcaccaaacccaccctactgcactccaggtttctatagtgggatctactcctttaccaaaaatttcagaggcagctttcattaatccagaatatttgggtttcgttgaaatggtactctgggacctgaatattgtttcttattccttgctgtgccatgtacatcgtgagagaatcagcctttttatgtcatattcaccgaatgtgtatgaacttccatgatttagatccttttgtattcttatttctgtgccttttttataaatgtaggtattattgcaaaagactctaagcttcatttttctttttgatcaaacgacatgatttttttatgcaatgtaattattcaattataaaatacgtgtttatttagatttgtaaaaatgttgaaaagtgggatggcatttaaatagtgactgttgcccttccagtttttctttcttttttttttttttattatactttaagttctagggtacatgtgcacaaattgcaggtttgatacataggtatacatgtgccatgttggtttcctgcacccaccaactcgtcatttacattaggtatttttcctaatgccatccctcccccagtcccccaccccacaacaggccctggcgtgtgatgttccctggcctgtgtccagtgttcttgctgttcagttcccacctatgagtgagaacatgcggtgtttggttttctgtccatgtgatagtttgctgagaatgatggtttacagctttgtccatctccctgcaaaggacatgaactcatccttttttatggctgcatagtattccatggtgtatatgtgccacattttcttaatccagtctatcattgatggacatttggattggttccaggtctttgctattgtgaatagtgccacaataaacatacgtgtgcatgtgtccttagagtagtatcatttataatcgtttgggtatatacccagtaatggtatggctgtgtcaaatggtatttctagttctaggtccttgaggaatcgccacactgtcttccacaatggttgaactaatttacactcccaccaatggtgtaaaagtgttcctatttctccacatcctctccaacatctgttgtttcctgactttttaatggtcaccattctaactggcgtgagatggtatctcattgtggttttgatttgcatttctctgatgaccagtgatgatgagcatttattcatgtgtctgttggctgcataaatgtcttcttttgagaagtgtctgttcatatcctttgcccactttttgatgaggttgtttgtttgttttttttcttgtaaatttgtttgagttctttgtagattctggatattagccctttgtcagatgggtagattgcaaaaattttctcccattctgtaggttgcctgttcactctgatggtagtttcttttgctgtggagaagctctttagtttaattagatcccatttgtctattttggcttttgttgccattgcttttggtgttttagtcatgaagtcctggcccatgcctatgtcttctaggccatgcctatgcctaaatgatattgcctaggttttcttctaggatttttatggttttaggtctaacatttgagtctttaatccatctggaattaatttttgtataaggcgtaaggaagggatcctgttccagctttctacatatggccagttttcccagcaccatttattaaataaggaatcctttccccattgcttgtttttgtcaggtttgtcaaagatcaaatggttgtagatgtgtggtgttatttctgagaccactgttctgctccattggtctatatatctgttttggtaccagcacccatgctgttttgttactgtagccttgtagtacagtttgaagtcaggtagcatgatgccaccagctttgttttttttttttttttgcttaggattgtcttggcaatgcaggctcttttttgattccatatgaactttaaagtagttttttccaattttgtgaagtcattggtagcttgatgggtttggcattgaatctataaattaccttgggcagtatggccattttcacgatattgattcttcctatccatgagcatggaatgttcttccatttgtttgtgtcttcttttatttcgttgagcagtggtttgtagttctccttgaagaggtccttcacatcccttttaagttggattcctaggtattttattctctttgtagcaattgtgaatgggagttcactcatggtttggctctgtttgtctgttattggtgtataggaatgcttgtgatttttgcacattgattttgtatcctgggactttgctgaagttgcttatcagcttaaggagactttgggctgagacaatggggttttctaaatatacaatcatgtcatctgcaaacagggactatttgacttcctcttttcctaattgaatgctctttatttctttctcttgcctgattgccctggccagaacttccaacagtatgttgagtaggagtggtgagagaggtcatccttgttttgtgccagttttcaaagggaatgcttccagttttcgcctactcagtatgatattggctgcgggtttgtcataaatagctcttattattttgagatacttccatcaatacctagtttattgccagttttaggcatgaagggatgtttaattttgttgaaggccttttctgcatctgttgaaataatcatgtggtttgtcattggttctgtttatgtgatggattacatttattgatttgcatatgttgaaccagccttgcatcccaaggatgaagccgacttgatcgatgtggataaactttttgatgtgctgctggatttggtttgcagaattttactgaggatttttgcatcgatgttcatcagggatatttgtctaaaattttctttttttgttgtgtccctgccaacctttggtatcaggatgatgctggcctcataaaatgagttagggaggattccctctttttctattgattggaatagtttcagaaggaatggtaccagctcctgtttgtacctctctggtagaattcggctgtgaggaaggggaacatcacatactggggcctgttgtggggtagggggagcggggagggatagcattaggagatatacctaatgttaaatgacgagttaatgggtgcagcacaccaacatggcacatgtatacatatgtaacaaacctgcacattgtgcacatgcaccctaaaacttaaagtataataataataataataataaaaagaatttggctgtgaatccatctggtcctggactttttttggttggtaggctattaattattgcctcaatttcagagcctgttgttggtctattcagagattcaacttcttcctgctttagtcttgggagggtgtatgtgtccaggaatttatccatttcttctagattttctagtttatttgtgtagacgtatttatagtattctctgatggtagtttgtatttctgtgggatcggtggtgatattgcctttactattttttattgcgtctatttgattcttctctcttttcttctttattagtcttgccagaggtctatcaattttcaaaatccatctcctggattcattgatttttttgaaggtttttttgtgtctctatctctttcagttctgctctgatcttagttatttcttcccttctgctagcttttgaatttgtttgctcttgcttatctagttcttttatttgtgatgttagtgtgttgattttagatctttcctgctttctcctgtggggatttaatgctataaatttccctctacacactgatttaaatgtgtcccagagattctggtatgttgtgtctttgttctcgtcggtttcaaagaacatctttatttctgccttcacttcgttatttacccagtagtcattcaggagcaggttgttcagtttccatgtagttgtgcgattttgagtgagtttcttaatccagagttctaatttgactgcactatggtctgagagacagtttgttgtgatttctattcttttacatttgctaaggagtgctttacttacaatcatatggtcagttttagaataagtgtgatgtggtgctgagaagaatgtatattctcttgacttagggtggagagttctgtagatgtctattaggtctgcttggtgcagagctgagttcaggtcctggatatccttgttaacctttggtcttgttgaactgtctaatatcgacagtgggatgttaaagtctctcattattattgtgtgggagtctaagtctctgtgtaggtctctaagaacttgctttatgaatctaggtgctcctgtattgggtgcatatatatttaggatagttagctcttgttgttgaattgctccctttaccattatgtaatggccttctttgtctcttttgatttttgttaaagtctgttttatcagagactaggattgcaacccctgctttttttttgctttccatttgtttggtagatcttcctccatccctttattttgagcctatgtgtgtctctgcatgtgagataggcctcctgaatacagcataccgatgggccttgactctttatccaatttgccagtctgtgttttttaattgcagcatttagcccatttacatttaaggtaaatattgttatgagtgaatttgatcctgtcattatggtgttatcgggttattttgcccgttaattgatgcagtttcttcacagcatcgatagtctttacaatttggcatgtttttgcagtggctggtactggtgtttctttccatgtttagtgcttcctttaggagctcttgtaaggcaggcctggtggtgacaaaatctctcagcatttgcttgtctataaaggattttatttctccttcacttatgaagcttactttggctgcatatgaatttctgggttgaaaattcttttctttaagaatgttgaatattggcccccactctcttctgtcttgtagggtttctgcagagagatctgctgttagtctgatgggcttccctttgtgggtaacccgacctttctctgtggctgcccttaacattttttccttcatttcaactttggtgaatctgacaattatgtgtcttggagttgttcttctcgaggagtatctttgtggtgttctctgtatttcctgaatttgaatgttggcctgccttgctaggtttgggaagttctcctggataatatcctgaagagtgttttccaacttgtttccattctccgcatcactttcaggtacaccagtcaaacgtagatttggtctttccacatagtcccatatttcttcaaggctttccttgtttctttttactcttttttctctaaccttgtcttctcactttatttcattaatttgatcttcagtcactgataccctttcttccagttgctctaatcagctattgaattttgtgcatgtgttatgaagttcttgtgccatggttttcagctccatcaggtcatttaaggtcttctctacagtgtttattctagttaggcattcatctaaccttttttcaaggttcaaccttccttgcaataggttcgaacatgcacttttagcttggagaggtttgttactaccaaacttctgaagcctacttctgtcaactcgtcaaagtcattctctttccagctttgctccattgctagcaaggagctgtgatcctttggaggagatgtgcttatgcgctatggtttttagaattttcagcttttctgctctagtttccccccatctttgtggttttatgtaccttaggtctttgatgttggtgacctacagatggggttttggtgtagatgtcctttttgttgatgtttatgctgttcctttctgtttgttagttttccttctaacagtcagatccctcagctgcaggtctgttggagtttgctggaggtccactccagatgctctttgctttggtatcaccagtggaggctgcagaacagcaaatattgcagaacagcaaatattgctgcctgatccttcctctggaagcttcataccagaggcgcacccacctatatgaggtgtctgttggcccctactgggaggtgtttcccagtcaagatacacagaggtcagggacccgcttgaggaggcagtctgtccattctcagagctcaaatgccatactaggagaacgagtgctctcttcagagctgtcagacagggatgtttaagtctgctgttccccacatgttcagaagttgtctgctgccttttgttcagatatgccctgcccacagaggtggagtctatagcggcagtagcccttgctgagctgcggtggactctgttcagttccagcttcctggatgctttgtttacctactcaagcctcagcaatggcggacacccctcacccagccaggctgccgcctcacagttcaatctcagactgctgcactagcagtgagcaaggctccgtgggcatgggagctgctaagccaggcaggggagagaatctccttgtctgccagtttataagaccttgggaaaagcacagtatttgggtgggagtgtcccgtttttccaggtacagtctgtcatggctccccttgtctaggaaagggaaatccctcaccctcttgcacttcctaggtgaggcgacgccctgccctgcttcggcttgccctcagtgggatgcacccactatccaaccagtcccaatgagatgaaccaggtacctcagttggaaatgcagaaatcatccatcttctgcgtcgatcatgctgggagctgcagatcggagctgttcctatttggccattggtgctgaagcttccgttctcctctccaacacctcctttttttttccttttctcttccagtttttcaatgtgaacatattctctagagttaactacattggctcaaatcttcactatcatctcagtggagcagaacaaattgggaactgtggcacaggtcactcttgctatgccccttaagaattccacattaacaaagctaattttcgagtgtggtaaagaacaggctagtgtatttagtagtgagtccattgactgtttcccaacatgaggtcacactagatttaatatggtttggctctgtgtcccccaccaaatctcatcttgaattgtaatccccataatccccacgtgttgaggacaggacatggtgggaggtccccacctcctaatctcatcatagtgagtgagttcttatgagatctgatggttttataaggggcccttatcccttcacttgcaagctattcctctttctctctttcatgtaagacgtgtctttgcctctctctcactttctgccaggattataagtttcctgaggcccctccagccacatggaactggagtcaattaaagctctttcctttataaattacccagtcttgggtatgtctttatagcagtgtgtgaatggactaatacagtaaattggtgtcatggagagtggggtactgctataaaactacttgaaaatgtggaagtgacttggaactgggtaacaggcagaggctggaacagtttggagagctcagaagacaggaagatgtgggaaagtttggaacttcctggagacttgttgaacggttttgaccaaaatgctgataatgttgtggacaatgaagtccaggctgagtctcagatagagatgaggaatctgttgagaactggagcaaaggtcactcttgctaagctttagcaaagaaactcgtggcatttttgcccctgccctagagctctttggaactacgaacttgagagagatgatctgaaattggaacttatgtttaaaagggaagcagagcataaaagtttggaaaatttgcagcctgaccatgtggtagaaaagaaaaacccattttatggggagaaattcaagccagatgcagaaatactagctaaagaaatttgaataaataaggaggaaccaaatgttaatcaccaagacaatggggaaaatggctccagggcatgtcagagacctttgcagcagaccctcccatcacaggcctggaggcctaggaaggaaaaatggtgttttaggctgggtccaggcccccactgctgtgtgcagcctcaggacttggtgccctgtgtcccagtggctccagccatggctaaaaggggccaaggtagagctcaggccattgcttcagagggtgcaaacctcaagccttggcagcatcgatgtggtgttgggcctgcgggtacacagaagataagaatttaggtttgggaacctccacataaattttagaggatgtaaggaaatgcttggatgtccaggcagacgtttgctgcatggatagagtccttatagagaacctctgctagagaagggtggtaaagaaatgtgaggttggagcccccacacagagtctccactggggcactgcctagtggagttgtgagaagaaggccacagtccttcagaacccagaagggcagatccaatagcttgcactgtgtgcctggaagagccacagacatcaatgccaccctctgaaagcagccaggacgagggctttaccctgcaaagccacagggttggagctgcctgagaccgtgggagcccatttctggcatcaccttgatctagatgtgagacatgaagtcaagggagattattttggagctttaagatttaatgactgccctgcctggttttggacttgcatggggcctatagcccctttgttttggccagtttctcccatttgaaatgggaacatttacccaatttctgtacccccattgtgtcttggaagttactaacttgtttttgattttacaggctcatgggggaagggacttgacttgtctcagatgagaccttggactatggacttttgagctagtgctgaaatgagttaagactttggaggacagttgggaaggcatgattggtttttaaatgtgaaaagacatgagatttgggatgggccagagggcagaatgatatgatttgactgtgtgtttccacccaaatctcatctcatattgtaatttccataatccccatgtgttaaggttggtacctggtgggagctgattgaatcatatcggcagttttccccatgctgttcttgtcatactaagtgagttctcatgagagctgatggttttataagggactctttctcctttactcacaagcttttcctctctgtctctcgcctgctgccatgtgagacatgcctttgcttatctctcaccttctgtcatgattgtaagtttcctgaggcctccccagtcatgtggaactgtgagtcaattaaacctctttcttttataaattacccagtctcagctgcgtctttatagcaggctgagaatagactaatacaagattggtggtgattgaagttatactgaaagggtttaaaggagagtctgagaaaaggaaatgaatctgcatttattgagaaagttgatgagaaagtggaattagaaattcctagaaaggtaagttgttgtgtgaattatttcccaaaatggggaagtctctctacctgtttggagacagaaagtggaatcagaggagaagaagatgatggacagaaaggatcattccctcttccagatgctttccagtgtgtgatgtaagctgaactaaaatcagctgtgttgaactccagccagaaaaaatgtccggcattttgttttttgggaccctaatgaaatggttacaggtctccaggtctcttggggctcacagggtcatgcctttccttgcccagtgtacttggtgagaaggtacaggtgtttccatggagggtgttcattttagggatttcaagagggtcatctttgcaccacaggaaatgcccccttttacactctgaaaaccttatcaaaccgttgtataaaagatgaatacccacataacaggctctagcactgttctgtttttgagctgagacattttaaaaggagatttttcaattctaaaaattctttaaataaaatgctcttgcagggacaacatagtaggtcaacattgttcccatctccacaaaaagttttttttttaattagctaggtgtggtagcatttctgtagtcctagctactgggaatgctgaggaggaaggatcacttgagcccaggaattcgtggttacagtaagctatgatcttgcctaggtaacagctacagagcgagaccctgtctttaaaacaaacaagcaaacagacaatcaagctttacacttctataaaagcaacactttccatttatgacagcactaatccaggatatatcaaaactgaacttgtgtttgctttcaactgttaaaactagccagagttgttacagacccactacctctgagtgacactggtatgccactctttgctgaccactgaacaatgggatttatgtacccaattgtgtagatacacaccaactcattctactctacccagagtagtgatttccaacacacaaaaccacaatgaaactgcccatgcctttctaccactttgaaactcctttcatccctgaactgctccaaaagcaaacctactcagcaaactactcagtgagtatcttcacacatgtaagttccctcgtctgatgtacaaaaaactgaactcatttttcaaaagccttaacagtctgtcttattctgatacttcttttatggttattgtatgagaatcaactacccaggcacctcggagcatgttgatttcagagttcagtgtcagaccccatgagcccctgtgggatggtgccagctgactgccatgttcctgctgtttattgcttgggtgccattacatgcagagtggactctgagggttctagagcatatccaaacccatatcacactctttgttggttaatgatgtgttcaggccatgatttttctgtaaaaaattaccagcatgctgctcttaatttttttcagcctatccagttcagttgccttttgctctcatgccttatgcaaacctttcctcagaggtgaccctagaagaagggaccctttgtgatggaaaaggtcttcatttggggcataacctgtgccaacagaaaggtactttcttgttgtgtttatggtgcctcacccaaaaaatattacagatacacttggctttcatcaacctaatttgatatgtcccaagcatagcaataggatagttctgtgtggccttatggagatcctttttttacatttccaggacccactgccaagaccagcttggtcgtggagaccctaacccagcagcgctagacgaattaaagacacacacacagaaatatagagtgtggagtgggaaatcaggggactcacagccttcagggctgagagccccaaacagagatttacccacatatttattgacagcaagcctgtgataagcatcatttctatagattatagattaactaaaagtattccttacgggaaacaaagggatgggctctggctaattatctgcagcagaaacatgtccttaaggcacagatggctcatgttattatttgtagtttaggaacaccttaagcggttttcctccctgggtgggccaggtgttccttgcccttattccagtaaactcacaaccttcagcataggcatcatggctatcatgaacacgtcacagtgctgcagagattttgtttatggccagtttaggggccagcttctggccggaattgggggcttatccccagcaacctaccatagttggagaaccacgttcaggctgaagacagtcctagtataccaccgaccaaccatgtaaccccaaggtttgtcctcagccttcagagggaacatgcttccaccgatttcagctcagtgatatgggattcaaatgtctgacctccaaaatattaagataataaatgcatgttgttttgaaccatcattaaattaagccagaagtattgatattatttgtagatttcaccactacacactaaacaataaagtcaaatgatttagagcaaaccacctggctcacactttcccaacggaaaaaggtaatgctcaaagtgctgaactgaacattctgtcctaccactagcaaataatcattgtctgcctcaggcttaagtttaataaatagcaaattgcatacagatattttacaacgattgaaagacaaacagaggtcctatccgtgtagtcccaacgataagaacaggtgttggcatgaagtgtttataaattcttgggtacagctgttctgaaagtaaagttcactttcaatcctaaaaaaagtccgctattcctccagatgtgcttaaagtcaaatgtggactggaattacttggtgtcaatgcggagtaactgctctttgctatttattatgaaggactttaactcaactctccatcttcctccacttccaccctttcttggccattctcaatgattctcttggtggtgatttttttaccatcaactatttcagtggaagtcgacatggacttgaagctgcctgtcccatcactaccgtaggacatgcagaaggaagaaaggcccccacttcccagggagccaaaggaacgaaatcctgtatcaaaagaagaaaaaacacccccaaaagctggaaattcactgaaggcagagaaaaggggtgcagacgctctgcttctgcttccccagcagttcctctgacccccccaaaatattctccagcgggtttcccaagaggtcaaaggagaatgggtcctggccgccgaagaactccctgaagacgtcggctgggtcgcggaagctgaagacgtactcgaaggggtcctcgaagggcctgccgcctgtgcagccgccctccgcccccgcctcgccatagcggtcatagatatcgcgtttcttggcgtccgacaacacctcgtaggcctcggccacctgcttgaatctcctctccgcttcctccttgttctcagggtttttgtcggggtgccacttgagcgccagcttgcggtacgccttcttgatggcctcggatgaggcctgccggggcacgtccagcacctcgtagtagtccaccatgctggatggccagaacggcccaccaggcactggcacagcgagcggcaaggctgccagcacccaggcgcaggcccgagtgctcggagacctgggccgcctggagagacgccccttatgacgcagccacatctcattggtcgaggcctatgagcgcctcgcatcccaagatgcagtgcttctgggactggccctgctctctgtgaggctctgtgaggccctgtgatgctccaagaccaggccccgcccactccggcctccaaccagccatggtctccaaaaaggatgggaaaaagaggttggggaaaagagagggccttgactttggctgcctgaagaactgtttttcttaaagtaggctttatatcagtctttttcctcggccacaggagggaagagggtggtgggagtgagtttagtctgactggggctgaagacatcctgttgtttaggactgcagttctccaacgttccagccccggtgcccatttgcttttgttcatgtggattatatctatcatacgtactgcattagagattaaaacagaattaaaaagacatattaattgggcaatttagtaagaataaacccatgacacaatagcaaatcttatttttatgtaaattttattaagacaaaatgtagtgagaagagtggcatcgttttacagtttttgcatctctctttagtacttggctctatagagaggtggattctcatgtcagcttctgtattcaatctactgtgatattacacatcacccatgtagcttctggaaaactccactgtacacttgtgagagaatgacggtgaaaaaatcaagtagcattattatggaaatagttttaactttgcaaaattctcctgaaaaattcttggggatccctaggatttcctggctcatactttgagaatcgctagtctagcagagtagtccttggtattctgaagggattagtttaggacaaccctcctctccataccaaaatctagatgctcaagctccttttataaaatgacacagtatttgtatataacctaccaatatccttctttaagcctctagtcatctcttgattacttttacctaataaatgtaaatgctatgtaaatagttgttttacagtattggttttttatttgtattatttgtattgttttttcattgctcttccccccaaatatttttaatctgctgttggctgaatctgcagatgtgaagcccaagtatatggagggtcaaatgtgcatgttattcacttttcttgactgctaaaacaaccagggagatcctctcagacaaaaggaaatacagcactatttactgtatcgaaaccattaagacttgcaggccgtgtgtatagcactggggataaacgtgggatgcagtgattatttccactagaactgctatatcatgaccatgaattttgggggaatttttttgagatctgagttctcttcacctccttattctctttttgacactggattcttttctttgataaattgtgaggcaatacactagtaaaggtcactcagttctaaggggaaaatgattaaccaaagaacattctaagatttcctatagggtattaggtctaatggggatgtgttatgtcaccagaacaaacttctaagtttatatagcctctagtgacataacctgagacccggacttggcacttggtaagcacacaatgaacagtcatagaaagctggccgagggtagagttcagtgtgaacaaagcaatttgggaacatcaaagcaagtttggagaacaacaagtgatccagaatggctggagggtaagaggcagagggagggggcaagcagaaggggtggagaggaggaatgagcttagacaggggggctggggtctatcccagagttttgagagcaaggcagaggactctgaattttcttctgtgcccaggaagctgctgaccaaggttccagaagtgttggtggggtggcgtttttcagggagcagctgaggcagtgattcagaagggacagctgggggttgggcaactgggggacaggggccctgaaatgggaccatgacagctgggtctgagagacagtggtagaaacatccagattcagcacttacttgctggcttggatgcagggtctagaacgaaaagagaagaggagtcacttctatacagaaacatgtccagagtgcttactgtctgcaaaactgtggactggcacctgagtgatagcatgattccaaagccaaaatcttgcctgtaaggaatatatgtataggatatagctatactctaatagcaaggacagatatgcaaactgctaaaagatacaaggcagaacagaacaaaacgctgtggggattcaaggaaggtggctttgtttcccttggagggccctgtagatgatctacagggcaatggacatgtttatgttgctcctttagtaacaagtcccttcattctgatttgatgaaaggagctgggagtgtgtccaatggtgacctattaacttatgtcttcagcttaaaaagaaagtaccttcaaaagggttccagaaacactttccatggacatgtcactctttagtagcccccaaagcaagaccatcatattgctgccctgctgtgtgacttcttagcccctagagcaccacaccctgtaattgcctagttgtgagtttgtctctgttcacctgacccctcctttcaggcaaggaccatttctaacttggctttctgtcccgagttcctagcatagtaggtagggctcacacattccataaatatttggtggataagggaattagcaatggattctgctttggttccaaagcagagattaattggattgcttagtagtggttttctgttgtaattcatgagcgtgaatgtggattgcctactattgcctaccactgttggggacctctcagacctcagctgcagcctgataaacgtggttaacagagaagtaggaggctgtgacatgaaatgggtttccacaggcctttgttgggaattggatgagaaacaagagcttgaacttggatgttccccagagcgagcgcagggtcagatgagtttttcaagtaggagtgatcggtctttcccgaagtgggacccataatgaaagacaatgattggttaatcggtaataattaactaggaggagagcactctatcttccaattacatgatgatttgctaagtggctcagtgacaaggtaattaagatgaagaaaacaaatgtaggaggcacagcgtggggtggacagtcagctgtccgtgtcttctgctgagatggccacaggaccccaggttcccctgctgtggctggccacaggagtgctactccttctcagtgcccagccctgggctgagagtgggaaggtgctggtggtacccattgatggcagccactggctcgcatgcgggaggccgtgcgggagctccatgccagaggccaccaggcggtggtcctcaccccagaggtgaatatgcacatcaaacaagagaaatttttcaccctgacaacctatgccatttcatggacccaggatgaatttgatcgccttgtgctgggccacactcaactgtactttgaaacagaacattttctgaagacattttctaaaagtatggcaattttgaaaaattcatctttggtctttcataggtcttgtgtggagctactgcataatgaggccctgatcaggcacctgaatgctacttccttcgatgtggttttaatagacccaatttacctctgtggggcagtgctggctaagtacctatcaattcctgctgtgttttttttgaggaacattccatgtgatttagactttaagggcacacagtgtccaaatccttcctcctatattcctaagttactaacgaccaattcagaccacatgacattcctgcaaagggtcaagaacatgctctaccctctggccctgtcctacctttgccatgctctttctgctccttatgcaagccttgcctctgagctttttcagagggaggtgtcagtggtggatcttctcagccatgcatctgtgtggctgttccgaggggactttgtgatggattaccccaggccgatcatgcccaacatggtcttcattgggggcatcaactgtgccaacaggaagccactatctcaggtcggtgttcgtgccttcatccaatcaatgttccaggcaaaacagtttttaaaaattgtatttacttacaattgcttccatatctacttatctttctggtgcttttatttctgcttgtcgtaatagccttcagtgagataaactgttaaggggtctctagtagcgtatttcaggttttaaatggtcaatgagaggaagaagaggcagacatgaatgtttatcaaaggatggactaggactgatgtgactcatggagactgttcgtttgtaaaggcaccatcttcatggttgtgcatgtccttcattgggaaggagcagggacactacattgagacttgacccatctggattttttgtttgcacaattttcaggggaaagatgatgcaacagcaaattacaattgttaatgtgataatttttagtggtcctgtcttgcgaatgatagagaggtgaccacaggagacctaagcactcgcaggaagtagaagtgttaaagaggttgactcagttcagtggaagtagagcaacgaacgtgggatatatgtctgtgattatagaattacacactgagttcagtttccagagagggatctgtgctgacaaaagatttttctggtcaggatttggggtctggtgcatgatgtggggacatctcagagttcggaaggcatagttttggttgcaggtcaattgggtcttctacttggaatgctgaaattatcaagaaattgtggaagggtctagggaggagataaaactgtgagcgtataagcccagttaagctggggacggtgatgaatggacatgtgtccaagaagggaagtgtttctcaggtgaagctgaacatatcaccaaacccaccctatcccactccaagtttctatagtgggatctacttctttaccaacaatttcaaaggcagctttctttaatccagaatatttggggttcattgatgtggtactctgggacctgaatattgtttcttattccttggtgtgccatgtatttcatgagagaattcagcctttttatgtcatattcactgaatgcatatgaacttccatgacttgatccttttgtatttttatttctgtacttctttttattaacataggtattattgccaaacactctaagcttcattttttaaaatcaaaccacatgatttttttattggtgattttctcccttatgcagtgtagttattcaattataaaatatgtgtttattagatttgtaacaatgttgaaaagtgggatggaatttaaatagtgactcttgcccttttcttccagtttttcaatgtgaacatattctctagtgttaactacattgctcaaaacttcactgtcatctcagtggagcagaacgaattgggaactgtggcacagatcactcttgctatgccccttagagaattagagaacactagcaaggctaattttcgagtgtggtaaagaacaggctaatgtattcaatagtgaggccactgactctgtctcaacatgaagtcacactagatttatcatgatttggctctgtatcccccaccaaatctcatcttgaattgtaatccccataatccccacgtgtcaaggacaggatctggtgggaggtgattggatcatgggggcagtttcgcacctgctggtctcatcatagtgagtgagttcttatgagatctgatggttttataaggggccattgtcccttcacttgcaagctcttcctctttctctctttcatgtaagacgtgtctttgcctctctctcactttctgccaggattataagtttcctgaggctcccccctccagccacctggaactgtgagtcaattaaagctctttcctttatgaattaccgagtcttgggtatgtctttatagcagtgtgagaatggactaatatattaaattggtgccatggagagtggagtactgctataaagatacttgaaaatgtggaagtgactttggaactgggtaacaggcagaggttggaacagtttggagagctcagaagaagacaggaagatgtgggaaagtttggaacttcctagagacttgttgaatggttttgaccaaaatgctgataatgttgtggacaatgaagtccaggctgagtctcagatggagatgaggaacttattgggaactggaacaaaggtcacccttgctatgctttagcaaagagactggtggcattttgcccctgccctagagatctgtggaactttgaacttcagagagatgatctgaaattggaacttatgtttaaaagggaagcagagcataaaagtttggaaaatttgcagcctgaccatgtggtagaaaagaaaaacccattttatggggagaaattcaaaccagctacagaaatactggctatagaaatttgcataagtaaggaggagccaaatgttaattgccaagacaatggggaaaatggcttcagtgcacatcagagacctttgcagcagaccctcccatcacaggcctggaggcctaggaaggaaaaattgttttgtgggctgggtccatgctccccctgctgtgtgcagcctcaggacttggtgccctgtgtcccagtggctccagccatggctaaaagaggccaaggtagagctcaggccattgcttcagagggtgcaaacctcaagccttggcagcatcgatgtggtgttgggcctgtgggtacacagaagataagaatttaggtttgggaacctccacataaatttgagaggatgtaaggaaatgcttggatgtccaggcagaagtttgctgcatggatggagcccttatagagaacctctgctagagaagggtggtaaagaaatgtgaggttggagcccccacacagagtctccactggggcactgcctagtggagttgtgagaaggcggccaccatcctccagaatcccaaatagtagatccaatagcttgcactgtgtgcctggaaaagacacagacactcaatgccagcctctgaaggcagccaggaggagggctttgccctgcaagccacagtgtccaagttgcctgagactgtgggagcccacttctggcatcagcatgacctagatatgagacatgaagttaaaggtgataattttggagctttaagatttaatgactgccctgcctggttttggacttgcatggggcctgtagccccctttttttggccagtttctcccatttggaatgggaatatttacccaatttctgtacccccattgtgtcttggaagttacttttgattttacaggctcatgggggaagggacttgccttgtctcagataagactttggactatggacttttgagctagtgctgaaatgagttaagactttggaagattgttgggaaggcacgattggttttgaaatgtgaaaagacatgagatttgggaggggccagagggcagaatgatatggtttgactctgtgtttccacccaaatctcatctcaaattgtaatctccataattcccatgtgttaaggatgggacctggtgggaggtgattggatcatgtgtgcagtttcccccttgctgttctcatcctactgagtgagttctaatgagagctgatggttttataaggggctcttcctccttcactcacaagtgaactcttcctctctgtttctctcttgcttgctgccatgtgagacatgactttgcttatctctcaccttctgtcatgattgtaagtttcctgaggcctccccagccatgtggaactgagtcatttaaacctttgtcttttataaattaccccgtcttgggtatgtctttatagcagtgtgagaacagactaatacaagattggtggtgattgaagttatactgaaagggtttaaaggagagtctgagaaaaggaaatgaatctgcatttattgagaaagttgatgagaaagtggaattagaaattcctagaaaggtaagctgttgtgtgaatgatttcccgagatggggaagtctctctacctgtttggagacagaaagtagaatcagaggagaagaagatgatggacagaaaggatcattccctcttctagatgctttctagtgtgtgatgtaagctgaattaaaatcagctgtgttgaactccagccagaaaaaatatctggcattttggttttttggaccctactgtgatggtcacaggactccaggtctcttggggctcacagggtcatgcctttccttgcccggtgtgcttggtgagaaggaacaagtgtttccatggaggaaattcattttaggggtctcaagagggtcatctttgcaacagaggaaatgcccctttttccattctgaaaacctgatttatcgaacccttttataaaagatgaatacccacatataggcctctagcagtgttatgtttttgagatgagacattttaaaaagcgatttttcaattctaaaaattctttaaataaaatgctcttgctgggacaacatagtgggtcaacatcattcccatctctacaagattttttttaaaaaaacattagctaggtgtggtagctgttgtcttagttactgggaatgctgaggaggaaggatcacttgagcccagaaattcatgtttactagtggggtatgatcttgcctaggcaacagctacagagagagaccctgtctctaaaacaaacaaacaaacaaacaaacaataaccaaacaagctttacacttctgtagaaggaacacttcccatttatgacatcagtaatctaggatatatcaaaatttgaactttgtgttagctttcaactgttaaaactagccagcgttgttacagatccacctctgagtgacactggtatgccactctttgctgaccactgaacaatgggatttatgtaaccaattgtgtagatacaaacccactcattctatcctacccagagtggtgatttacaacacaaaaaactaccatgaaactgttcccatgccttcctcccacctcaaaactccttttattcctgaacggctccataagcaaacccatccccagcaaactactcagtgagtatcttcacacatgtaagttcccttatccggatcactaaaaaatgaactcatttttcaaaagccctgacagtctgtcttattttgatacttcttgtatagttattatttaagaagcaactacccaggcaccttggagcatgttgatttcagagttcagtgtgagaccccgtgtgcccctgtgggatggtgccagctgactgccattttcctgctgtttattacttgggtgccattccatgcagattggactctgagggtactagagcatatccaaacccattgtcacagtatttgttggttaatgatgtgttcaggccatgatttttctgtaaaaaattaccagcatgctgctcttaatttttttcagcctgtctagttgttgcccttttgctctcatgcaaacttttcctcagaggtgaccctagaagatgggaccctttgtgatggactaccccaaggcaatatgccccaaaaggtcttcatttggggcataacccgtgccaacacaaaggtactttctcaattgtgtgtatggtgcctcacccaaacaatattacagatgcacttggctttcatcaacctaatttgatatgccccaagcacagcaataggacagttttgcgtggccctttggaaacgcttttctttacatttccaggacctaccatagttggagaaccacgttagggctgaagacagtcctagtatatcattgaccaaccacataaccccaaggtctgtcctcagccttcagaaggaacatgcttcttacaccgatttcagctcagtgatatgggattcaaatgtatgacctccaaaatattaagagaataacgtgtgttgttttaagccaccaagtttgggtaatttgttacagccatgataggaaacgaatgcatccactttgccaggtttacctgcttttataaagcctgggtttaaccttttatctaaataatggtcaactcttcctacatcacgagcatttatgtgcaattaaaagccatcattaaattaagccagagtattaatatattcatagatttcaccaccacacagtaaaacattgaagtcaaatgatttagagcaaaccacctggctcacactttcccaacggaaaaaggtaaggctcaaagtgctgagatgaacattctgtcctagcactaggaaataatcattgtctgcctcaggcttaagtttaataaatagcaaattgcatacagatatttacaatgatcgaaagacaaacagaggtcctatccgtgcagtcccaacaataaagacaggcattggcataaagtgtttataaattcttgggtacagctgttctgaaagtaaagttcactttcaatcctaaaaaaagtccgctattcctccagatgtgcttaaaggcaaatgtggactggaattacttggtgtcaatggggagcaactgctctatgccgtttattatgaaggactttaactcaactctccatcttcctccacttccaccctttcttggccattctcaatgattctcttggtggtgatttttttaccatcaactatttcagtggaagtcgacatggacttgaagctgcctgtcccatcactaccgtaggacatgcagaaggaagaaaggcccccacttcccagggagccaaaggaacgaaatcctgtatcaaaagaagaaaaaccaccctcaaaagctggaaattcactgaaggcagagaaaaggggtgcagaccctctgcttctgcttcccagggagttcctctgaccccccaaaatattctccagcgggtttcccaagaggtcaaaggagaatgggtcccggccgccaaagaactccctgaagacctcggcggggtcacggaagctgaagacctactcgaaggggtccttgaagggcctgccgcctgcgcagccgccctccgccctcgcctcgccatagcggtcatagatatcgcgtttctacgcgtccgacaacacctcgtaggcctcagccacctgcttgaatcttctcaccgcttcctccctgtcctcggggtttttgtcggggtgccacttgagcgccagcttgcggtacgccttcttgataccctcggacgaggcctaccggggtactcccagcacctcgtagtagtccactatgctggactgccaaagagcctgcggggcactggcacagcgagcggcaaggctgccagcacccgcgcacaggtcagaggcttggcgacctgggccgcctggagggccgccccttatgacgcagccacatctcattggccgaggcctgtgagcgcctcgcatcccaagatgcagtgctcctgggactggccctgctctctgtgaggctctgtgaggccctgtgatgctccaagaccaggccccgcccactccggcctccaaccagccatggtctccaaaaaggatgggaaaaagaggttggggaaaagagagggccttgactttggctgcctgaagaactgtttttcttaaagtaggctttatatcagtctttttcctcggccacaggagggaagagggtggtgggagtgagtttagtctgaccggggctgaagacatcctgttgtttaggactgcggttctccaacgttccagccccggtgcccatttgcttttgttcatctggattatgcctatcatatgtactgcattagagattaaaacagaattaaaaagacatattcattgggcaatttaagaagaataaacccatgacacactaacaaacctttttatgtaactttttttgagacaaaatgtagtgagaagagtggcatcgttttacagtttttgcatctctctctttagtacttggctctatagagaggtggattctcatgtcagcttctgcattctatctattgtgatattacacatcccccatgtagcttctggaaaactccactgtacacttgtgggagaatgacaatgagaaaatcaagtaacattattacggaaatagttttgactttgtaaaattctcctgaaaaattactggggatccctaggatttcctggctcatactttgagaatcgctagtctagcagagtagtccctggtattctgaagggattagtttaggacaaccctccttccccataccaaaatctagatgctcaagctccttttataaaatgacacagtatttgtatataacctacccatatcctcctttaaacctctagtcatctcttgattacttttacctaataaatgtaaatgctatgtaaatagttgttttacagtattggttttttatttgtattatttgtactgtttttttttcattgttgttccccccaaatattttcaatctgctgttggctgaatctgcagatgtgaagcccaagtatatggagggtcaaatgtgcatgttattcacttttcttgactgctaaaacaaccagggagatcctctcagacaaaaggaaatacagcactatttactgtatcgaaaccattaagacttgcaggccgtgtgtatagcactggggataaacatgggatgcagtgattatttccgctagaactgctatataatgacgatgaattttggggggactttttttgagatctgagttctcttcacctcctccttattctctttttgacactggattctttgctttgataaattgtggggcaatacactagtaaaggtcactcaattccaaggggaaaatgattaaccaaagaacattctaacggttcataaagggtattaggtgtaatgaggatgtgttatctcaccagaacaaacttctgagtttatataacctctagttacataacctgaaacccggacttggcacttggtaagcacgcaatgaacagtcatagtaagctggccaagggtagagttcagtttgaacaaagcaatttgagaacatcaaaggaagtttggggaacagcaagggatccagaatggctagagggtaagaggcagagggagggggcaagcagaagggctagagaggaggaatgagcttggacaggtgggctggggtctatcccagagttttgagagcaaggcagaggactctgaattttctgtgcccaggaagctgctgaccaaggttccagaagtggtggtgaggtggggttattcaggtggcagccgatgcaatgattcagaagggacagctgggggttgggggacaggggggctggggccctgaaatgggaccatgacagctgggtctgagagacagtggtagaaacatccagattcagcacttacttgctggcttggatgcagggtctagaacgaaaagagaagaaaagtcacttctatacagaaacatgtccagagcgcttactgtctccaaaaccatggactggcacctgagtgatagcatgattccaaagccaaaatcttgcctgtaaggaatatatatatatatatatatatatatgtatatatgatatagctatagtctaatagcaaggacagatatgcaaactgctaaaagatacaaggcagaacagaacaaaatgctgtttttctgggattttggaaattcaaggaattcaagggattcaaggaaggtggctttgcttcccgggagggtcctgtagatgatctacagggcactggacatgtttatgttgctcctttagtaataagcctgtcattctgatttgatgaaaggagatgaaaggagctggtagtgtgtctgatggtggcctactaacttatgtcttcagcttaaaaagaaagtagcttcaaaagggttccagaaacactttccatggacgtgtcactctttagcagcccccaaagcaagaccatcatattgctgccctgctgtgtgatttctcagcccctagagcaccatcccctgtaattgcctggtcatgagtttgtctctgtctacctgacccctcctttcaggcaaggaccatttctaacttgactttctgggcctagttcctagcatagtgactgccatccagtagggctcacacgttccataaatatttggcagatgagggaattagcaatgggttctgctttggtttcagagcagatattaattggattgcttagtagtggttctctgttgtaattcatgagcatgaatgtggattgcccactattcagattagtaagtatttcttggtcaagggcagagctgtggccacaaaccatccaggtacacagcagaagcagcctcaaaaagcttggaagctctgcatgatgcaggaaagtcataaaatcattacagtggtgacttatgtgtttatagcccctttactgtctataatctgcaaatgaactcacacagcattgggactttggaagaattatcacccttaaggtttaaattaaactgtgaatttcagaatttctaataaggacacaacaaagagtgaaagcattgctatgtctattctgcttgcccagaatcttggtcctaaaaaatgaagagtgtttgggtgtggggaggagcttcagtgtgcatgtgcatgcaaagtacctactctaaggagaagaatgagagggtaccctaattacctgttaatatgtcccataggacaccaaaactctagttagctgtttctctatgatcctctaagcacatccccaagtatggctggccagtgatgtgtatggttcaaatgttgggatctgtgcagttatcttggaattgtatagtacagcagtatatcccccccaaaaagagtgtaatacttccaattctggctgcacaatacttgccccatagtccatggtcaataaatacaaatttgagttgtttttgctcatctttcccttttgacttcaaatcagtcatcagaatttccccaaatgcctttcccctggatcttgggccagtggaatgagtacaatttaacttaattgaatttgcttatctatttggtttcctgttgtgaacaaaagttctctgaaaaggaatttggaagaaagagactttgttctagtgaacagtttgcaaaccagggagttacagcctctggtacgcaatgaaggtgagttccacagaacacaaggcaggcaggtttcacggcaaaaagttccttcccaggttcccaatcaggtccatttatgcaaatgaaggatggaaacttgcttagttcttattggtcactgcagctgcattctgattggttgatgaagctgagccctgagtggctgaggtgggtgagctttaattggttggttcaggtgagcgctgaaaatctcaactataaaaaggtacaggttttcaggatactcagagtaaccgtgtgacctgtagtaagcaaagggccagttggctctattttaaatccaggcccagttagccactcaagatctatcttacaggactggctctttcaggttcacactaataaaggcctgtccttggggaagacttctgttcacatgcgctccagtgaatttccctttctggtcattctctaccccagcacgccccccacccccgacccgccccacccacccacctgttcatttccttcttagcatgcttcacgatttctaagttcctgctcatgtgtttaaattgtgagtctggctcacctcatggcgcgtgctcgtgtggtgggctctgctgcagcctcaagaccccacactgtgctggactcaataaatattgttggacgaaggaatgaaacacatgatacaagtgagcaggcagtaccgggggagctgtggagtgggcactcttacaggtttccatggcgaaagcgggggtacagttgtgttcttttctttctaaaaggctttctaaaaagccttctgtttaatttctggaaaagaagcctaacttgttcactacatagtcgtccttcttcctctctggtaacacttgttggtctgtggaaatactaatttaatggatcctgaggttctggaagtactttgctgtgttcactcaagaatgtgatttgagtatgaaattccagccagttcaactgttgttgcctattaagaaacctaataaagctccaccttctttatctctgaaagtgaactccctgctacctttgtggactgacagctttttatagtcacgtgacacagtcaaacattaacttggtgtatcgattggtttttgccatatatatatatataagtaggagagggcgaacctctggcaggagcaaaggcgccatggctgtggagtcccagggcggacgcccacttgtcctgggcctgctgctgtgtgtgctgggcccagtggtgtcccatgctgggaagatactgttgatcccagtggatggcagccactggctgagcatgcttggggccatccagcagctgcagcagaggggacatgaaatagttgtcctagcacctgacgcctcgttgtacatcagagacggagcattttacaccttgaagacgtaccctgtgccattccaaagggaggatgtgaaagagtcttttgttagtctcgggcataatgtttttgagaatgattctttcctgcagcgtgtgatcaaaacatacaagaaaataaaaaaggactctgctatgcttttgtctggctgttcccacttactgcacaacaaggagctcatggcctccctggcagaaagcagctttgatgtcatgctgacggaccctttccttccttgcagccccatcgtggcccagtacctgtctctgcccactgtattcttcttgcatgcactgccatgcagcctggaatttgaggctacccagtgccccaacccattctcctacgtgcccaggcctctctcctctcattcagatcacatgaccttcctgcagcgggtgaagaacatgctcattgccttttcacagaactttctgtgcgacgtggtttattccccgtatgcaacccttgcctcagaattccttcagagagaggtgactgtccaggacctattgagctctgcatctgtctggctgtttagaagtgactttgtgaaggattaccctaggcccatcatgcccaatatggtttttgttggtggaatcaactgccttcaccaaaatccactatcccaggtgtgtattggagtgggacttttacatgcgtatattctttcagatgtattactttggatcgattaactagccccagatatatgctgagcaagcattctgagataatttaaaatgccctcttttgttaatttttgactcctaggtttgagtctgtctttggcatcatcttctggatgatttcttggtatctgagatttcgggaaagcattccttggacattttactctgtgtgctccagtggatagtaatcaattagaaacaacaagctgttaaatgccataggcacagaatgctgggtttggggcaccctgcagaaaactcagttgaagcctgcaccttgccctggattcagtcaggcaggcaatgttcaggactgatgaaatcattctttgatgatgatagatcctggaaatgaaagttgcctttgtgaccctggttaaagctccagtttctaaatattctgataagaagctaaatcctgcagtccgttctcttctaatgagtgaatcaccagacagtcaggttctgacatgatacagaaaggttgtaggtttcattctcaagctattaggtttatttttcccctacagagtttgaagtatgcaaaaagtagcattcacatcctcatcgaaatctcagcagaggatagaaaagaacaggagaggctccttcagatggagcgttagggaattactctttgaggaggtgacatttcagagagcgttcattcacttatcctgcaaagattggctgaggatctactggcagcccaggcacttcccaggtgctgcgtctggctcccattaaggggactgatatcaccttcggaggtgaccttatttccactatacctccaatgtgatttgtattttattttttttaattttctgtgcattttccttcatagcacatcaaatatggcagccatttcacttagatagttgttgattgtccgcttcacatcatgagccatgtggggacctgtgtgactttgcattaatcacatccactgtatgcggcgtcctcaacacctgccaatgggtctgcatgtatttggcgccccataaatctcagcacctaaggcacagaataggcacccaccgaatatgtgttacattaatgaatgagaagaaaggtgccaaccgaggtctagttaatgggtcgagagtaatccacaatagctctttttagttctttgtactccagctattacataccaatatgtatatagaaacatatgtaaaattttttggttgctttttctacaaaatagagtaacagtgtattcccactgcccacttaccgataatgtcatggatatcactccagttttaaatgctattactttttaaactatgaaatagtatttcatggtacttgtgtaccacagtgtattctgctggagatctagtctagttccccacagaggaacattacaatttgtattccaggagttttgttgttgtgacctcaaacacttcctttaaaaagataagctattttgtagtttaaaaaacatttgttctgtttctttctcattcatcttttcttaagtattttacacggttttttttttttggtcactactgtgaatgtgttatttttttgcatttctatctctagctgattatctactcattactcagctatctcatcaaaatattgattttcataataaaaaataataggcagtcatttgctgataaagaaattttggtttcttctcttataaattccatgccaaatatcagggctattgaatttattagaatctctaaaaacagttgaataattctggcaataggaaagatgcccgtcttgctgctattttagtggaaattgattatcatttcattattttgcattatgttagccattgttttctgaacaggctttattgatttagataatttccttctttgcgtgaggatgtttgtaggagaggcaccgaactttatcagctgcctttctggcatttattgatataaccataaaagtctaagtggtgaactgtgttgactacatatttgttgttgccttgtttggtgcagtcaggcttaggtgtgaaaatatgtttttaaattgtaccttttagtaacctgttttgtcttgttgcatgttttaatctgaaattccactttttggatattaatattaccacttctgtattatttttgtttacatttccctagcacatctttagtactcctttgtcttcaagctttcttcctttttaaacaacatggcactggtatttttaatccagtcaggcagttgctttaataagtgcattttgcctatttgaatctaacaattaatagatttgattgtaactctctcagtttactttatgtttagttgactttgccattctcctttttccggatttctactggttggtcaagttactgttcttattttctctttcttcctttgttaactaaaaatgccactctgcactaccattcctcttgtgttgatggtcctattctcaatactcttgataaaactcctgaactttaagaataaagataaaacttttattgcacaaagaagtccatagagaaagcacaacctggcattggcgtgtctttggtgtgtctgaaggaaaagagatagtggaacaacattgggagaaaaggaatgaaactcaagaattccaagatgttcctcccctgccagggtaagatagcagtggttcacagacaatcgcaatgctgggtctgagaaaaataactaaacagaagattagtgaggaccaaggcttcgagatggccaggagaggaaagcttgggagcagggaaggttgagatatatgtgggttactgggaatgcgtgatggtgaagtcacagatgacccacatggtgtctaagtgctaaagaagaattctgggaaaatgaaatgcatttgggaagggaaaatctaattaaaagcctaaactaaaaatacaaaattcttggtaaagtttaggagttatgttaaatgtctcattttggctggtgaagtctcatcagaacagggaaattctctcattcaggggcatctcatcttttctttgaagggaatcaatggtgggggattggagtgttattttcagttaatatgttgcttcactctttggtcattccggtaactgtgaagtcagggtgaagtttaagggaagctttgccaagtaggggatggacttcacctttattgagcctcatagtagctggctcaggtaggagttggccgtgatgacaacttctctgcagtttgccctgcgtgaatctccagatgaacttttgtgccatttaaactttcgtgatctcctgctatttaacttcgaatgtttatggacctgtgggttcaattttgtgtgaatcacatcctgctgattgctgagtgggcgtgtgggagggtgtgcctggaggagaacttagactcggccttttccagatgagcttcagtgtaagagtgggtttcatgaagagcaaaggtcctaggaaatttaagtaagccatttaccaacgctcagaagaaagaacttgaagagcacttggaaatgagctgtgtctccccaagaaagagggagagaaagaggggagagatgtggtgcagaccctagggaggaaggagttcagaaaaaccatcctcagggtgttcttgctacaaaccaaaaaatgcagcatggtggtggggaggatgactctgtcctccctgacttttagatgagcccaagggaaaaggcaaagacaaagcccttaagagccagaggactcacgagggcctggggctggtgagagtggcggggagagagggctcaccttgggagaaggatggtcagtgtctggggctttcctggtcatgttccaaatcaggcttggcaggagtcctgctgtgcaaattgcgtttgctgagccctgtcagaggtctcctgtgtctcacatctagggtgaccagcatcctggcttcctcaggactgttcaggttttagcactgaacatcacatgtcctagggaacccctcagtttgggcaagccctgccacatcacacaatcatattagtgccctcagtattctttgcaaacataaaaccatagactcagtaatcccattactgggtatatacccaaagaaatataaattattctactataaagacacatgcacatatttgtttattgcagcactattcacaataacaaagtcatggaaccaacccagatgcccatcaatggtagattggataaagaaaatgtggtacatatacaccatggaatactatgcagccataacaaggaatgagatcatattctttgcaaggacatggatgaagctggaagccatcatcctccacaaactaacacaggaacagaaaatcaaacaccgcatgttctcactcataagtgggagttgaacagtgagaatgcgtagacgcagggaggggaacaacacacaccagggcttgtggcggggtgaggggtgaggggaggaacttagaggataggtcaataggtgcagcaaaccaccatggcatatgtatcccagaacttcaagtaaataataataataataattaataataataataataataaataaacccataaagccatttgagagattcttgggggattcattggaccactgaaaatctacagtgagaaaagaattgccatgttgatgaaacaggaaaactttccttgtccccctcacagagcatgtgacagcgggaggggctcactttctcagtgcgccactgctcaaacctctaggggagcatacagacgggcaggttgtggggctctgacctcaccggcagtgtctagaggtggatgtttacagctcctgaagctccagtgggcgtgggttatggccttcttttagttttgccctctatagtcagcttgtgttaaccagctcaattacaccctctaccttgtcgcaaggacagagggctttctgtatcctgggggcttgccttggtgtaccagaagaatcgaatcccacctgggcttggagaatgagtgcaaggatttattgagtggatgtagctctcagcagatgggggaagccagaaggggatggaatgggaagggtttcccctggagtcagaccgctcagtggcccgggctcggtggcccgggctcggtggcctgggctctcctccgactgcctcagccaaactccgcgttgttctgctggtcagtggcctgccggtgcctgttggtgagttcttctcaatgtccagctgtccttgcgtccctccgctgatgtgctcctcccgatgtccagctacctgtgtgtctgcctgctagggtcttggggtttttataggcacatgatgggggcgtggcaggccagggtggttttgggaaatgaaacatttaggcaggaaaacaaaaatgcctgtcctcacctaggtccatgggcacaggtctgggggtggagccctcgccagggaccacaccctcttctacccagcacttcccttccctacttccatatcatttaaagggaccacgcccttcccagctcttcccttctgtatcactgatgccttgctctgtgttctctaagtggaattatcactgtgtgtatgtacaggtgtgtgcatgtgtgtgcatgtacctgtgcttttcttttggaaaactagcacattacctggattttgcatctcaaggataattctgtaagcaggaacccttcctcctttagaaggaagtaaaggagaggaaaatgctgtaaaacttacatattaataattttttactctatctcaaacacgcatgcctttaatcatagtcttaagaggaagatatctaattcataacttactgtatgtagtcatcaaagaatatgagaaaaaattaactgaaaatttttcttctggctctaggaatttgaagcctacattaatgcttctggagaacatggaattgtggttttctctttgggatcaatggtctcagaaattccagagaagaaagctatggcaattgctgatgctttgggcaaaatccctcagacagtaagaagattctataccatggcctcatatctattttcacaggagcgctaatcccagacttccagcttccagattaattctcttaattggaaccttagatttggcttttccctgccacttcccaactattaatccaaaggttttttttgttgttgtggttgttgtcattgttttcaatttgactctcaaatactctattaaactatgatccaccacactcagaagtatcattttctctaagagactcaaaagtgtattagggagaatttatttaaaaataaaataaatgggatattgtttcttcatattaaatagaagtatttctccaaaaagctgttggttagaacactgaatttatgtcttacatttctgctcttatagttctgcatccacttgtttcattaagcaaactttcccttaaagtgcaggaaagtgaaaaaatcctaagtgcacagcttgataaattatcacaaattcacgtagtgcatacacccttgtaactaaacctccaaaacaagatgccggaagttgccagtcctcagaagccttcacagttactgatcctcccactctgttaaagactgttccttcagaggacccctgttttctagttagtatagcagatttgttttctaatcatattatgttctttctttacgttctgctctttttgcccctcccaggtcctgtggcggtacactggaacccgaccatcgaatcttgcgaacaacacgatacttgttaagtggctaccccaaaacgatctgcttggtatgttgggcggattggatgtataggtcaaaccagggtcaaattaagaaaatggcttaagcacagctattctaaaggattgttgagcttgaaaatattatggccaacatatcctacattgctttttatctagtggggtatctcaacccacattttcttctgcaaatttctgcaagggcatgtgagtaacactgagtctttggagtgttttcagaacctagatgtgtccagctgtgaaactcagagatgtaactgctgacatcctccctattttgcatctcaggtcacccgatgacccgtgcctttatcacccatgctggttcccatggtgtttatgaaagcatatgcaatggcgttcccatggtgatgatgcccttgtttggtgatcagatggacaatgcaaagcgcatggagactaagggagctggagtgaccctgaatgttctggaaatgacttctgaagatttagaaaatgctctaaaagcagtcatcaatgacaaaaggtaagaaagaagatacagaagaatactttggtcatggcattcatgataaaattgtttcaaatatgaaaacatttacgtagcatttaatagcgttgtttcaaatataaaaacaaatacataaaaatctggatttttatttcttcttttttttttttttttttttttgagatggagtcttgctctgtcacctaggctggagtgcagtggtgcaatcttggcttactgcaacctccacctcccacgttcaagcagttctgcctcagcctccgtgtagctgggattacaggtgtccaccaccacgcccggttaatttttgtattttttagtagagaaagggtttcaccatgtttgtcaggctggtcttgaactcctgacttcaggtgatccacctgcctcggcctgccaaagtgctgagattacaggcatgagccagcgcgtctgacctggatttataaataagataatttagaggttattattcactttataaaaggattctttagtttctatataatttatcatataatttatttagaattttatttcccccattagatttaaaactccaatttacataaaaagttgccataatagacatctgatccataagtttcctgcacagaaagaaatactccattataagaagcatagtatctttaagagaaaaacaactcaaatgcttagaagtacagctttttgcagcactggaacctgtgagaaattttgtccatggagtttatgaatgaaggagctataagatatcacagacaaagtcttagaataagagcaaaggaaaatttgctcaaatgtggccctgaaaacgattcaaagggcaaatgatttctggattaaagttagtatattactgtcaagctcactggtaataggcttattagaaccttatgggaagaagtggtggccagtggtagatttcatccgacaatagatactgtgtgcatatgtgcgtgtgcgtttgtgcatgtggctgtgctcatgtgtgggtgcacacgtgtgcattcatatgcgtgtgtgtgtgtgtgcgtgtgtttatgagagtgtccattgctttctcccatggttacctcctttagaaagaagcagcagtcaggaagacagatgtgaagagctggagcatgttcagatgagaggagacggaacacggggacacaccagcttgagcaagggacaacaggggaggactgatgactgacttcccacctttgaggtgctaatgtgtgtgtggtggcactggataaaagatcaatgttggctaggcaccatggcacacgcctgtagtcccagccactctggaggctaaggcgggaggattgcttgagcccagaagttggaggctgctatgagccgtgatcatgccactgcactccagcaacctgggcaacagagtgagaccctgtctcaaaaaaaaaaaaaaaaatgaaaagtccacataacctgagcatcatgtgcccagagcgttgggtggtgtggtcccattccttccttccagcggcttcttctggccacctcaatgtcaggatgtcctgctcacatatcaataccattaaaacctgacttctttccctgcactgttgaagctccttcttgaggctcacattatggatataattttgattctttcttcagtggtatagataactacttgtaacctaagaacaacttggtgaaagtcctctaatacattattttttaaaaaaacacaaatcaatgagctcaacttattaactaactttcatctattcatttttgagccatccctgtctgattgtgaatctccatgattccaacactctgagctggggatagtgcctacacaaaataaaaagaagtggaaaattttcaaacatcagtttatgctgacaaccaggccataataggtgctcaattactattgaatgaatgaatgaaagttctggccaggtacggtggctcatgcctgtagtcccaacactttgggaggccgaggcaggtggatcacttgaggttaggagttcgaaaccaacctgaccaacatgaagaaaccttatctctaccaaaaaaatataaaaaaattacccaggcatggtggtgtatgcctgtaatcccagctatttgggaggctgaggcaggaaaatcacttgaacctgagaggcggaggttgcagtgagctgagattgtgccactccactccagcctgggcgacagagtgagactccgtcttacttaaaaaaaaaaaaaagaaggttccaagaaaattcatcttaaggtttatgtaaaaggaagatgatatttaacatgattcatggccaagtactaatattacattataataatgtttccaaataacattatagatatgtttaaagacagtgtattaggctgttcttgcattgctgtaaagaaatacccaagactgggtaatttataaagaaaagaggtttcattggctcgtgtttctgcaggctgtacaggaagcttagtgctgacatcacttggctgccgggggaacctcagggagcttttactcatggcagaaggcaatgcgggagcttgcatgtcacatggcaaaagcaggagcgagagagagttgggggggaaggtgccacacactttttaatgaccggctctcacaataactcatgaaaactcactatcaggaagacagcactaaagcacaagggatccgaccccatgatccaaacacctcccaccaggccccatctccagcactggggattacaattcaacatgagatctgagtgtggacaaatatccaaactgtatcagtcaacagcgatcataattagtcctgaataggagtgcctttttttttctttcttctcccttttcttttctacttcctcctccttttccctctcctcttcaatctcctcttcattcctgtagcaccaagggttgaagcacctaacccgttttggattgagatgttctgattgggcaatgaacactgtccagaataaacagaaatccattttgcactaagtggctgcacagaccctgcctcatgctaaatctagcacccagatagtttaatgtttcaatgactgaattacaaatatatcatcaccttggatttggcacttacaaatggctgttaatttggccagaggtggttgtttacaacttcaaataggagactattcataatttctgacgtgacattttcctttctttattttactgtatgaaaatataatgaaatttctcacaaaatatcactaaaaagaaaagaagaagagtaggaagcaaggttaaaatatttctaaaatataattttggtctttctttttctcccttccttcctccgtccctctctcctttcctctctccctccctccctccctcccttcctcctttccttgcttccttccctccttctcttccttctttttcaagagatcaataacatttattaagaataagtttcttaattataacctttcaggtgataatagtaacacagcctgggcaacacaataagaccttgtttctacaaaaaatttaaaaattggccagacatagtggtgcatgactaattccagctactctggaggctgaggcaggaggatggcttgagcccaggagttggaggctgcagttagccatgcttgtgccactacactccagcccgggcaacagggcaagactctgtatctaaaaacaacaacaacaacaataatagaaacaggtttcctttcccaagtttggaaaatctggtagtcttcttaagcagccatgagcataaagagaggattgttcataccacaggtgttccaggcataacgaaactgtctttgtgtttagttacaaggagaacatcatgcgcctctccagccttcacaaggaccgcccggtggagccgctggacctggccgtgttctgggtggagtttgtgatgaggcacaagggcgcgccacacctgcgccccgcagcccacgacctcacctggtaccagtaccattccttggacgtgattggtttcctcttggccgtcgtgctgacagtggccttcatcacctttaaatgttgtgcttatggctaccggaaatgcttggggaaaaaagggcgagttaagaaagcccacaaatccaagacccattgagaagtgggtgggaaataaggtaaaattttgaaccattccctagtcatttccaaacttgaaaacagaatcagtgttaaattcattttattcttattaaggaaatactttgcataaattaatcagccccagagtgctttaaaaaattctcttaaataaaaataatagactcgctagtcagtaaagatatttgaatatgtatcgtgccccctctggtgtctttgatcaggatgacatgtgccatttttcagaggacgtgcagacaggctggcattctagattacttttcttactctgaaacatggcctgtttgggagtgcgggattcaaaggtggtcccacggctgcccctactgcaaatggcagttttaatcttatcttttggcttctgcagatggttgcaattgatccttaaccaataatggtcagtcctcatctctgtcgtgcttcataggtgccaccttgtgtgtttaaagaagggaagctttgtacctttagagtgtaggtgaaatgaatgaatggcttggagtgcactgagaacagcatatgatttcttgctttggggaaaaagaatgatgctatgaaattggtgggtggtgtatttgagaagataatcattgcttatgtcaaatggagctgaatttgataaaaacccaaaatacagctatgaagtgctgggcaagtttactttttttctgatgtttcctacaactaaaaataaattaataaatttatataaat

SEQ ID NO: 49 - DNA, 2358 bp, Homo sapiens; identical to SEQ ID NO: 26

SEQ ID NO: 50 - DNA, 40085 bp, Homo sapiens
atggggatttaaaagtaaatttcttccagaagtgtagattcttagatccagattgtgaggaggggaggagagaggtataggtgagccgggggcggaagtgggggcaggatcatcttaaggaaggagaccactactactactgctgccctcctcccaccaccttgcctcgttcacaagacaggaggagagaaaaagcaaaaagttggaaaaaaaaaaaaaaaaagtaagataaatagccagacaaccttggcaccaccacccggccctaggagttaaaaaaagtaataataataacatcaacccctgacctaaactacttgtgttatctgtgaattcctgacactgtatgaaaaaagcattgtagcccccagtcacgtttcccactcttgtttgatgtatcacgaccctttcacgtggaccccttaaagttgtaagcctttaaaaaggccaagaatttctttttcggggagctcggctcttaagacgcgagtctgccgacgctcccggccgaataaaaacctcttccttttttaattcggtgtctgaggagttttgtctgtggctcatcctgctacaatctgtttgaacagatcacctgaaaggtaggtgttcatttaagcatttggagtagaactggctttggggttgttgacagttttcccttcactaggaagtgtttgtcactttaaggcaaaaaccaggaagttaaaagtggatgcagaagcgagcacagacggggctaggggtttcagagaaagtaattgagagtgctggcaacagcagctgaaatatagagaagttgtaggattaactttttcgcccaaagcagcttcagcccacgttttattcccatcgagggagggagaatgggtgccgctgagtgggcgggggagtggtccctgaaaggaggtggagtgctacagcccctccccgttggctctcgctgtttgtccgttgttggtttatactaatttgacaacagccgcctgttgagtctcctccagatcgcagctgaaggatctgttgagcgcttcaggaaaggcggtgagatccggtaccgcagcagagcactctcagctctgggtcttgcaggcgcagggctcccccatgccagcagaaagatttcctctggtgaagaggaccgtcgaatctgtcctcctcaagacacctcttgtacagaatttattcgaatgccacggccaaggtcttccttgaaaaatgttaaccgatgtgtgctttttgtcttttgtcatcctttctttaggacaggcgacactaacaggtgaagatctcgggagaccatgactaagaaaagaattgctgtgattgggggaggagtgagcgggctctcttccatcaagtgctgcgtagaagaaggcttggaacctgtctgctttgaaaggactgatgacatcggagggctctggaggttccaggtacatacatctcctagtcccttaatacttgaaaccctccctgcaactaggtgcatacgacagtttatcttaacagtgtcaggtggccgggcgcggttggcacacgcctgtaatcctagcactttgggaggccgaggcgggcggatcacgaggtcaggcgatcgagaccatcctggctaacacggtgaaacctcgtctctactaaaaatgcaaaaaaattagccgggcgtggtggcgggtgcatgtagtcccagctactcgggaggctaaggcaggaggatggggtgaacttgggaggcagagcttgcagtgagccgagatcgccccactgcactccagcctgggtgacagagcaagactccgtctcaaggaaaaaaattaaaaaaagatagttaaacttattatattccaaagaataccagccacctttattgatctccaaactgacatgcattggatttgctgggtttgcttttatttttacattttttgaaggagaatttttattctttttatttacagaaaattcagcagtgtacatttaacccagtttagtggcaacttctttcacctttcccttttccactttggtgattcaaacccacagatttaggacccaggacattgcctccccattggcagcgaatctcatcatatctgtccatgtaattggttctgaaaactgccaccaacttagccacacctcctttgtcttcctagtgaacctgtgtgaaggcaacgtcgtgcaggtcttcctgtggactagacatcccaatcttacctcacccttgataatgcagtaagggacccccattttgggacacagggcaggcaggaagacaaccagctcgatgggatccgcatcgtgtgcaatcaccaccagctgagtcttcttgttctccaccaaggtggtgattgtgttaacccctgctggaaagacgggtggtgtctcgatgggggtatcccctttgctagcagctttcttctcagtccaggacaacagtctctgcttcttctcttgttttgtctctggtctgtgcttgtgggcccgcgtaagcagtcagtagctgtttggcagtgcgaagcctgggtgaactggttaatggcaggaagtgctttcagcagcttataaaaggatagctctttgctgctgcaacctgatataggggggccatctgacaaagagggtgaggtctctttggggctgtatgtcctgtccaatgccaaaattcttaggctttttctcaaacagaggattcacaacttttttggcttcctgcttcttcactgatagcaggggcgggggccgccttctttcccttagccttctttcctattggcatcttgggtggctagaggagaacgggtttgcttttaagctagttttctgaacatttaatagtattgaggtgccctagataagttttacgtttcatatttcataaaaactaacacattgttggccagctacataaaagtggctttatagcatttcttagttgaaccgaaatacaatccttttgcaccctgactctgttttggggactaattttatgtgacaatcatccttattcagatctggagtggatccccttagctgacctgcatacgtgtatcatcatcagtcttggacatgggctaaaagcctgttgtttttagtaaacagcagaaaattctgctcttaaaatccagccacaatatggtatggaggttaagaatgcagtcttaggctcaaaccttatttctgtcacctactagcagtgtgactttgggcacatcattaagcttctctgtacctgtgtttcttcatctttaagaagtggataataatagtatccactttatagagttattgtcaggagtaagtgaatggataattatgccaatcacttacaacagtgccaggaacatagtgttacatgttggttattattcagtaggcctaggatgggactcacacatgtggtgtctttactaagcatcttagccagttttggcagttactgaaaaggcatgaaatcaattgaggatgggaggaggttgggagggcatccatcatcttgtctgattatcaagtttctggtttttatctccaatgtggtttaaacttattctctgctaaagacttaacgtggaggtttttcttctgattatccacttggcaaaattttaacactttgtaaactgcttccttgaaaataaataagctgtgtttcatcataacgctctgacttctgttccaacagaccacacctgtgtggttcaccgttatatttctagagccaagcatgtattctactatctccattttttaaagctccccagatgattccaatgtgcagacaacagttcaaagagagtttctattccatgggattttgaaaatctgacaggaacagaagccccaaactgtcctcattcctcccatttaaatttttctcctttcttctgtccttattacttcttccaatcccatcagttccaatttccccaacttccatcccctgctctctctctcttttctttttaggcagagtctcactctgttacccaggctggagtatagtggcgtgatctcagctcactgcaacctctgcctcctgggttcaagtgattctcatgccttagcctctcaagtagctgaaattatacacgcactactacgccttgctaattcttgtatttttagtaaagatggggtttcaccatgttggccaggctattctcgaactcctcacctcaagtgatctgctcacctcggcctcccaaggtgtggggattacaggcatgagccaccatgcctagcctctcttttcttacacagacttcctgctcaaatgtgtgagccttgtgcctaggtaggaaatataatcagtgtatagagtttgtagagagaagatttattcatcaatggtagaaaattgtaaaatgcaggagcagaagcttctttttcttctactcactaacccaatactgctctgtgctcactcttttggaaagcagtggattggcacagtggtaaaccttacctaagttccaatcaggtgtttcgaaggacttgaaggatgttgttgacacaggataacacttgttgtggttagtgatttgaaaaagagttgaaatataggagtacctcaaagaggtgagatctgtcattcatttcactcagtgatcccaacagacctgctgtggataggatggctctactctttgtaaacgttgaacttttggaatacacatacagacttgcatttatcggtacctcataaagtattttattacagagggactttctaaatatctcttgaatgaataaatgaaatgaaattcagaagttaggaacatgcctcacctgctctccatacagcaaacatcttaattccaaaatgaccttgccattcattaatttaccttaattaaaaaatatatacacttatgtacaaacatgtttaaataagcttttaattttagaacagttttagacttacaaaatttattaggaagataatacagagaattacagtacacctcatgtccagttaccccattttacattagtatgatacgtttttaaataatgaatgaaccaatattgatacattattattaactgaagtccatactttattcagatttactcagtttttcctaatggccttttgctgttccaggatcccatccaggatactgcattacatttaatagtcatatctccttaggctctttttggctatgaaatttcttagactttccttgtttttgatgcccttgatagttttgaggattacttactggccaggtatgctgtagaatatccctcagttgggatttatcttatttttttctcatggttaaattggggttatgacttttggggaggaatattataaggtgccattctcctcacctcccatcaagggtacatactatccacattatacccactgtttttttttttttttttggaaacttaaaactcattttatgttattataagtaagaaattagcattcaatatatgccacaatatatctttgttgaagtgtaagtttgttccacttttctatttttcattttccaacttttattttaggttcgggggtacatatgaaagtttgttacaaggataaattgtatggggctggtataactgctagccatatgcagaagattgacactggatcccttccttttgccatatatgaaaatcaactcaacatgcgttaaaaagttaaatgtaaaatctaaaactataaaaaccctagataatatcactattgatgttaaccttgatgtcctggcttgaaatagcatttgtcagtttttgccacactgtaaagttgctccttttttctccattgccatactatactctttggaacaaagtcactatgcacagcccactattaaggacaaagtcttctattctaggccttctgtctttccatatgaactttagaatccatgtgttagcttggattctaaaatagcttgctgggatgttgattgagattgcattgtatctataggtcaagttggaaagaactgacatcttaacaatatttaatcttctagtctatgaatcagaatatctctccatttatttaaatcttagactttcttcatctgtgttttctaattcatgcttataaatcctatacatattttgttatgtttatacctacgtatgtaatttcaggggtattactatagatggagtttttaaaatttcaaattccagttgttcattctagtatataaaaaagcaaatgactgggtgcaatggctcatgcctgtaatcccagcactttgggaggccgaggtgggtggatcacgaggtcaggagatcgagaccagcctggccaacatagtgaaaccccatctctactaaaaatacaaaaaattagctgggcatggtggcatgcgcctgtagtcccagttactccggaggctgaggcaggagaattgcttgcacccgggaggcaggggttgtggtgagccgagattgtgccactgcactctagcctgggcaatagagcgagactctgtctcaaaaaaaaaaaaaaaaaaaaagcaattaacttttgtatgttaaccatgtatcctgcaaccctgctgtactcacttgttgactctaggagtttttttctttttttcttactttttttttttaatcctttgggattttctacatagacggtcaggtcatctgcaaataaaaagttatctttattccttcccaatccgaatatcctttacttttctttcttctattattgtactagctaagacttctagtgcaatgttccataggagtggtgagagaggacatccttaccttgttcccagtcttaggggaaaagtgtctaatttctcactgttaagtatgatgttggttataggtattttgtagatgttctttatcaaattgaggaagtttctctccattcctagtttgctgagagttttcaccatgaatgggtgttgtacaaacaacattttaacaaaaaaaaaaagaaaaagaaagcaatcctactgccttaataagtcgactggttttctgtattttcacatttttttctatttcaaataaatgaagtatactcaaaagagacatgtctaacagggagcgattatacaagtataattatatacccatagatagacataatattacatatttggtgattagaatgtaaatttaattttacagttccctttgtacttcattatatcatacgccatttttaatgttcctgcacagacttcaaaatcatagtttttggtgtctccaaattcaatttccataattcattaactaattcatttcaaagcatttattgcacatccaatacacaccaggtcctgataatagagatttaaagaaggatatggctactctcgggtttctcacagtcatggaatcaaatgcctgataatatagtgtgtttaagttatctttatagaaatatgaacagagagttttgggagcttggaggatgaataggggaatctaattctatggagaaattagaaaagtcttgttgaaggaagtgacatttgatgtaactcttgaaggacaggaaattttccagatgaagaaatagtaatatttacgaaggtttaaagttgtgcaagagcctagagtgtttcaggaacaatttaatgacttagaaatttgagattaaataaggacaacactggatgaagattaaaagataaaccgggctagattgtgaaatgtgctaaatttcaaaataaggaattttgttttccatatggaatcaagagaaactattaagcagtggagtggcaggatctactttgtatttatcaggatacccatggagtggtgtggaaggtgaattctgcatgttgaggctgagcgcggtggctcacgcctgtaatcccagcactttgggaggctgaggcgggcggatcacgaggtcaggagatcgagtccagcctggctaacatggtgaaaccccgtctctactaaaagcacaaaaaaaattagccaggcatagtggcgcgtgcctgtaggcccagctacttgggaggctgaggcaggaaaattgcttgaacccaggaggcagaggttgcagggagctgagatcgtgctactgcactccagcctggcgacagagtgagactccatctcaaaaaaaaaaaattctgcatgttgagatactataatttactaaaccattcatctattttgggaacatttaacattgttactaattaattgctatttaagttatacaaaaatatatctatgcatttgactttatattattttgaaatttttcttgggacaaaattttgggagatacatatatcttattgaagtctttttgagataaatgttgatgtattttattagttttcttatgcattttgtgaaacttacatcttattctgtatatccctttctcaatacaatttgatatgcatccattaaacatttattgagtgctatttatcattgtggatgctgtggggaaaaccatgagtacaattcaaggggcttacaatctagttggagagataaggaatacactacaaaacattatggaggtctttgaatcctaagctgagaaataggaactttattctgcaggaaatgggaaaacatctaaaattttaattagggcagagatttagtccagccacaccttagagagaacactttggttgaaacaggtaggctagattagaagaagagacttcaaaggagtcttatgaaaatgttattagcagttaaagaaatgagatgttggattataggtcagagaaatgggaatgatcaatttaggattcctagattgaataattaagcaataaaaatgggagaaaaacaatcctaaaggtggacaaagccaacaaacaacaaacactctcctttgtggctatttaatgtttcataatactcaatatctcaatatctgttcatttctagaataaaaagggaggaggagatccaaattgattaaggtgattttccatagtcaaaacaatttttgaaaatctaaaaatttgaaaactcctcatttgtgaaatctcggtgacaggctgggtagattgcatcattgcattactttatgtgatcaccacaacaatgctataagatagttaataggaagtttttttttctttttctttttttttttttttgagacggagttttgctcttgttgcccaggctggagtgcaatggcgctatctctgtcaccgcaacctccgcctcccgggttcaagcgattctcctgcctcagccccccgactagctgggattacaggcatgcgccaccacgcccggctaattttgtatttttagtagagacagggtttctccatgttggtcaggctggtcttgaactcccgacctcagatgatctacccacctcagcctcccaaagtgctgggattacaggcatgagccaccacgcccggcctcaataggaagtttttgaggatgcaaagaagtttgttgtaggggaaagaacactgaattgaggattaatgtcatttaatgcagtgcatctcagtttgcatgagcatctgaattctgaatcacatgaagattttgctaagatgcaggttctgattcagtaggtctgaggtggggcctgagagtctgcatttctaacacaatctctcaagggaagccccagctgctagtctacagaccatactttggtagtaaggatctagagcagtggttctcaaatttcagttgtttttttgggcatttagcttgtctcatttttgtattatgaataatgctggtattaacatcctttaacataaatcttcctaagcgatgctgaatatttttttaaaaggctaggtaaattgcaaggagtttcatatacattttaacactgctctccagaaaacgctggagatgttatactctttccagtatatggaaactgttacactctttcctgtgtatcttcccattttgcctcattgttactcatttaaaagactattactcagtgttagtaactttctgttcacatgtttagaacttcagctgggatagaatagaataggtagaatttctggggactggccatatattttctgtcccagacattctcttcatgtggtgaggctggacttcctcaagctatggtgatctcatggtagttggatttctcatatggctgctagcttctaccagagtgagctttctgagacccaggcagaatccgcaaggctacttatgacttggtcttggaagccattcagtgtcatttcaactgtatgctgttggtcaaaagcaagtcataaagataactgagattcaaggggaagggactacataagggcacaaatactggaaggtgtgtgtgtgatttaattgacacttctttcagaaaactttttcagatgtctattggctattataaaacatgaagatgatcctcaagttgctatgaatactttctatttattgcaggaaaatcctgaagaaggaagggccagtatttacaaatcagtgatcatcaatacttctaaagagatgatgtgcttcagtgactatccaatcccagatcattatcccaacttcatgcataatgcccaggtcctggagtatttcaggatgtatgccaaagaatttgaccttctaaagtatattcgatttaaggtagaaaattgtgtgggtatctttgtgtttgaagttgtttgccaagtaaatgaataacgtggtttcagttacctatgtttacttctaaagattggcttgatttgcacatgtatttatcctacccaggcaaaaactccattctttgtcctcctttgctcctcaaaaatattcaagggacagtctctctttcatatattttggctgcagatacaggaagccacctggcagagtgttttcattaccttcatttcacattatttgattgcaataaacagatgaagggaaatgttttccccattacagaagggaactgataggtatgggaactttaaaactctctggttccacaacttgtccattactgcttagcccttttgtactttctgaagtactttccaatatatttgtttacatgaacatcataaaaacccagtaaagtatagctcttgggtagttaactctggtgtagaggggagaacatggaattgcagaataaaaacctgaattctggtgcttgccctaccactaactaacttagatgttagacaagcaatttcctcaatttcaatttttaaaaattttcttgtttgtaaaacaagatgattgtaccagatcacttctgtggttccttcctgctctaaagtattctaggacttttctataatttctgatcacgaccataaaagaattttatggtcagatatttctgacagctggcaaaaagcccaaaccttctgccttctgatcatcctgctaagtcatgcctttttctgcttaatgacaataagaaaatgaaaacatctagtgaacttctaaagtaagtcatttacattccagtggtgcttctcttcatttatttaaacaatacttattgaacaagtttgctaccatactaagcattgaatatgcaaagacaaaaaagaaaaatcagtaactttatagtctagttaaggggataaaaatgaagaaaaattttattataaatataattaataaaaatagagagttacatggggacaaatgctagagatctatacgttgcagctcggaggaaagatgttgaacccatcaggacatgaaatatcaggttccagggaagttttcttaaagaagataaagttttcttaaagctgagtcttgaaggatgagtaggagtctaccaaataaggaataaaagggtgatctcggcagaggcaccagcctgtgtaaaagaacatgatagaggaactataaatagtgctggattgctagtgcatgcaggggtggtttgtctctctttttttttttttgtttttttgttttttttcagacagagtcttgctctgttgcccaggctggagtacagtgacacgatctcggctcactgcaacctccacctcccaagttcaagcaattctcccgcctcagcctcccgagtagctgggattacaagcatgtgccaccacacccactaatttttgtatttgtagtagagacggggtttcgccatgttggccaggtgagttttgaactcctgacctcgggtgattcacctggctcagcctcccaaagtgctgggattacatgcgtgagccaccgcacccggccgggatggtgtctctattagtccatgaagacattatggtcatgggcccgtagaagcacatagtgtttccttaacctaagtagggtaacccatatttattattttttataaagctaaaaatcataacactatcctgtttcacagcctctttctttatagttctttgtaaaatgggtatttatgggagccaaagggagattcatttatataaaatgagagccactgaggtgtttttctaccctaccaggaaaaggagccctatagctcagtcacttatttaaaggtagccaggagaagagaacctagggtaagaagacatcagaaggtctcaggacatataggggtcaggagaagaataggcatttagtgcatggagtgtcataaaagcacaggagaagcccaggctttactcaggtgttacagtgccttaggacctggaccaagagacctagtgacttgcacttttctagaagaggagggtacattagcctgccaacactatgttatttttttctgtcttgtggaaattttctcattctgactacagccccaaacagttcttatttgtggagtatgaaaatcaaatatccctgcatgggtcctattatgtgatagtgcctgtgatatcagccctttgtgtaacactatgcaaggagagtcatgtcagggatgtcccctgtggttatcacttttcttttcagaccactgtgtgcagtgtgaagaagcagcctgattttgccacttcaggccaatgggaagtggtcactgaatctgaagggaaaaaggagatgaatgtctttgatggagtcatggtttgcactggccatcacaccaatgctcatctacctctggaaagcttccctggtgagcagcttaccaggaaggaagacccttgacccatgcctgtgacctgacccctgaggaatgggaggattgtggtctgagtaattcctactttggaatgaagtaagacttatcctaattattcttgttccccagaaggatgttggggtaacttgtattactgccatttttgtaattttggagattagagcaaaatttgcagtctatttagttttacaatgactttagtcattgtatcaaatgactggagtatcaaagggaagaatgtggagttcttgaggagcattaggtagaataaggaatttttcagcagtaaacacaaatattgagtttctaaggaaggaatgaaagcttgaagaatttcagtctttggcctggattttcatttaaaaaaaaaagcactctatactctaaagtatataagaatatatgtgctgtaagtgaaatgcgagtaggtatttaaggggatgaaaagataaaagagaatggaggttttctgaggcagtttatatttatatctctaaatccaaaatacaaacacatcctgagttaagcaaagtacatatgacaaggaaatcacaaggtactactctgaggctatgggaaaagaaaataggcaaaaatactgagaaaggcaagaaagtagctgagtaaagagaacacttggagaatatatgcttaaacttaagtctgcaaaaaaaacaaatgacttgacaaatgatatctatcatgtaaaccattacccaataattattttcccttctcttgcaggaattgagaagttcaaagggcagtacttccacagtcgagactataagaacccagagggattcactggaaagagagtcattataattggcattgggaattctggaggggatctggctgtagagattagccaaacagccaagcaggtttgaatcactcaattattatttacgttgcttaactctagcttcagtttctccaaggaagctgcaggtggacccaacagagaatagggatacctgcacatagcccttcagtgccagtggcaaatatagggcttcgtttcattacctcagttggcaacatggtgattggtgctaatagaggagttaaggctaccagttagagttccattgtgcaactagcctcacaccaaggaactggatcagctaaagtctgggctcattatcctaatcaggcatcttctcagagtgtgcctctggctttgataaagacaaagtaattgctgggagaggttgttagaaagcagtattgagagcgaggatcttcaattggccagcagaagtgctatgttcttacataaaggaaagcacgcgtgatcattggaaacttttcactcataggatggtgcttgaattttcctttacactccccaaatggaaaaaagtatcaattttatcttcccaaagacaatgtgggtatccgtatagcgtccaaactgtagcacatgcaagcagcttgccctggcctttgcatacagttaggtaactcagataacattcattctaaagcaattatatctccttggctttttgttttgtttgttgtggtttttgtatagcagactttgaactgagaagcaagtgtcttcactataaattcctggaaaaagacatgccaatattgtattttgttattaatgtctgtgttgaatcaaactctattggcaataggtaaatgtcttggttgttctttagtaactttaattaagccatgcttctctataaagatgttttaaattgttttattttaattagaagcttagtgctacaattctgttaaatgactcttactcagcaactttgtttgaaaaacacttcttctcattgctatcctcatctataaccacaaaaattatttcatatgatacttcataaattaattcaacagacatttatcaggaaataatcatataaacaaggattaaaaataattaaaataattatataaacaagggttaaaacgtatgtgggtgttatggtagaggaatgtgcaaaatgtggagtggggacccatggcgagagccatctttaatatcattggcttgtcaaatgggcagttctaagggagcttggccttacctgctctggggaattgcaggttgccacataacaaagcatttctgtgtgggtacagataaggtggctgtgtctgtgagaaagcctgggaaaatgcaaaggaaaactatgtctgcatagcagaggcaatactgtcacaccactaatccaagctgaagaaactcaattgctgagttctaactttttactttacttgtaaattgtattcatgatgatttgtttataaatcaaaaactttaaatggacctatatatttcagtatatcatggaagtttttcgtataattcttgtagatgcttttgtaaagagaaaacattcctttttttcaatattaatttcatataagattacactgattaaacaattttccttataaatctgatttgtaaatgttatttgcttaaaacaaggtatagatggaaaactgaaataagaaatatgacagccattaagcacttatcaagtgtttactatataccacaccttttacaaaaacactgcttaattatcacaacagccttgtgatatatgtattattattattactatttcataaataggaaatcttttcattagggctctgagcgttttcattactcagcagaagttatatagccagcacacaaaattgttcagtttctaagaccatatatgctctttcaactgtgactgtggaagtacataattatcagagtgcttacagtcactttaggcgagataagatttgtgaagtaaacaattatccctctgtagacaggtcattttagacaaaaagactatgaagcaatgtgcgtatataacttaaaatctggaagccatctccagagagtttcataatgtaggaaaagtgattcttttgccaggtaactgcatatcaaatctttatcagttctgaacatgaactttagccagaggaggacacagaaagactgactagcttcctgttgttccactagcaatcttatttttctccattaaataatcaatcaaacatttcttaagcacaggctttggagttagtcagacctgggttggaaattcacctctgccacttactagctctgtgatctcaggcaagttattcatcctttccatgcccctcatctataacatgggtgtaataatactttcctcaagaggttgttgtaatatagatgaaggacctagcacaatgacttaaaggtcacaaatcccaataaatggaagtgatgataatctgctgtggatgtgtaggctttatctcctatccttgagaaaacacatttgaagaaacagaaattaggagtgtagaaagtttaatatcaataaaaatgataaatagcaggggtttttgtaataatgccaacaatgtcaatggcaaaagaatgagggttttagattaaatggtctccagctgctttcaactttaccagtacatgatttttaatgagttctacaggtgataagtgctagagaaattcagaggatggagagaaaattgtcagcctgaatagtcagcggtttcttcatggaggaggcagtcttgatctgggtcttaaaaatgaacaggcttcgcagagttaagaggaaagaaggcatttcaggcaggcataatagcactaaacagaaatacaacggtgtattagagcaaaacatattcttggacagtagatacaccaatttaattctaagtttagtgtttgggaaggaaaatggcaggaaacaaacataaaaacccacaaagattgtgcaggggctaaaaagccagactaatgagtttgaactctttttttttttttttttttttttgagacggagtctcactctgttgcccaggctggagtgcagtggtgcgatcttggctcactgcaagctccgcctcccaggttgacgccattctcctgcctcagcctcccgagtagctgggactacaggcacctgcaaccacgcctggctaattttttgtatttttagtagagacggggtttttcagtagagacggggtttcactgtgttagccaggatggtctcgatctcctgacctcgtgatccgcccgccttggcctcccaaagtgctgggattacaggcgtgagccaccgcgccgggcctgaaatgattcttgaagaaaatgggggtgcttttgaaggtttacgaatctgagtgacaaaagcaaacaatttcttccatgccccaggttttcctcagcaccaggagaggggcttggatcctgaatcgtgtaggggactacggatatcctgctgatgtgttgttctcttctcgacttacacattttatatggaagatctgtggccaatcattagcaaacaaatatttggaaaaaaagataaaccaaaggtttgaccatgaaatgtttggcctgaagcctaaacacaggtatgttcccaggatgggagtgcagggatagtggccaaagcacaagaataaggactcttcacactggctaatagtaaagccacctctacccatacattaagaaaacccacagtggctgggcatggtggctcacgcctgtaatcccagcactttgggaggcggaggcgggtggatcacctgagctcaggagtttgagaccatcctggccaacacggtgaaaccccatctctactaaaaacacaaaattagccaggtgtggtggcacctgtctgtagtcccagctattcaggaggctgaggcaggagaatcacctgagccctggaggcagaggttgcagtgagctgagattgcaccactgcactccagcctgggcaacagactctgtctcaaaaagaaaaaaaaaaaaaaagaaaagaaaaagaaaagaaagcctatagactcatagaatctgaaatcagatttctaacttgtacccacagatgtccaagatctattggtctgtgggtttttaatctagaattctctttggcagtaacccttttctcattcccccaggtatcagttctttttgcatgatacccaacaacaaaatgatagctgaggacagtgcgtcatttactcattgagtacctgttatgagccaggcatcatacatgggcatgaaatacagagagaagacataatagtaatagtaatagaaataacactcacctttctgaggactttctataagataagcacagtgctaaatgagttacatgcagtatctcacttaatcctgacaatagccctataagttggtactatttttgtttcacagtgaggaggtctatgcaaacctaccccaaaggctgaggaagctgagaggctgaagaaagaagctgacagattcagtttcttagaaacatttcatagggacttatgaacagaagccatgtctgtctcaggcagtggtgagacaagatggtagatccccataccattatctcctgacccagggatgatataccacaggggaggggcacacatacttcagagcgaatgggtaggagtttgccctaagggtgggatttacagtaagtacatactattaaacaacagattaactggaaatctcagaggtattcccgaaaccagggttgatcagaagtcaatatggtagattaacttctaagatggagttgctttggcctccacaatttttgatctacattttacaaatataaaaactgagatgtagagaaactaagtaattttcccgagggcaacagaaataataaatggcagactcaaaaaatagatcttaccttaaatactctaatgagaagaaagaggacagattataatgaagaaatacatacagtgttatgaaagtacaaaggatggggtcctcagagaaccagggagggaaaacatttctagaggctgattttaaatttattttccctccaactttttatttttgaaaatgttcagatctacagaaaagttgcaaaataataagtacaatgagcacccatatatccttcacctggattcacctgttaagtttgctatatttgcttcctttccccatctctgtagataggtccatacatatagagcatacatacacaagtacatttttttctgaaaccatttgagtacgttgcagtcattaagacactttaaatacttcagtgtatattgtataagaaaaagggcattctcctacataaccatcatataattatcacacgtgggaaatttaacattgataaaatacattaatacattggcaatatccccagttgccccagtagtattttttatagctttaaaaaaatctttttaaatctagtatcctgtcaggtaatcaatcacaccattacatttagttgtcatgtctctttaatctctctttttatatatatatatttttattatactttaagttctagggtacatgtgcacaacgtgcaggtttgttatatatgtatatatgtgccatgttggtgtgctgcacccattaactcgtcatttacatcagatatatctcctaatgctatgcttccccactcttcccaccccacaacaggccctggtgtgtgatgttccccttcctgtgtccaagtgttctcattgttcagttcccacctatgagtgagaacatgcagtgtttggttttttgtccttgcgatagtttgctgagaatgatggtttctagcttcatccatgtctctacaaaggacatgaactcatcattttttatggctgcatagtattccatggtgtatatgtgccacattttcttaatccagtctatcattgttggacatttgggttggttccaagtccttgctattgtgaatagtgccgcaataaacatacgtgtgcatgtgtctttatagcatcatgatttataatcctttgggtatatacccagtaatgggatggttgggtcaaatggtatttctagttctttttgaggaatcgccacactgtcttccacaatggttgaactagtttacagtcccaccaacagtgtaaaagtgttcctatttctccacatcctctccagcacctgttgtttcctgactttttaatgatccccattctaactggtgtgagatggtatctcattgtggttttgatttgtatttctctggtggccagtgatgatgagcattttttcatgtgtttttggctgcataaacatcttcttttgagaagtgtctcttcatttcctttgcccactttttgatggggttgtttgtttttttcttgtaaatttgtttgagttcattgtagattctggatattagccctttgtcagatgagcaggttgcaaaaattttctcccattttataggttgcctgttcactttgatggtagtttcttttgctgtgcagaagctctttagtttaattagatcccatttgtcaattttggcttttgttgccatggcttttggtgttttagacatgaagtccttgcccatgcctatgtcctgaatggtattgcctaggttttcttctagggtttttatggttttaggtctaacatttaagtctttaatccatcttgaattaatttttgtataaggtgtaaggaagggatcaagtttcagctttgtacatacggctagccagttttcccagcaccatttgttaaatagggaatcctttccccatttcttgtttttgtcaggtttgtcaaagatcaaatagttgtagatatgtggtattatttctgagggctctgttctgttccattggtctatataagaaataattctctctttgacatgggctttctttttaagaacccaaggcattgttttgtagagagtctctaaatttagacttgcataatttttttcctttattatattcaggttaaatgtttttgacacatatactacataggacatgttgatcttagtgggtcacatcaagaaccacattatgtcagtttatctcacagtaataatgctaaatttgaccacttagataaggtggtatagataccatcaagtttctccactataaagatattttttcccgttgaagttaatcagtggggtgacatttggagactgtgtttcctaaaaacctttcacctaattattttagcatgcatgtttttggtggttgcaaaataaattgaggctttgttgaataataggagatagccaaacaaatagagcaagggtatagcattctaattataaagacaaagtcttggaacagcaaaaaatacattatgctccaggacttgcatgtagtctggtatggctggactatatagcaaagatggaagagtgactgaatgtatctccaggttcatcaggcatgaaaacctttggttcctccgcggtcttctgagcggtcacgtgaacggcttcctgcaggctggccatggcgcttcaagttcccaaggctccgggcttcgcccagatgctcaaggagggagcgaaacacttttcagaattagaagaggctgtgtatagaaacatacaagcttgcaaggagcttgcccaaaccactcgtacagcatatggacgaaatggaatgaaaaaaatggttatcaactacttggagaagttgtttgtgacaaatgatgcagcgactattttaagagaactagaagtacagcatcctgctgcaaaaatgactgtaatggcttctcatatgcaagagcaagaagttggagatggcacaaacattgttctggtatttgctggagctctcctggaattagctgaagaacttctgaggattggcctgtcagtttcagaggtcatagaaggttatgaaatagcttgcagaaaagctcatgagattcttcctaatttggtacgttgttctgcaaaaaaccttcgagatgttgatgaagtctcatctctacttcgtacctctgtaatgtgtaaacaatatggtaatgaagtatttctggccaagcttattgttcaggcatgcgtatctatttttcctgattctggccatttcaaagttgataacatcagagtttgtaaaattctgggctgtggtatcacttcctcttcagtattgcatggcatggtttttaagaaggaaacagaaggtgatgtacatctgtcaaagatgcaaaaatagcagtgtactcttgtccttttgatggcatgataacagaaactaagggaacagtgttgataaagactgatgaagaattgatgaatttaagtaagggagaagaaaatctcatggatgcataagtcaaagctattgctgatactggtgcaaatgttgtagtaacaggtggcaaagtggcagacatggctcttcattatgcaaacaaatataatatgatgttagtgaagctaaactcaaaatgggatgtctgaagactctgtaaaacagttggtgctacagctcttcctagattgacacctcctgtccttgaagaaatgggacactgagacagtgtttacctctcagaagttggagatactcaggtggtggtttttaagcatgaaaaggaagatggcatcatttctaccatagtacttcagggctctacagacaatctgatggatgacatagaaagggcagtagatgatggtgttaatactttcaaagttcttacaagggataaacgtcttgtacccggaggtggagcaacagaaattgaattagccaaacagatcacatcatatggagagacatgtcctggacttgaacagtacgctattaagaagtttgctgaggcgtttgaagctattccccgtgcactggcagaaatactctggagaaaactctggagttaaggccaatgaagtaatctctaaactttatgcagtacctcaagaaggaaataaaaatgttggattagatactgaggctgtagtccctgctgtaacggacatgttggaagctggtgttctagatacttacctgggaaaacactggtctatcaaactcgctgctaatgctgcagtcactgtacttagagtgggtcaggtaatcatggcaaaaccagatggtgggcccaagcctccaagtgggaagaaagactgggatgatgaccaaaatgattgaaattggcttaatttttactgtaggtgaaggctgtatttgtagtagtattctaagaatcgcgtgatgttttcttattctccttacattaagaggtattttgtgtttgtattcttggctggatgttataataaacatattgttactgtcaaaaaaaaaaaaagaaaacctttggtctactaaataaaaagtatggaatgaagacagtccaaagccattcaaagatttaggcaagtgagtaacataatcatacctacattttagaaagaccattttgaaaatggtgtgggagtgggatgagacaggaggtcctaaagacaattgtatcatctggttgagataacaaggagtagataaaactatcttggggatgttaagaggagaaagggaaaaggcttggtgaccagatatataactcatggttttgtgggttgggcaactatatggatggatggtggtactgctggtgaaaaggagtaggtttggagaaaaagatgaaatcatgaggttggaatgcagaacacaatcgacctagtgtcaaagcataactaaatgcaacaaaccagtagtggtaatttaaacatataaaattcctgaggccaggacagctctgtctgaagatgagttaatatagtattcaggcattaagactactttttaggccaggtgctgtggctcacgcctgtaatcccagcactttgggaggctgaagtgggaggatcacgaggtcaggagttcgagaccagcttggccaacatggtgaaaccctgtctctactaaaaatacaaaaattagccaggcatggtggcaggtgcctgtagtccaagctactcgggaggctgagacagcagaatcacttgaacctgggaggtggaggttgcagtgagccaagatcgtgcgactgcactccagcttcggcaaaagagtgagactctgtctcaaaaaaaaaaaaaaaaaaaaaaaagactgctttttagaaagctccacgatactagaaaccagccttattattattaaaagtaatggcaaaaaaataagcaattacttttgcaccaacccaatgtttccagtatccgtatcctacgctgtccctaggaaacaataacaagcccgaagtataccaagataattcactgaaaacaactttgagataaattctaaaatcctaggctgtgtatcattggacaagtcacataacttttctaggcctcaatttcctcatttataaaacctggataatgacacctattctgcttccttcatagagttttgtgagagtcaagttaatgcatgtaaaagcaacttataaactgtaaattgctacatacatgtaatttatcatacagtttggaaaacagtggcctaaacctagctcttgagcctttgaaactggaaatgagactgaacagaatgttgacagcttagttctgtcagacttcttggtatgagaatacaaactattgacctgtggccttatcatatcacacacagaatattattgttacttgagaaatcatatatgcactcctcaaacaacactcttccttcactcctccaacactctccctttcagtgcatccagggtccaacttcagatctgatcttgatctgtgccaacctagtataaattagaccttttccaaacttcatgcatagaccaaggggaagattattggcattctgtttacctccaccaaagcaaaattttacttatgtggtactgatttctctttctctcatttctccacttgatctttgtcacgactcacagagctctgagtcagcatccaaccttaaatgatgacctgccaaatcgtatcatttctggcttggtgaaagtgaaaggaaatgtgaaggaattcacggagacagctgccatatttgaggatggctccagggaggatgacattgatgctgttatctttgccacaggctatagctttgactttccgtttctggaagattccgtcaaagtggtcaaaaacaagatatccctgtataaaaaggtcttccctcctaacctggaaaggccaactcttgcaatcataggcttgattcagcccttaggagccattatgcccatttcagagctccaaggacgctgggccactcaggtatttaaaggtaagtgaccatgcaaatagactacttaattacttggtgatatgtttacctctgtttaggtacttgtttttaaatagctagagatagcatgtatgattacaacagtgcctagcacaaagttagtacagaaaaatatatttttgagtgaatctaaagtagcaatttataaccatggacatacatcatacctgggaaatttttccaagctatgcatgctttgacaccatccttgctgatgcttatttagttagtctggggtggggcagtcataacatctttgagaaaaatattccccagtaattccaatgtgtactccaaattagaatttactcatctagattttaggcaactggcatatgtttctgaagtaaaatagttttatcttctttcattatagataaaaataaaatatagaaatagtatgactttatttcggccgaaaattaagacctggttgcagactagtcaatattgtaggatattcaatcccccaaattctcacttttctccttttatgtcccctctttcagttttggctaggaatatatgaaaaaaaaaaggggaataggtttcatatgagtcagtagaatgatatagcttccaaagaaataattaaatctagcatcattaaaaaactataatgttctagaacattacaactgttgttctctaaactggccagaccacacctaatgatacattttaaaagtgaagctggagtgcgtttaataaggagagagagaaaaattttttaagggatttgaaaacatgccatctgaagtacaattgaaaaagccggagagagatttagcctggagaagataaacttcaggagagatatgagaatttccttcaaatatctgaagggaaggcacatggaagaaggattagatttactcagtatagcttcaaagggtcaaaccagaatcaaggagtgaaatcttgagggttacacatcagcttaccattaagaaaaaaatccaaaacctttttcctatcagccaatgccatttcatgatggaaccagctgcctctgaaattctaagcagaaaaggaaaaggatgccaaatgactgaatgctcactgggccggggcaggagagggggaaggtatggagtagattcaagcctcaggatagagagaaacaagatgatgtttaagggtccttctaaagaagaaattcactgattctatggttgttataacaaaatttgctattgttactagcatttaattaaaactactcagagttcctgttggaattacaccttttttgttttcactagtgaaaatcttcacagttgcagagaaaaaaagaaccaatggtattacagttgatagttcaacaacctttctaaatttccccaaatttctattacttccagtcctatccagcagattatgtactacctgagagaactatacaagtagtcaaacgcaaatagcccattaagttggcctaattctagtcatattaaagtgatcttttaattgggtcaattacataagcggagaacagttcattaaaacaggccacagcatcttagtatactttaagcaactgggactcttttccaagaccaagtgaattcttgagaggaaatagagaaaatgagtatttgcaagagtctgcattatggttatgagattatgggatcttagggaaaatgtacaaaaagcccagcttcctatgctagcagaagcctagtgctaattcctccagcttttttctaacacctggaaggaagaaatcttcagaattctctaactttaccagacttccaacaggaactctgggttttttattctgtccatggccaatctgtctgcctcccacattcttgcctttctcttccctgaattatcccttcactatgccaattttaaaccctttggattagcttgtttttcccatttttttcatgtctgcccaacaaagcctgcctccttccttgtctgttccctaccaagccccattttccttcttcttctgttctctggaattattgttctcttgtcaagaaaatattctactcttttctagaacactgaatttacttccttgccttgactgaaatgaaacatagtttctgttttgattgcgtcttttgcagcccttgcaagtgttttattttcactcagcaactttctttccttcaaaactatatcaagttacaccaaatctctggatcacaagaagtcattatgtcataggctggcattaaagttcctccacaaattggatacaacctccaatttcaggcccatctttctttctttctttctttctttttttttttttttgagatgcagtctcgctctgtcgcccaggctggagtgcagtggcgctatctcggcccactgcaagttccaccttctgggttcaggccattctactgcctcagcctccccagtagctgggactacaggcgcccgccaccatgcccggctagtttttttgtgtttttaatacagacggggtttcaccatgttagccaggatggtctccatctcttgacctcgtgatccgcctgcctcagcctcccaaagtgctgggattacaggcatgagtcactgtacccggcctcaggcccatctttcactagtctttaccatacttcctacaatactctagatgcactggatgacgtacccactaagcagcaaacacagcaggtacccttgtaccctgtgcttttgcttccactgtgctttcttcttgatatgccctccttttactttttatttctataggaaaagtctatgcatatttcttccctccctttgtaatatagtgatagctccttaagtaaaggactcatgtttatttgcctttgtattgcaagcctagaccactgcctagcacataagaggtatctaataaacatctattctaagaaatgtcagtttagccttgaggtaaattaaattctaaattctgatgtagaaacttcttatttgaggatctcagcttatgggctaccttagccaatttccagttatgttaaaagcctgaactggactgaaattgcagaatgggagccagatctcttttctctcataacattagctatacactgaaatatgcaggagcaagtcaggattacacagatacaacctgctttaggctgacagcagactgaaggcctaccaccacagaactctaattcagactgtcttccttcccaccttgtcttggaacccttggaagatctctgaacttcagttcctcactgttcttcaacattcttcagataacatatactgaccttttagtatgtaccaggccctctgctaggggctggagaagcaaatatgaccatacagaaaatccctatctttctggaatgcagagccaagcaaggaagactgtgttagcccattctcatgctgctataaagaactgcctgaggctgagtagtttctaaaggaaagaggtttaattcactcacagttctgcatggctggggaggcctcaggaaacttacaatcatggcagaaggaacttcttcacagggtggcaggagagagaatgagtgctgagtgaaagggaaagccccgtataaaaccatcagatctcgtgagaactcactcagtatcatgagaacagcatgagcagtatgagagtaaccaccccatgattaaatcacctcccaccaggcccctcccatgacacatggggattgtgggacccaaaattcaagataagatttgggtggggacacagccaaaccatatcaaagacagacaagtaaacagatgcttaatgatttgttcattcagcagatatttaactatatcctaaacaagtgctccagtagcaatgcagaagagctgccatgagagcagtgggcaataagtacccaattctccctacaactacataggaatttactaaaaggacaaggaaatattgaccatagaggggaaataatcactactgtttatgcaaagttagatgaaagtgacagaacaaatagagttctgggaactgcaagtagttcagaatgctggtaaagtgttataggaatgaaggaaaatgaaactagaaatattcacaggcaatatcaagagtttgcatttaaggtacaagttggagaaccactgaaggattttaactggaagaggagtcaaatcagatctccagtttagaagatatgttagagaggagtgaaatgggaaataggtcagtacgagcctgtggtaaaagtctaagtaagacagcatgagagctttaaaccaaggtaatgacactctaaaggaattggaggagccagacttaaatgaaatttcacaggcaaatctgaagaatttggtgacagaaagcatgttggagaagagagacagaaaagaatctgttcaggtgttgaggccattcattggaattgggaaactaagacagggagcaaagacatggagggagataagaaatatggtaaagctaatgtgtctaaataaggaaacactgcaaaaacaaaatttatgaattaagacataactgtaccacagagtatacacgtaaaaagatgtatacatctttttaaaatttttaaattttttaaaattttttcaccccatgagctctagactaagatgtatatacctctttatctatctatatatagacagatagggtaatagatagggttttttgttgtttttttctttcttttatgaattgggtgtctcccacaatcaagaaatatacctcctccttcatgtttctagctaatagaagtaaaacttgtggttgtgtagaagtaatttggaaattgactctcaaaacgcttattttgagtatccgaagagacctatgattaagcttaaatgaagcatttcagtgtttcctaattgatttatgacgataaataataattcccatggctaaaatgtaaaaacacatggaaaacaacagaaggctatttgagagtgatgaacttctgagttccatattttaagagggatacaccaggatagttattagagtatgcttagtgaagggcaaccaagatggcagagaatgtgaaaaccattatatgggaaacatgtactgtttagcctgataatgagaagacttaaaggagttatgacaatcatttccaaatgtttcaagagctgtcatgtattaacattaaactctgtggctccagaaagcagagcttggtccagtggtgcaaatgcaaagagtcagatcttggggtcaataaaaacaataatgttccagcagccagagcagtcaaataattatataatcacctcagatataattattatagatacccatcaccagtgatgtttaaagaggaatgagataaccactaggttagagtacttgtagaaagaatgcttgtatcaggtaaaatatattgccattctgaaattccatattccacaattttatggagtgacaccttaggactggatgtggccaaaatcttctacatggcatagtccctagttataggggcatacaactaattgtttaagcttagcattgttcatactggcttaaatactattaagccttagtctagccctgtccttggtgtataattcctacaactggaactgtttgtgcatcttacttaaatttatcagttaatattaggtattatgagttccccttggccttaacccctactcttatcaaagaaacatgtttagaaaatgaagcttatcttccacaggactttaggcataaaatgtgattaagatttattttggctgggcgtggtggctcatgcctgtaatcccagcaccttgggatgcagagacgggtggatcatctgaggtcaggagttcgagaccagcctgaccaatatggtgaaacctcgtctctactaaaactacaaaaaaaaattatttgggtttggtaggatatcagtgatggaagatgaaaggaatgaaatgaagtgagaagggaagtttagagaaaaaagaataaaaagaaacgaacaaagcatccaaggaatatgggactatgtgaaaagaccaaatctacgtcggattggtgaacctgaaagtgacggggagaatggaaccaagttggaaaacactctgcaggatattatccaggagaacttccccaatctagcaaggcaggccaacattcagattcaggaaatacagagaacgccacaaagatactcctcaagaagagcaactccaagacacataattgtcagattcaccaaagttgaaatgaaggaaaaaatgttaagggcagccagagagaaaggtcgggttacccacaaagggaagcccatcagactaacagcagatctctcggcagtaactctacaagccaggagagagtgggggccaatattcaacattcttaaagaaaagaattttcaacccagaatttcatatccagccaaactaagcttcataagtgaaggagaaataaaatactttacagacaagcaaatgctgagagattttgtgaccaccaggcctgctctaaaagagctcctgaaggaagcactaaacatggaaaggaacaaccggtaccagccactgcaaaaacatgccaaaatgtaaagactgtcaaggctaggaagaaactgcatcaactaacaagcaaaataaccagctaacatcataatcacagaaccaaattcacacataacaatattaactttaaatgtaaatgggctaaatgctccaattaaaatacacagactggcaaattggataaagagtcaagacccaacagtgtgctgtattcaggaaacccatctcatgtgcagagacacacataggctcaaaataaagggatggaggaagatctaccaagcaaatcgaaaacaaaaaaaggcaggggttgcaatcctagtctctgataaaacagactttaaaccagcaaagatctaaagagacaaagaaggccattaaataatggtaaagggatcaattcaacaagaagacctaactatcctaaatatatatgcacccaatgcaggagcacccagattcataaagcaagtccttagtgacctacaaagagacttagactcccacgcaataataatgggagactttaacaccccactgtcaacattagacagatcaacgagacagaaggttaacaaggatacccaggaattgaactcagctctgcaccaagcagacctaatagacatctacagaactctccaccccaaatcaacggaatatacatttttttcagcaccacaccacacctattgcaaaattgatcacatagttggaagtaaagcactcctcagcaaatgtaaaagaacagaaattataacaaactgtctctcagaccacagtgcaatgaaactagaactcaggactaaaaaactcactcaaaaccactcaactacatggaaactgaacaacctgctcctgaatgactactgggtacataacgaaacgaaagcagaaataaagatgttctttgaaaccaatgggaacaaagacacaacataccagaatctctggaacacatttaaagcagtgtgtagagggaaatttatagcactaaatgcccacaagagaaagcaggaaagatccaaaattgacaccctaacatcacaattaaaagaactagaaaagcaagagcaaacacattcaaaagctagaagaaggcaagaaataactaaaatcagagcagaactgaaggaaattaagtcacaaaaaacccttcaaaaaattaatgaatccaggagctggttttttgaaaggatcaacaaaattgataaactgctagcaagactaataaagaagaaaagagaagaatcaaatagatgcagtaaaaatgataaaggggatatcaccaccgatcccacagaaatacaaactaccatcagagaatactataaacacctctacacaaataaactagaaaatctagaagaaacggataaattcctcaacacatacaccctcccaagactaaaccaggaagaagctgaatctctgaatagaccaataacaggctctgaaattgtggcaataatcaatagcttaccaaccaaaaagagtccaggaccagatggattcacagccgaattctaccagaggtacaaagaggagctggtaccattccttctgaaactattccaatcaatagaaaaagaaggaatcttccctaactcattttatgaggccagcatcatcctgataccaaagcctggcagagacacaacaaaaaagaattttagaccaatatccttgatgaacattgatgcaaaaatcctcaataaaatactggcaaactgaatccagcagctcatcaaaaagcttatctgccatgatcaagtgggcttcatccctgggatgcaaggctggttcaacatacacaaatcaataaatgtaatccagcatataaacagaaccaatgacaaaaaccacatgattatctcaatagatgcagaaaaggcctttgacagaattcaacaacacttcatgctaaaaactctcaataaattaggtatcgatgggatgtatctgaaaataataagagctacctatgacaaacccacagccaatatcatactgaatgggcaaaaactggaagcattccctttgaaaactggcacaagatagggatgccctctctcaccactcctattcaacagagtgttggatattctggccagggcaattaggcaggagaaggaaataaagggtattcgattaggaaaagaggaagtcaaattgtccctgtttgcagacaacatgattgtatatctagaaaaccccattgtctcagcccaaaatctccttaagctgatgagcaacttcagcaaagtctcaggatacaaaatcaatgtacaaaaatcacaagcagtcttatacaccaacaacagacaaacagagagccaaatcatgagtgaactcccattcacaattgcttcaaagagaataaaatacctaggaatccaacttacaagggatgtgaaggacctcttcaaggagaaatacaaaccactgctcaatgaaataaaagaggatacaaagaaatggaagaacattccatgctcatgggtaggaagaatcaatatcgtgaaaatggccatactgcccaaggtaatttacagattaaatgccatccgcatcaagtgaccaatgactttcttcacagaattggaaaaaactattttaaagttcatatggaaccaaaaaagagcccgcatcaccaagtcaatcctaagccaaaagaacaaagctggaggcatcacgctacctgacttcaaactatactacaaggctacagtaaccaaaacagcatggtactggtaccaaaagggagatatagatcaatggaacaggacagagccctcagaaataatgccgcatgtctacaaccatctgatctttgacaaacctgacaaaaacaagaaatggggaaaggattccctatttaataaatggtgctgggaaaactggctagccatatgtagaaagctgaaactggatcccttccttacaccttatacaaaaatcaattcaagatggactaaagaaactaccatcagagtgaacaggcaaccaagaaaatgggaaaaaattttcacaacctactcatctgacaaagggctaatatccagaatctacaatgaactcaaacaagtttataagaaaaaaacaaacaaccccatcaaaaagtgggcaaaggatatgaacagacacttctcaaaagaagacatttatgcagccaaaaaatacatgaaaaaattctcatcatcgctggccatcagagaaatgcaaatcaaaaccacaatgggataccatctcacaccagttagaatggcgatcattaaaaagtcaggaaacaacaggtgctggagaggatgtggagaaataggaacacttttacactgttggtgggactgtaaactagttcaaccattgtggaagtcactgtggcgattcctcaggaatctagaactggaagtaccatttgacccaaccatcccattactgggtatatacccaaaggattataaatcatgctgctataaagacacatgcacacgtatgtttattgcggcactattcacaatagcaaagtcttggaaccaagccaaatgtccaacaacgatagactggattaagaaaatgtggcacatatacaccatggaatattatgcagccataaaaaatgaagagttcatgtcctttgtagggacatggattaaactggaaaccatcattctcagcaaactatcacaaggagaaaaaaccaaacaccgcatgttctcactcataggtgggaattgaacaatcagaacagatggacacaggaaggggaacatcacactccagggactgttgtggggtgggggtagtggggagggatagcattacgagatatacctaatgctaaatgacgagttaatgggtgctgcacaccagcatggcacatgtatacgtatgtaacaaacctgcacattgtgcacatgtaccctaaaacttaaggtataataataaaaacaaaaaatttatttttacttcattctctttctgttgatataaggtccctttgttatcaagaatacaggtgcagctgtgttttcccactcccctgccctttaactttgtaactaattttccatatacctttaagtccattttctcatgtccatatttcatttcccaactgaaagactacattagggaggaggcaggtattggttggaagtcagagtaggggaaatcccttccaaagacaaagaagaataggtagagtaagctgcagatgttaatattatattgtggtggtggtaaggtgatcaagtgaattgtaacctccttgagtacaggaaacttaccctgtatttctttgaattctccatagcatagtaattgtttataggattattgttccttctgaggtaattttacagttaaaatgttaatttttgtttttaggtctaaagacattgccctcacagagtgaaatgatggcagaaatatctaaagctcaagaggaaattgacaaaaggtaagaaactctcccaggaagatatatggttacatttctacttatttcttaataaaagaaatattgtactgtatttaactgcctcatgttagcttaaggatttagattctattatgaagaaaaaaggaaaaataatttgtgacaatagaatggagaaatagcactagtagtctaaatatgggtaagaaaagagagaaaagttttaggtgtctaaaatcatatgtttaatgcctaaaaaaagtcacataggaaaatgcatatggaaataaaatcagaaggcagaaggtatattatttttgtgaggattacttgaagtgctagtagacttgccagaggaaggaagagtgacagtaaatgaatgagaggtagctatgggtgaattacaaatctgtaggtagatttacaagtctgcagtggccgctttgctggcaatgctcatgtgacagcacactcaagtcacagtggctcatggtatgaatagtcactgtgagttgggaacatggtaacagccagctgcttagtgttttgatgaacacaatcatttagcagtctgaatttcagaacttaagctcaatcgctgggtgttttttatttggacaaagtggaaattgatggtaagtctctaaatttctgtggaaaactgagagacacaatcattccaggcctaaagaggtggttatcttcaactgatgatacttgcataactttcctttgtgtgggaggaggagaaagtaagtttttatttaattccgttacaacttccaggtgctctcctattttcctccttcctttcactgccaaacctctgcactaaattttctaaattctcaccttttgctgcctccctaagccttctgcattgttaacttccatccttactccttaaactgccttttttttttttagacggagtctcactctgtcactcaggctggagtcagtggcacgatcttcgctcactgcaacctctgcctcctgggttcaagcgattctcctgcctcagcctcctgagtagctaggactacaggtgcacaccaccaaacccagctcatttttgtatttttagtagagatgggatttctccatgttggccaggctggtctcaaactcctgaccttgtgatctgcccgcctcagcctcccaaagtgctgggattacaggcatgagccaccgtacctggccggaaactgctctcttaaaggtcacctgtgaccaacttcattttccttcttctcactactgagtttggtgcttttaaacatttcttccttcttgcagtgctttcttttctggctctaaagtatcttattttaactttcctcctctctttcctttgacttatttttgtctaaccacctcctgaacctgagtagtcagtaacccaaggatataatgtaaccttttttttttttaacttctgaaatagtaaatatttatttatttatttattttatatttaagttctagggtacatgtgtacaacgtgcaggttttttacatatgtatacatgtaacctttattaaaggccgactatgtgtatacattgttttatatgagtttatttaatctgcataatcaaggcaggagctagtgaacctcttttgtgaaaccttcatgaatactatagctctttttttttttttttttttttttgatatggggtctcactctgttacccaggctggagtgaagtggtgtgatcttggctcactgcaacctccacttcctggagtcaagcaattctcccgcctcagcctcctgagtagctgggactacaggcatactaacaatgcccagctaatttttgtgttttctgtagagatggggtttcgccatgttgcccaggctgatctcgaactcctgagctcaaagtgatccgcctgcctcggcctcccaaagtgctaggattacaggcatgaaacaccacgcccaacctcatgaatagtatagatcttgacctactattataggataaataaatgcatgtctacaaactcttgagccaacatattgttcataagggaaagctctcaaattctttactgttttacctttttctctcctaaatctagtcccatttcaataaattcctacttgaccctctatcaggtcctctgaaattccatctcaccagttctacctcaaatttattttctatcatttttttcctgtccctgttcttggattcttcaatctcaattggcttgacttggcttttctcttcctctctgtcctacagttctttcttttcattacagaaagtaaaaagtgaaagtcactcattagctcaccaaatcccactccaccacacagatatcactgttaatcaaccacattttcccctttaaaaagcccttttaaatctttaaatctgcacttggtgtaataatttcatttgtctccatttggagggctacttcctcttgtggaataaatcattctccctcatcctttcaggattccaaattaacattggcgctgggaagtcctgccctgtggaccctgtcaccactgccctcatcaaataatagaggatgccatacttgagaatttttgtgatgggttttctctttctcataacatcagagtcctttgtatctagatgtgctatacctgcccctcatcttatctgtatctttcacatccttcaagaacctaacgattacagctctcttttaactatcccctctccacatttctatttggcagtctgaaaccactcagaagtctcgcttcatgtttatctgtcttatctccttttgtaagtcctaagatccttaaggacagtgaccaatgttttatctttcttctctatattccacagctcctagtctgatattgagccaatagcaggcactcagaaggcagtaattgattgactgactgattgaattattgacaggccatggtttctgtcttttctactttaggtatgtggagagccaacgccataccattcagggagactacatagataccatggaagagcttgctgatttggtgggggtcaggcccaatctgctgtctctggccttcactgaccccaagctggcattacacttattactgggaccctgcactccaatccactatcgtgtacagggccctggaaagtgggatggggctcgaaaagctatcctcaccacagatgatcgcatcaggaagcctctgatgacaagagtagttgaaaggagtagttctatgacttcaacaatgacaataggcaagtttatgctagctcttgccttctttgctataattatagcttacttctagttgtcctattgtcactgccctgtttttcattgggaagcttatctacagatgccttcagaatctgacgagattgactctcagtttcatattgcccagaaatctactttaatgtctctttcgaaagcattaattcactttcctttttcctacaatgaaacctgttttccatttgtattaactcatctcccttccactcatgatccgtcactcttccttgtggtaatccctagactgggagctcaggtactcttttagtcatctttgtatgtctttagcagagttcttgacatgtggtaggtgcttaataaatgtttgttgtttatcaaattttatggtagggagagtaagtcagcatcggtataaaatcgcttactccacgtaactcttcttctgatagggtttgattttctattagaagctcaattttagttttttttcatattataactaaatatgtttcctgagagataagagaaataatgttcctacaatagttgtatgtatctaagataagacatatagatgcttaagacattttgtttcacttgctattcactagtgtacttgaaacatggtcatttttagcccttttccttaggaaccatgtctttattttctcaataaagaaattactttcaact

SEQ ID NO: 51 - DNA, 6269 bp, Homo sapiens
aaattataaatatattgtaaaataaatttgtaaagttgaattaacttagtgttgtaattcttaacaagaataacaagaagctttcagtagaggttagatattaatgttttccccaaaacttaaagcacttttcggggctgggcatggtggctcacgcctgtaatcccagcactttgggaggctgagtgaggtggatctcctgaggtcagaagttcgagaccagcctggccaaaatggtgaaaccctgtctctactaaaaatacaaaaattagccaggtgtcctggcgcatgcctgtaatcccagctacccaggaggctgaggcaggagaatttctggaacccgggaggcggaggctgcagtgagccaagatcgcaccactgcactccagcctgggcaatagagtgagactctgtctcaaaacaacaacaacaacagcaacaaaaccccaaaaaacaaaaacaaaaaaacccgcttttctgaaaaagaaatgtctatggattaggaaggtctgcctcccataggaagatgcaggtattgcacatagcccaaatatttgatgattccaggaccggcagatacacaagttatgaaactgtttgtaccttgaagaataacgagaagaggaggagaccaagaggaatagaagaaaaagaatagaaggaggaggaggaagaagggaaggaggactagaagaaaactacaataataacaacattgttgagaccacaagatcacgccactgggttttgctttatattttggaaaacactgtcacatccattttactaaaagccatgtatcattattgtagtccccagattgtcagggatccaaatattactgccttcttggtttctacaaacagagcacaggctggctgtgttcccattggtgtacactattgtgtcctggtcccatgccaggttgacacattgcctcattcctgggagggactaaggtgcctccctggggaataaatagagcagggctgggtactcacctccacagcaacttccttgatccctgccacgcacgactgaacacagacagcagccgcctcgccatgaagctgctgatggtcctcatgctggcggccctcctcctgcactgctatgcaggtgagttctgggcagagagggctgcttctgggctaggaattgtcacctgggcccctgtagaagaactcccaacctctaatccccagcacagacgagccccagtgtgaagggcctgggtgcgataggccttaggatccccatgagttcctgacaatcaagcatgcagtgtcctcatgggctgtcccctgcattggagctgcacacagtgtatcatggcactcagcgtctcaccatggtcacggtgaccatagaaaccaggatgagtctcaggattaaatattgaaatgaactatttcagtggggcaagggagagatggcatctacacctagaaatcaggaaataatcatgggtctccttgaatatggaacgaaataggaaacctcccaggacagaaggcccaggctgcagagtgtgacccagtgtctctcaccctgtgtggctcactctgtgttctcagagttgatctgggtccttctgggatgcccttaccctcccagttgcttcaggctcaaggcagacaggtgagaactcacaacccctggagtctccttccagcactaaagattcagtgggaggaaaaagccccggctgctggaatcagcgctaatatttccataggtagcctgccttgtgcagttcacaaaggtggattccaaaccctaccgtattggcatccaaggtaggtgcagatgtgtagaagggtgacaagctcacagtcaactaactggaaaatcacaaagtccagagcacaaccagctcacatgaagccacgtcctgagctcgttcctctcccttacagtgggaggtgacctcagatcccctcatgaacaagctctatttcacattcatgtgtgtgtgtgtgtgtgtgtgtgtgtgtgtgtgtgtgtgtgtttgagacagggtcttgctctgtcacccaggctgggactgggactggtgtgcaatggcacagtctcagctcactgcaacctcttcctcgaaggctcaagtaatgctcctgcctcagcctcccgagtagctgggactacaggtggacaccactatgcctggctaatttttaaattttttgtagagatgaggtctccctgtgttgtccaggctggtcttaaactcctgagctcaagcaattcgcctgccttggcctccctaagtgctgggattacaggcgtgagccaccatacctggccacacattcccttttattgcagtagagtcaacagaactaatggacaatgtcctagacccattcatctgaaatccttggaaaccctacctgatgctgggcatgataacagggaagcattgcatgactttgaaccaagaaagtccaagtagtgtttgctatgtccccccagtcagaacacctcatttctcgagggtcctcttcaccaagaatacacagggttgggcttctctgggtttggaaggtcagagagaatttgcagagcctgagtttacactcccagaattgagaactctgcatactgcaccaaaatctttctgaacctcggtctgtccctggaggtacgaagatagccagcttcccaattcatctgtagaatgaatcacacctctagtaatggcccatgttcttgtgtcttttttttttttttttttttttccagattctggctgcaaactcctggaggacatggttgaaaagaccatcaattccgacatatctatacctgaatacaaagagcttcttcaagagttcatagacagtgatgccgctgcagaggctatggggaaattcaagcagtgtttcctcaaccagtcacatagaactctgaaaaactttggactgatgatggtaatttgggtttcttcttatgtaccctttgaaaatcactgatcagaaccagcgggctctaaatttggcaccaagaatgccaagcaactggtgaacaaactttctttatatatcaattcattaaactttgtctccaggctgctttgccacttcacattgagaatctttagggagtgataaatggaaaaggcaaaaaggagaaaagaaagccttagagatcacccgtctacctctgacctcaccagtcccttctcacacagacacagacacacataagcacacaagtatagacacacacagacacacggggacaggcatcggcatttttttttttttttttgagacggagtttcgctctgtcactcaggctggagtgtagtggcgtgaatctcggctcactgcaacctccacctcccgggttcaagagatttgcctgcctccacctcccgagtagttgggattacaggtgtgcgccaccacgccgggctaatttttgtattttaactagagaaggagtttcaccatgttggccaggctggtctcaaactcctaacctcaagtgatctgcctcccttggcctcccagagttctgagattacaggtctgagcccccgcacccagccagaacatgcacatttttatcaagagaaaatatctggttctcaagagatcacacacttgtaggagcaatctactaagaaatttcctactttcacaaaaacaaatattcaaaacattcttatttttttttatctagctcagaaaatacaatttgtgcaaattctgcattttctaaaataaagaaaaaaatttttttgagatggagtttcactctgttgcccaggctggagtgcagtggcatgatcttcgttcactgcaacctctgcctcctgggatcaagcaattcttgtgcctcagactctcaggtagctgggactacaggcatgtaccaccatgcccagctaatttttgtatttttagtagagatgagattttaccatgttggccaggctggtcttgaactcctgacctcaggtgatctgcccgcctcggcctcccaaagtgctgggattacaggtgtgagccactgctcccggcctaaaataaagaatttaaaatgcaagtccaagcaaccaagatttgttagcatacatgactggaagtcatgcaccacttaattaagtgcctcatgaagtgggaagtgcagattatgggtatgaaacagcacgagtgctagaattgtttaaaacaaaagtcagtggttataacaaggagtatttctgtctgtttataaagatgtgttggttacgagttttgttttttgtttttcgtttttttcgagatggagtttagctcttgttgctcaggctggagtgcaatggcacgatctcggctcactacaatctccggctcctgagttcaagtgattctcctgcctcagtcttcggagtagctggaattactggcacacaacaccacagcctgctaatttttgtattttaagtagagatggggtttcaccatgttggccaggctggtctcaaactcctgacctcaggtgatctgcccgcttcagcctcccaaagtgctgggattacattttttttttaagaatttatttaataccctaaaattttatttaaaacattccataataaaaaatgtaaagatatatcaaatgctcaaggataaaaataaatattaactgcaatttgggatggttgaatcatttttttctttaaaaactcagattagccaggtgcatccctcatacctgtaatcccagcactttaggaggccaaggcgggcagatcacttgaggtcaggagttcaagaccagcctggccaacatgctgaaaccctgtctctactaaaaatacaaaaattagctaggcgtggtggcgcacacctgtaattccagctgcttgggtggctgaggcagaagaattacttgaagccaggaggcagagattgcagtgagccaagatagtgccaccgcactccagcctgggcaacagagtaagactccatctcaaaaacaaacaaacaaacaaaaatcctaaacaaaccaaaaaaacccctcagattaatcattcatattgtaaaactccagtgtttcttgtttccgtttttttgtctttgtttttgtttttgagacagagtcttgctcttttgcccaggctggaatgcagtggtacaatcacagctcactgcagcctccatctcctgggctcaagtgatcctcccgcttcagcctcctgagtagctgcgactacaggtgcacactaacacacctggcatatatatacatatatatacacacacacatatatacacacatatgtacacacatatgtacacatatgtacacatatatgtgcacatatacatgcatatatgtacacatatatgcacatatatacatatatacacacatatatacatatatacacatatatacacatatatacatatatacacatatatacacatatatatatatatatttttttttttgtagagatggcattttgtcatattgtccaggctggtttaaactcctggggtcaagcaatctgccctccttggcttcccaaagtgctgggattacaggcatgagccatcccacccagcccagctccaatatttcataggcctcaaaggtaatggtgaagagtctcagactgttacaacatttctaccttttatgcctgtgcagcaactcaaaaccatcacattcttgtatctgagctgagattttttaataattctgtgttgtaaaagtggtatcagaaacagtccaaatgatcaggtcttcaacaaatagtatatgcagcatatttattggataagttatttcaaaggatagaatttttggagaaaaaaagtattacatggatcactggtagggaagagatcctacaaccctggcccctgtttggcattatgaagtgtctcctagataacagaataaatggagaggggatgctggctttgcttccactgcaaatcctcctgagagttagctgtttgtggacaaatgcaagaaaacaagaagacaagttttaatatttgatttaataagtgaaatttgcaaacctaagtgacctgcttttgttttccagcatacagtgtacgacagcatttggtgtaatatgaagagtaattaactttacccaaggcgtttggctcagagggctacagactatggccagaactcatctgttgattgctagaaaccacttttctttcttgtgttgtctttttatgtggaaactgctagacaactgttgaaacctcaaattcatttccatttcaataaactaactgcaaatc

SEQ ID NO: 52 - DNA, 89060 bp, Homo sapiens
gataaaaataaacggatgaaaacaaaataccacgaaaacaataatcacaggaaagtaagaatggctatattattaatatgaaacaaagtagactttagaacacaaaagttactagagataaagattaacattacataatgataaaagggtcaattcaccaagaagacataacaattccaaatgttgcaaaatacatcaggcaaaacatgatagttttaaagggagaaatttgaaagtccctaagttttgttaaaatcttcaacattcctctcttagtaatcaacagaactaggagacagaaaattaggaaaaatatagaaaaaactgaacaatatcatcaaccaactaaatgtaatagatattatataatattccactcaacaccaaaaaactatacaacttttcaagtgcctatggaatatctgccaagatagatcatatcctgggtcatcaaataagccttaacaaatttgacatacaaaatattttttctgagtataattgaacttctgatttaaaattaaatcaataaccaaaagataagaaaatcttcagacacttggaaattaagcacatttctgattaatccgtgggtcaaataaattggaaaatagtctgaactgagtgaaaatgaagctgggaagcagaggaatgaaaattttgattatctaggtaaagctgtcaattaagcagactagagctctgggtagagagaagagcttttctctgattaagctgtttactttctcatggcttaaagacagcactttaaattttggtattagccacaataatcttggacgtaaaagagaaattgctccctataatatgatatagccaggcaacccagtataaatgccactgctctgcaggaactggccgaatatcaatgagaagacaaacagtccaagcatgatgacgtgaatgtgatgtttggcagggccaacagaattgagatcataacctccactctgaaagcagtcttcacagaaacttttcacagaagtcaaatagttaaagcaaattctagatacatggtagagaccaggagaaaatatgaataactttcttctaaacaaggagctcagtggataaaccatacctctagattccttgcttccattttcccagaagtaagttcactgtattttttctgttttgttttgtattttgcttttgtgtgtgagtttgtttcagaggttttgtcttttcttattcctatcacaaaattataaataaacctttataaactgaatgacaatcatctatgcagaaattattttgaaaaatattgggctactttaaagattttatatctggtaattaatattagataaataaaaacattgagttagaatgttttttaaaaaattatgcaaacattatgttgttttaaacataactgagtgtagaaataagtttaaattggctaaaaattttttgtgaagagcttagagttttaagaattgggttggaagactgagttgtttttgaagttaaagttatctactttgattgcacaataatgtagggcattttggataagtgttcttctgactttaagactgtttaccaagagcacttacagaaatatttttattgttcctatcgctcactcttagtctataagaattttagaaatgtaagattctttctaggatcttttactcgttggatacagtgagttgaatcagaatgtgaaatatgtagcttctctttaccacaatgttatttaaaatgtacattggtaaaaagaattttcatactcctatagtgaatacatgttgttctgaattttacaacagtataagaggataaaaatgagtcattacaatttgagactatttgccatatgtataataaagtattcatgtttttgctagcctttacataaactgcagaacatacaaaaattggaaagaaacaaagttggcaataatactttacgatggaagatataagggattggagtcagactggagtttgcatgctacctaagactgtagctgattccatagtgaggagatcatcctcttggccaatgtctattaacttcgccagtgaattatgcatttctgtagagaagctgtgatatatttgggcttgtgcatgaggtggagtgtagggaaacatcacactctggggactgttgtggggtggggggaggggggagggatagcattgggagatatacctaatgctagatgacgagttagtgggtgcagcgcaccagcgtggcacatgtatacatatgtaactaacctgcacaatgtgtacatgtaccctaaaacttaaagtataataataaaacgaaaaaaaaaaaagaaattcctcctgtacagagcttgcattggcggcagctgctttaagaacccagaaacttttgccctctctgtaggctagctcactgtgaaaatatcccatggattttacctaaaattgcttacagagagcggcattatacttctatagataattgcatcagtaaccagagaggagaagtacagcagcagactaccctctacccccggtaggagtagtagcacatcacagtttcagcaagttcaatcttgagcaaagaacatgatgtgattgtttgtgggtatgtctgtatacggagtgtgattttaggtaaggagagccttgcacagctctcttaaaagtatccatgctgaattttctgcaccttaacctaggctgctttactcttggaactgtctttccctcttctccttccatgggctctctgacctctttacttggtctgcttccacttaggcctgcccctcagcctcattgcatggccatgtgtaggttcttcttctagcagtgttctctgagactgctgtggctaatgtgccttctgttgcaactgacccctggacaccttacttgagatttggctctagaaagtagcaccaccctgtgtgtgatcctgtcccataaatgagatgatggcttcagttggggctcattcacttctcatcactatggaggagttcatagaaactgcatggccaacatggcatgcatacggagggagatcacttgcttcagaagtcaggacttatgagccaaatgatggtcttcagggtggagctgctggctttgtgctcaaaagtctggacccattcttccaagtcatgtccttcacatgcttcccagaaaactgatgatggtaccttccagaatctctttactttctataattcagcttaggtagcctgttttctcccacggcaaagaccatttgaaagcactctagtcctacagttttcaggagtggcttagcaaatcctatttgtgtagcagtggttgattgaagttctggaaagatgtggtgctcttattatgcactgaattatcttcttctgggaagtattttatgtgcctgctgcaataaactgtatgtataaattcccctacaaaatcaccccccatatacagacatacccagaaacaatcacatcatgttctttgctcaagattgaacatgctgaaactgtgatgtgctactactcctaccagggggtagagggtagtctactgctgtacttctcctctctggttactgatgcagttatctatagaagtataatgccactctctgtaagcaattttaggtaaaatccatgggatattttcacagtgagctagcctacagagaggacaaaagtttctgggttcttaaagcagctgccgccaatgcaagccctgtacaggaggaatttctacactccacctcctgcacaagcccaagtatatcaaagcctcgctacagaaatgcataattcattggcaaagttaatagacatttgatggtaaaaaatgaatctactttgtatgttctttaaattgaaaattgaatcacatttctacacaacaacaggcggatcacaaggtcaggagatcgagaccatccgagctaacaaggtgaaaccccatctctactaaaaacacaaaaaattagctgggcgtggtggcgggcgcttgtaatcccagctactcgggaggctgaggcaggagaatggcatgaacccaggaggcggagcttgcagtgagccgagatcgcaccactgcactccagcctgggcgacagagcgagactccatctcaaaaataaataaataaataaataaccaggataattagattggaattcagcagagtgttaaaataactagaaggcatttgtttgtaaaaagagaacagagataataaatacttttgagttttcataaaataagttatagtttcttagaaaagtatttaagagtaaccataaaagacatataaccaccttttacatctttgggacaggagaagaagtgaagaaggagaggaaaacattttcaattcaatagaaggtaaagatgtagacaaaactagaagcaaaagaaaagtaggtttaacgtgagaataagatagaatgagagatcatccaaaacaaaaattcatacatggtttaatgcatctcttaaaatatagttatctatcagtttagatttctaaacataatgcattgatagttttttatatagtaaccaaatatttaaaaatgcagcaaaaggttaacaacaaagagatagaaacagatacattaggcaaatattaacctacagaaacctagtgtctccatattatcagaaatagaagcaacctattactgaaacataaaaaagcaatgttttatgcacctagctacctatgctttaaatgcacttgctgaaaactaacagagatataataagaaattgccaaacctattattagagtggaaatttttaattgaactctattatgaaatgattgatctaggaaatataacattagaaaggatgctgaagatttgaagaacacaatgaaaaagattgaatagatacgtacaaaacacttcacctaaatggtgagttacaggtatgttaggtgcacgtggaacactttcaaatattaaaatatgctgcaccagcgaggaagtcttaaggaattttaaagaagcagtatcttactgagaagtcatttctttggtcacaatataattgttagaaatcaaaaataaaaagtcactaaaaacaaagaaacttcaatatagtgaatgctaaagaggtaatcctaagtaacatatgtatggtctattgccacatttatgttacatagcaaaaaggaaataaacccaaataacaacacacagcaataagcatttgtagtgtggtgtctgcagtggttcctaagaaactgctgatcttggataggcttgatggtatctctgggaggggactggctagcactctcaactggatgactgagaggactcagcttggtttcattccgcagtaggctaggccaggtctgctctcacagcaatggaagaaacaaaaaaacaagcagatacactcaaggtctcgggaggctgaggttcagaactggtgcgacatcacacctcccttcttctcttggcccaagtactagcctgccttgatgacaaaaactccaaaattaccagacaaagggtggacacagacagatggataattgggtcactgatgcaatcaatcactcaactccagaatccattttctcagccactctgctaacattagttcgttatttcagccaagaagccaaaggaaaaagtagcaaaaccaacccccaaaaagagtagaaataaaaccgtgaaaagtaagaggataaattaataaattagaaaacatagtaagcaatgaaaatgatgaaacagtaaactgctgttttgtttaaaaggccattaatacattcaaaattctagcaagactaatgaataaaaataaaaagaagcttaaaaatagaagaaaacatacatccatttataataggttttcaaaagtatttttagttatagatattttaaattcatgctaataaatctaaatatagtttgaagccaggtagcaggatgcctccagctttgttctttttgcttaggattgttttggctacgcgggctcttttttggttccacataaaatttaaagtagtttttttctattctgcaaagaaagtcaatggtagcttgatgggaatagcattgaatttataaattacttcgggcagtatggccattttcatgatattgattcttcctatctatgagcacgaaatgtttttccatttgtttgtgtcctttcttatttccttgagcagtggacggctttttgcttgtctattgttggtgtataggaatgcttgtgatttttgcacattgattttgtatcctgagactttgctgaagttgcctaccagcttaaggagttttggggctgagactatggggttttctaaatatagaatcgtgtcatcagcaaacagtgacaatttgacttcctctcttcctatttgaatacctttatttctttctcttgcctgattgcactggccagaacttccaatactatgttgaataggagtggtgagagagggcatccttgccttgtgccagttttcaaagggaatgcttccagcttttacccattcagtatgatattggctatggctctgcagtaaagagctcttgttattttgagatatgttccatcaatgcctagtttattgagaggttttaacatgaagggatgttgaattttatgaaaggccatttctgcatctattgagataatcatgtggtttttgtcattggttctgtttatgtgatggattacatttattgatttgcatatattgaaatagccttgcatcccagggatgaagcgacttgatcatggtggataagctttttgatgtgctgctggatttggtttgccagtattttattgacgattttcacatcgatattaatcagggatattggcctgaaattttccttttttgttgtgtctctgccaggttttggtagcaggatgatgttggcctcataatgtgagttagagaggagtccctctttttcgactgtttggaattgtttcagaaggaatgctaccagctcctcttgtaccactggtagaattcagctgtgaatctgtctggtcctgggctttttttgattggtaagctattaattactccttcaatctcagaacttgttatcagcctattcagggatttgactttttcctggtttagtcttaggagggtgtatgtgtcatggaatttatccatttcttctagattttctagtttaccatgctaactgacttcaaacaacactaggaggctacagtaaccaaaacaccatgatactggtgccaaaacagatatatagaccaatgaaacaggacagagacctcagaaattacaccacgcatctacaaccatctgatctttgacaaacctgacaaaaacaaacaatgtggaaaggattccctgttaaataaatggtgctgggaaagctggttagtcatatgcagaaaactgaaactggaccccttccttacaccttatacaaaaattaactcaaaatgttttaaagacttaaatgtaaaacccaaaaccataaaaaccctagaaaaaaacctaggcagtaccattcaggacataggcatgggcaaagacttcatgactaaaataccaaaagcaattgcaacaaaagccaaaattgacaaatgggatctcattaaactaaagagcgtctgcacagcaaaataaactatcatcagcgtgaacaggcaacctacagaatgggagaaaatttttgcaatctacccatctgacaaagggctaatgtctagaatctacaaggaaattaaacaaatttacaagaaaaaaacaatcccatcaaaaagtggacacaaaatatgaacagacacttctcaaaagaagacatttatgtggccaacaaacaaataaaaaaaactcatcaccactgatcactagagaaatgcaaatcaaaaccacaatgagatatcatttcatgccagtcagaatggcgattattaaaaagtcaggaaacaatagatgctgacaagactgtaaagaaataggaacacttttatactgttagtgggagtgtaaattagttcaaccattgtggaagacagtgtggcgattcctcaggatctaggatcagaaatacaatttgacccagcaatcccattactgggtatatacccaaaggaatataaatcattctactataaagacacttgcacacataatgtttattgcagcactatttacaatagcaaagacttggaaccaacccaaatgcccaacaatgttagactggctaaagaaagtgtggcacatatacaccatggaatactatgcagccatgaaaaagaatgagatcatgtcctttgcagggacatggatgaagctggaagccatcattctcagcaaactaacacaggaaaagaaaaccaaacaccacatgttcttactcgtaagtgggagttgaacaatgagaacacatggacacatcaaggggaacaatgcacaccagggcctgttgaggggtagagggcaaggggatgaagggcattagaacaaatacctaatgcgtgcggggcttaaaacctagatgacgggttgataggtgcagcaaaccaccatggttacatgtatacctatgtaacaaaactgcacattctgcacatgatcccagaacatgaagtaaaataaaaataaataaataaataaataatctaaatataatgaatacttttcagtgaaaattatcaaaattggatcaagttgaaacagacaacttgaatagaccagtcatatttaattaattgaaccttcgttaacagcaatgataatttagcccatccttatcccagaaacaacaggctcataaggttttatcagcaagtttactagccttctaagatcagatcttccatgtgttacaaactgccctggagaacagaaaaagagaaaatgctagccataataaagctaacataacactgaggctaaaagcagacaagcacattgtataaacaattaaattatagtacactgtaacttatgattatacacaatcccaagtaaaatattggcaaattcaattaagtagtatttaaaaataccttatgacaaattatagtatttgctggaaaacatgagagaaaacatcaatctaatttacatgttagtagattatattagatataatcataatcacaaaagaacataagaaaatatctaatgtccatgtagaagaaaactcaataccataaacattttaattatatctgaatgaatcaataaatttaatgcaatagtaatcagacctttatttatcatgaaacttgtcaaaatgtttccaatatgcatttagaagagtataagtagctaatataaattgaactgtagaataaatctaacaaaaattatttaatggctcaactacaatacaatttattttctttctttctctctctctgtctctctctctctctctctctctttcttttgatggagtctcactctgtcgcccaggctggagtgcagtggcgccatcttggctcactgcaacctctgcctcctgggttcaagcgattcccctgcctcagcctcgtgagtggcggggattgaaggtgcatgccaccatgcccagctaatttttttgtatttttagtagggacagggtttcaccatgttgcgcaggctggtatcaaactcctgagctcaggttatccgcctgcctcagcctcccaaactgctgggattacaggcatgagccaccatgcccggccaatacaatataatttcttgctcattaaactaatatatcagtttatcttcccatgataatctaggaaactgaattccatccgtcttttggccggctgtcttctaaggcatctacctatcagaagggaaaagaggatatagagagactcacctacttcctaatatcatgacttagaaatggcacattatttcttctgcatatattccattgactaggaagcaatcttatgtcattgtgaatggagtatagctctgtgctcagaaagaaaaagtaataaattttggtaaaaagcggctgggtgcgggggctcacgcctgtaatcccagcactttgggaggccaacgtgggcagatcatgaggtcaggagttcgagaccagcctggccaatatggtgagaccccatctctactaaaaatacaaaaattagctgggcatggtggtgggcgcctgtagtccctgctacttgggagactgaggcaggagaatcgcttgaacctgggaggcggagattgcagtgagccaagatggcgcccctgcactctagcctgggccacacagtgagactccatctcaaaaattaattaattaattaattaattaattaattttggtaaaaagctagcagtttctgtcacaaatagtaagctcccagaagagccaagacaattttgaaaaaaataaataagatgaagaacctgttctagaatttatgaaggcttattatgaagttctagtaactgctagtaactagactatgtgtgagaagtatacaaagagattaattgaaaactagaatacttcaaagtgcatacacgcataatatatatacatatgcgcacacacacacatatacacacaaacataaatacaaacacacacatatctgctattcgagagagaaggaataacaaatgaatacggaaagaaggaaccagaaagtagttcatgttggaacaatatgcttgagaaatgcagaaagaaaaaaactcatcaccaacgacttaggtcactctcttaggtcttacacaaaaataaactcagatgtatgaaagagtacatctttcatgtactcttgacaaatacttgagattattagaagaatatgaaggaatgtgcatttatgacttctgaaaaggaaagtgctttctaaacaggacacacacaccaaatacacaatcaccaaggaaaaggttgtttgaccacaacaaaacttaaacttgaatacaatagaagaaaattagagattgacaaaattaataactagcagcaaacaaatatctaaaatacataatgaactcctgcaaataggtatgacaaaaaaaaatcaactgagtacaaaaagctatttccagaagtctaagtggccattcaacatataagacgacgctcaaattctatgaaaaacaagacaacagacaacacaaattctaatactgagataccctacacactccatgtttgtaaataatttggctctgagaagctgcaaattgttttctctgtgttcctgttccaccctcaactttcaaaggccttgtgcacccaagcagtaaaggagaccccctccattatcttacccttcccccatccatagactgccatagctttttgctcagtgcagtgcttgagatatgggcaggaggaactctagatttcctgctccagcctcagtattaggtactatagatctggcccttgagatggggcttcctcaacatgtttttctccctacataccagccaattcctaccttgtatctgttgagaggttctggacctgtgagagcgtcctctcccccgccgtggtgagagcctgtctctgctttgtatccgtgctgggtccttgttgcaaatctcagctgcaaattatctttgcttgggaatgggaactggaagcttcctgccccacctgcagtggtagcaggctgttgctttttaccaggtgcaaggcttttatcatagagcgacgtggtttccttcctctccctccacaaagtggttttttgcttctacccataacttagcagcagaaattcacttggaacaggagtaaaggttgggggaaggggtggttggtggtttacagattgcccctcattagctgctgatttttgctttaactcctccccaagatgcaataacagcttgttttgtggggctgacagggattcctgtccttctaccaaggtttctagatttgccctttggaaaaaatgttctgagacatgggtagattttgtggcctgtgagctactgggggtctttcaggtctcttgtttgcatatgtatgtatatgtgtatatatatatatatatatatatatatatatatatatatatataactttaagttctgggctacatgtgctgaacatgcaggtttgttacatagatatacatgtgtcatggtggtttgctgcacccatcaacccatcatctaggttttaagccccacatgcattaggtatttgtcctaatgctctcccttccctttcctctcaccccccaacaggacccagtgtgtgatgttcccctccctgtgaccatgtgttctccttgttcaactcccacttatgagcgagaacatgaggtgtttggttttctgttcctgtgttattttgctgaggatgatggcttccagcttcatccatgtccctgcaaaggacacgatctcattctttttcatggctgcatagtattccatggtgtatatatgccacatttttctttatgcagtctatcattgatggggatttgggttggttccaactctttgctattgtaattttttttaatgaatactaggtgaagcctgtaaaaaaagagttgacaaatgtgctggggtcctggtaattgtaaacaaacacgcaagctgtgggtccacactcagccattaaaaatttaacatttcagctgctttctccctacctgcttttatagtagccatgtctttctctaatactctaccaattctgaaactgttcatgggtcccttttatccctggagaaggcttttaccctttggactttagtttacctagttacctgtgaactcagctctttgatagacccaagaaaagttataattttatagattatctgactttgtttcattattaggaaagtagcaacattctcttgagaatttatgcattgtaagtgaaagaaaaatccaggaaatcttatagagaatggcaatatggttatagatgagaatgtggaaaagatgaattttgaaatacttcctatcatagtacaaattgctacaatgattttagaaaaaagtatatctatacacatacacggagatcatatatatggaaatacgtgtgtgtatttttcctgatgactctgcataataaacataaataaattcttaaagatggaaacaataaataaatgtcactttaaaatgacattcgattaaagtgacattttaaaaagacaatgtaaagctttttccaggccaaactatggtgattatcctatattaagattttaattcttcaaagaaagatagtaaaaagttcaatttctttcactagggaaagaaaattttctttcatcccacaacaaattagtaaagagagcaattatttctgccagaaataacaaagatcccattaaattgtcttagatagatcaattcctaaaacagattatttattcaggttcttaagctaaatattatagagtcattaaattgggtgttcaaggatgtatttattgaaattaagagtggtgtatgtgtaggtgttggtctgggtgcaatctggggacagaaactacatagtaattaaatgaagtaagtttaatatacagaactattgaatagtgacaggagaataactataaagatggactgagagctcaagagggcttcctagggctgagggagaatatccaaagaagaataaacatgaggagataaggtattgacaattggataagaagtggttgaaacccaccgaatggcaaagaagtctgaatggcaagctgtggacaccagtactagagtgcactccttttgcaacaggacggccaaaggaaacagagcttcgaggaaagggatgtagctatctggggctcccagatatactactgctacccaagtcaagagctagaggaaacacacagtgaatcctgcacactctaggtactttgcattggagaaaacaatttactcagtggggaaaaatacattctatagcaactcagcaaatgaactattctgatacctggatggcatcagatgcctgcagtgtctctactgtcctctctgctgaaacagcataacatcatgccagctggcaaaggaaagtacttaaaggattcagatccatttttatagagcaggctatgcagagtgaatttagggctgagagacagtaaattgataacaggcacagggcatcacaaataaatgatggaacagagtctgcaagtggggacggaaggagagcatgggagtaatacaatgctgacttgggaacactcagactctttgcactcatttggaacattggagtattaggctacgtttttttgttgtttgcaggatatttctttttcttaagaacttcatattaattttatcttctttctttttcattaaacaagacaagatgaggaagagaaagatcagtgtgtgtcaacaaacttgggccttattatgcaagaactttcttaaaaaatggagaatgaaaagagagtccttaatggtatgactcaatatccgtgttattctctatttatgataggaaaatacgtgttgcctgggagttatctatgccatgtgtatctcccccgacacatacaccaaaaacactaaaatacagcaacgtttatacaacagaaaacgctattcttcaggccatgaatctgtttgaagatatttcagttgacatgggctcataaattgaggtctgaaaccactgaatctggtagcaattgagaaatcaatacatgttttaaaagccaatggtcacatttgttactagtgtccccagtcatggagactagggttaagatactgacattccaaagatatggtaaacaaaccaacccaccacaatgggtaactggcattttctctttgagatctttttctcttcttgaaacaattagttttcttcaaaaaagtagaaaagttggaattgtattaaattccaagaagaaaattagcattagctcttataatcttaccatataaaaaatcttgattaaactttggtatattttaaaaatcagatcgatatagctaggtagcatttttaactaaattggaattccactatacatacatcgtaaagttttttcccctaagatcatgcattttggaaataaagtgatttcttattgggagttcgcatgtgatcaggatttataactaacgaagatactatccctccgatactatcttattattagaattatcagaatgcccttacaaactggtatactgttgagtttgaaattccagaatcttggcatgtaaccagtatatcattactaagctagcaatgccttggaactatctcttaaaacacattgactttcagcagactttaaacagtttataatatgggatatattgaagttagaaaagtaaaaaagaggcaaactttatgacaaaatgattgtggatgactaattttaaataagacttttctttatcttttttcctgtattatataggaatggctgaattcattgctcctactactttgtttgtatatatatcctcatagtcatcaagtaaatgatttttcttcactgcttaccatggacctgggacgggtagatacatttaatgaatccagattttctgttgtatacacacctgtcaccaacacgacccaacagataatgaataaagtagcctctactcccttcctggcaggtaagttttctagttacttaagaagaatgtctggtgtgaatatttggtttatttgaccgcagatttatacatttaatttgtatttcagtttgataattaaactttctggagtacatgaattgggaatgtgtcttccctttattggaagtaacatctcaccactcagtatctaagttaaaactacatgtattgcttgccaaacaagggtttaccatttggggtgcgcagtctctcaaaaagaaacttgttgatctggtataggatttgaggaagcatgaaattatacagactggtgcacatttagagcagtagtgtttagggatatgttgacatgtgactctgaaagcattgtcaccaaaatgaaatcgttgctgtagtgttttcttgttcttatagacaaagaaaaaccagtctcttcttttcctaaatttgattataggaattttaaccctaccttttaacaccaaaaacatgtgcttgctctatttgaatattcctttgagtattctgtatttcagattttcatccttcagcattaaggtacttaacgagttaaggttaagtagttgttaagttgagttaaggttaaggttaacttaacgagtaccttaaagctgaagggtaaagatcatttttataacaatcatttttacaacaatgctctgaaattagaggagatgcagcctggtacaaaggcaagagaactagacttagagtcagaggacatttgattaaaagtagttctaagagtccactcagaactgctgtgatacatatgtgtctggagtgcattttgaaagccatcagcttctcttagccttattattagcaaacgcaaaataagattaacaatttatgcaacaataaactcttacagtttgaagaaataagaccttgtgttcgatagatcagtagggtgactagttaacaatgatctataaaaaataatactatatttttcataaatatttcagttgagcgtaagaggcccaactcaatctgtcttaagaaaaagaatcttttgtctagcttaaaagagcagagtattaatgcaaggcagattagaggtttatcaccaacagaagtaaatctctgcccctccgatatacagctttgtgtgctggcttcattcacaggttggttctcccagaggcagagttggtctgcagactctccagatttaagccctcccagattagcaactccagtgaaaagattacagatcatttctgatagttcacaataacttcaaggattttatccacaggaacaaataggtgactttgggttagtgttgatcttggttcaccgagaactaatctctttggataggggatatgcggtattttcattgcccacttgttgagttcccaggtcatgaaccacattgaaaccacaggatatgtgagcagaggaagggaagtatcccaaatggatcatagtgtgtttttattagaagaactggatgtcaacagataaaaacaacatatgtcctttacaactataaatgcatacttcaaagggaaatctgtggtgatcgccctgtcattcattcataggctgggtcgagggctaaggtaaagattaaaattagtgctatagtgagtataagttttaagttgttcatttgagatgctcatggtaatggtaacaggaggatggtttctagatcagctagtaaaaatgtaatggctactaagaattttgtagagaatggcaaatggtgtgtcctgttggatcggacccacattcatatgggcatgatttttctgtataaatatttagttgttataaccagaataactacaaaaataatgctagcaatgtatttgtcaataaagttaataagaagttagttattctgttttggattataccaaacctaactgattgaaagccaactacgctaatactaaaagaagattctcattaacaaatggaggtagaagtacaggaacagtcagactatatctacaggatgtcagtatcaggcagcagcttcaaatcagaattgatggttggatgtaaagtgagatttaatttgatgagttgaataattttttatgagttgagttataattttaaagtgacttcgagtttgtacaactgtgtgagtattctaaaaaccatgaaattattaaaagggtgaatattatggtatgtgaattacatcccaatttttaaaggaatataaaaatttgacttagaaggtactgactattcattttaagcaacataactcccaccaagggcgttcttctaaggagaacctatgcatcttgctccaccaagtcactggaagcctgcataacctctttttttcctttctttgtcaacttccgtccaaattccactcaagcttaagtaattattaatcttatgcctggattctgaccccttcactggattctgtatccagtaatccagttcatgcacttgctatttggactgtctatggccagagtttccagagtatgttggacttttccttcctgtgagttatccaaaatatgctttccaacggcgcctcaccaagcatcacaccattagttccacatacattttaatgcctatattgtgcatcttacctaccaacactgaatccacttctgattcaagattataatgtgatatgaactatccacctaaggtccagtctcctaaacggccctgagacgtgtctgctcttgctgtttcacagacgtccataacaagacccaatgtcaggaacttgtgcttctcgacattacctcattcaaaaccacatgcaattataataataaatattcattaaatgctacaatatggtatatttctacaaaaactgtattctgtaaaaagagaatattttgtaatgatattattctatattctgtactctattaatattctataataataataataatggttattaagtttattttacaaatatagaaattgagtaacaaagggtaaggaatttgctcatgatgacataagtttgagaataaaattaattctatcaaaatacatacttcttgctccctctacattcatcttcaacacttccaccccaatccagaacttttcttgtattttgtctcatttttcagtattaataaaacatccatgtggcctcagacaaaatacctacagaaaagagggattctttcagtgatgtcaacatagtttcttaacatgtttttaaatttatcaccttttttagcttattaaccataccatcaggattattaaagaaaaataaatttgtataggtatgtccacctgatacaaaacagtgcctaattgcaatttaaatatctatctctctatatttaccatttcaaatttataggaatgataactatttttgaacagtttaattggtatagtaggacattgtatgtgattgaaattggctcagtaatcacaacatatgaaaataaaataactaattttcatgtatttcttctgattgcatctagatggaactttagaaatttctctcccacccaacattttagtctaactttctaaaagttaatacttgataatgttttatttccatagaaaactctagtaaaagcaattcaacatgacatcctgaagttgtgtctcctagtaatttactaacaataatattccttcttgtaacaaaaggtaaagaggtcttgggactgccagatgaggaaagtattaaagaattcacagcaaattatcctgaagaaatagtaagagtcacctttactaatacatactcatatcatttgaagttcttgctaggacatggaatgccagcaaagaaggagcacaaggaccatacaggtaattttatggctctaaaatttcactactctctatttcaattatgtcataagtcatgtgtgggaatagaggttagtatgccaaattagagcatcactatctgtcataatgatgtatgcatgtccctcaacatttaaaaaaaaattcatttttgggcataagaacatatcgataagtggtcattatatatagttatctacatacatttacatagatatatatttatatatgtaaatgaaatatgtattcatatgtacacacatagatattatatggaatatatgattgttaaaagaaaacaaggtagtttatggataagatagaacaaatttcccttcaaataagctcagttgttcaaattatactacaaggctatagtaactaaaacagcatgatactggtataaaaatagacatgtacataaatagaacagaatagagaaaccagaatgaagccacatacctacaatcaaatgatatttgacaaagtcaacaaaaatatacactgggggaaaaatccttttcaataaattgtactgggaaaattgaatagccttatgcagaacaatagaactggacccatatctctcaccatatacaaaaattaactcaagatggattaaaacctaaacataggacctgaacctataaaaattcaggaagaaaaaactaggaataacctcttctggacattgggctaggaaaagaatttgtgacttagttctcaaaagcaaatacaacaaaaacaaaaatagaaaaacgagacttaattaaactaaaaaaaacttctgcaaagcaaaagaaacaatcaacagagtaaacagatgacctacagatggaaaaaaaaatcgcaaactatgcattcaacaaagaactcaaagaactcaacaagcaaaacaaataacccatttgcctatttttcagtgcagttatttgagttgtttgaattcttcttttttcacaagaagacatacaagcaaccaaccaacgtaaaaaaatgctccacatcactaattatcagaaaatgcaaattaaaaccaggagataaccattttaccctagtcggaatggctattagtaaaaagtctaaaaaaatcagatgtttgcaaagatgcgaagaaaagataacacttatacatcgttggtagaagtgtaaattagtacaacctttatggacaacagtatggagatttctcaaagaaataaaaacaaactaccatttgatccagcaacttcactactgggtatctacccagaggaaaaaaaatcattatatttaaaaagatacctgcactcatatgtttattgcagcactattcacaaaagcaaagatagagaattaacataagtgtccatcaacagagggctggataaagaagataatatatatatatatatatatatatatataggaatactactcagccataaattaaaatattgataaatttgactagacataaattttaagaacgtccctttatcaaaagaaccatagagatagtgaaaaataaaggcaaaaattgtgataaagtggccgggcgtggtggctcatgtctgtaatcctagcactttgggaggccaagccgggcagattgcctgagctcaagagttcgagatcagcctgggcaacatggtgaaaccccgtctctactgaaacacacacacacacacacacacacacacacaattagccaggcgtggcagcgtctgcctgtagtcccagctactcaggaggctgaggcaggagaattgcttgaacttgggaggcagagcttgcagtgagccgagattgcaccactgtactccactgaatgccagcctgagtgacagagtgagactccatctctaaaaaaaaaaaaaaaaaggtgataaagtgtttataacagaaaaatctaacaaaaaattaattccagaatatgtaaatatttactttgaataaataggaaaaagatcaaaaatagaaaaataacaaaaggacattaataggaatttcataaaacaacacagatcaagaataagcactaggagaggtgtttttcctcattagcaaccaggaaactgcgtgttgaaaccacatgttatatcacttcatgttcataagatttgcaaaaattagcaaatagaacaattcgaagtattgacaaggatatgtagcaaagagaacacctatccaactttacaaaatttgtaaattccacaaaaattgagaaattttatcttaaagttgaagtgcacataacttataactcatcatcatagaaatcttattagtgaaactctcatacctgtgttaaagatttgcagcctattctcctcttcttccagaggacatagaataattactttttgtagtcataataagatagctagacccaaggcatttaaatgcaggtataagttcttcatcttttctcacctgcttctgcaaactaaggagttgtgtataatacagacagtacaactcaaccctcctaccaaacacctctgctgaatttgtagcctgagtgagaaatacacgttcactgtgataaatcactgagatttaggggttattactgtaacatataagagactatcctgaccaatacagatatatttacaagaagacatatatacagatttttatagcagcagatttttttttctggtaatcacaaaaagaaaaaaggaactaaccaaattgttatcaacaggagaatggataaatatattgatttacattcctgcaatgggattccataaccataaaaaagaagaaaaaattaaatgaggcaatttatttacatttcaaaatcataatatggaacaaatgaacatagttcatagtaattattagtagagtttaattttttaaattacatatatagtttagagatatgtagtggcatatatatatacataacgttcaggaaagcagttagctagttagaaacttggtgctggggaagtgcacaagagattctaattgtatttgaaatgatgcatttattttgcaaatttgtagtgagtccatgcgtgtttattgtatttttatatcattcgtatatctgaaatatttcaagatgatttcatgtaatatgcatttaattcctatactcaattttaattcatcttattcaaggatatctctttaatatagtttactattaaatggactgacagctctttttgaataaatccttttcttcaaaagatattctgattggcatgatttaagcgtagtaagtaatcttacttgaacttccattggcctattatgcccgtgttatatccagtgttagaaaaagctttagtttagtgtctctcaatccatgttaggctctgtgaacttttgaaaaacattaaaatatgtagttttcacaatacaaatcagaaaagagaagagaccaacaaaattcttcatcagcagaaaagcacaggacacggtatgagaaagcttagagtgttataatttaatgtaaaacatttcctaagagtgctccacctcatgattctgcctgattcattttgagaatcattgttataatttatgttttcataagctttgagtcaaaataagaacatttggaatttggggtcattgtaaagtccactgtttgctataatcagtattaaaatcatatttcaataatatagatagtgatgtaatgatagttatgatttgttttttcacaaagctcattgttatgaaacaaatgaagatgtttactgtgaagtttcagtattttggaaggaaggttttgtggctcttcaagctgccattaatgctgctattatagaagtgagtacaaaatgttcaaagcaaactaatgtttaatgcaagttaatgatattagaggcatcaaaagtttcatggaagaaaatataagtggatagccttgttatttcctttgctcactctgaagtttactgaagttactatataccacggaatgtagatacaaacagaagaaaaagtatctcattcatggactcaactttgttgggaagccaggaatataagaaaattattagaacagaagtagactattacagaactataaatcaggtcctcataagtaaatgagtaaaaacctctcagccttagaatgccatggaagaatgcctaattgaaataacattccagcttgaagcttgagatgaggggtggcttactgaatatataaattgagaaaagccatgccaagcaaatcataaagtaatgttaggcagggaggtaatgaaacacacagtaaattctgagagtggtgagtaactcaaaatgcctggactccgaggtcccagcaggtcaatgacaggacatagaagtggaaatttaggttagtatcaaatcccaataggccaatcatacatccacaagaaaatagatggttaaaagaaaactgcatgctgttcattaacgtacaaattttgcttattaatgcctttcttcagatcacaacaaatcactcagtgatggaggagctgatgtcagttactggaaaaaatatgaagatgcattccttcattggtcaatcaggagttataactgatttgtaccttttttcctgcattatttcattttcctcattcatttactatgcatctgttaatgtcacaagagagaggaaaaggatgaaggccttgatgacaatgatgggtcttcgggattcagcgttctggtgagtcaaacgcagcacaaataaataaacggaggaactcaggaaaactgggaatcttcaatgcatctttttttttttgaaatggagtctcgctctgtcgcccaggctggagtgcagtggcgtgatctcagctcactgcaagctccgcctcacaggttcacgccattctcctgcctcggcctcccaagtagctgggactgcaggtgccgaccaccatgcctggataattttttgtattttctgtagagacggggtttcaccgtgttagccaggatggtctcgatctcctgacctcgtgatccacccacctcggcctcccaaagtgctgggattacaggcgcgagccaccacgcccggcctcttcaatgcgtctttattaaaacctgtttctccacaaccaaggggtacaaatgagagatacctacacagaataatttcagatcatgaacaaatttccacttagttaatttcagtggggagaaatgctctgcagtgatggacaaaaaaaaaaaaaaaaaaaaaaaaaggaaatgtattttgcttctggaaattttacaggactaagtagagaggctggtcatttaatatatttaacaatctctgacccaattttatctaaatctatttcagattcactgtactgtgaaggaactgctataggaaataagataaaaggggacagaatgtgctaacatttaagaaaatacaacttccattacgaataatattgacttttttagaaaggaggaagataatcttttaaagaaacataaaaagtaaataaaaaaactttgagaaaacaaataaggagccaaatgcagaattttacagaaaaaataatgtcacaactatcacacatcaatgtccatttaaaaaaatgtgttgccatgaataagaaaatgccacttttaaacattctttagtaacaaggaaagaaatataaaaatcctttatccccatgaatggtataaactgtcattggtgtaatgtttgccaggctgaggctgcgtcttactgtgcttctctgagttaaggaagaagattggggttaggttattggttgattgtgaagaaggtgtaatgaggaatggccatggcaagagaggcgtaaacaagatagacaatggtgtctgtgccagacagaggtgagatgtgagctaggaggggattgaaagggaaaaagaagccgaggaccaggaactcctttgagactgaggaacatgcttggtgtgcctgagggaatgagctggcaaaacaggatggtgaataggggctgggtagtgtgggtttaaaatgtcagaggttgggtgattccaagaatggacaaggttctgtgtgagaacttatgaataattgactgaaagagcatggaggtgatgtttacagggagtaggacattaaataacagagaggctagggaggcagatgggctgtgcatagggcaacaaattaggagtctggaagagttccttccagtattaacatcttatacatcaatattgacctcttgtttgaattaatactggagggaaacgtagcagagcagtgaaatctaaagactatagagccaaaacccctgaacttgaaacatagttacataacacccttgttcattaggttctctatcaataagatgaggaaaataatggtattctgaatagggctattgggagaataaaatgctttaatgtttgctaagttttcttcaatgcatattaattgctatgtgtgtgagttattattgtgttggctttgcagctgttttgtttttgttttttaaaattattatttcattatagttttcaaagaatattgtaaaacaaaagaaaagaaattgatgaggaaaggaaagtgaattattctgacataaaagaatgggattcaaaaaaaatctttcttaacaaaaacaatgaacggaactaaaggcaagtatgtagacttttcagtgaacacatccagagaaagatgacaacagcttttggggaaggagtgacatgaccaaattacacataaggaagaatttcttgtctctgaggaagcttgtgatggtcctgaacttggagagactccagagaggagagaagggtctgaggttcactgaggggctaccctgtattaagacagtgccctacatagccatcatcttatttagtcttcagtggtagtattattcctggtgtccagagaaataaaggaataatagaggggttacagaggttgcccaaggttacagagcaagaatgcagcaaataaaatgttcgatccaaaatctattacactggaaacctaattccccccccaccgcccccaccccccagaacaatgtgcatgtgtgtgtgaatgtatttctgaaatcaattttaggaaaaacaattcctaattcccaaagaatattcctaattctaaagaattctgcccaaaacttttaccttgtatttatatatcttagaacacccaataaataaatgttgaaagagagaatgaatggatgaataagtgaatgaagagttatcttagaatccatttcaggtcttccttttcaagtgaacataaaatactaaaataacattttgtttccacattaggctctcctggggtttgctctatgctggtttcatcttcattatggcccttttcttggcacttgttataagatctacccagtttatcattttgtctggcttcatggtagtcttcagcctctttctcctgtatggattatctttggtgagttagtgaattaaatatctttccatccacctatagcctaaaaattgtttgtttccgactgattactctgtatgcctccttttttttctacctactctgtttgcatgtgaaaaatctataaacaggtacaatttgatttgaggtgttttgtaatgtcaatttttagtgcaatttgcagagcatagttttgtatgttatatacaaaataactataatatacaactgttacatacacaaaataactataattttgtatatctattttattatgctagtaataatgttagagaaacataaaccaactagatcttctctcattttaggtagctttggctttcttaatgagcatcttggtaaagaaatctttcctcaccggcctggtcgtgttcctcctcactgtcttttgggggtgtctggggttcacatcactgtacagacaccttcctgcatccttggagtggattttaagcttgcttagtccctttgccttcatgcttggaatggcccaggtgagatgccatctgaatgtctattaatggcatttctgaaacatctgtccctctggaatccataggctgtaatcatttacaaactcagcattgtaaggcttaaaattctagcgaaggctgttgtaaagttgcaaagacagaacttttaaaagcttggaaattatttagcccagcaaaataagacatttggaaagtgaaaaaaagaggatcaacatacaattatttaaaggcaatataaagtattttcttaggctattaattaaatatggacatgtggcaaatctaattataaataactattccagttcatgtttttacctagtaattgaagagaatacgtgattaaaaaccattaaatcaaattaaattaaaaatttaaaacatctggaaaattcattagtaaattatgtttctattcataaaatgtcttttctgtttatgtgattcttattgaattccccttgccttccctctaactaaatggaaatgtcaaccattaaatatccattatttagtgtttaacaaaaggattgttaattataaagagctcattaacttgaacatcatagacaagcccacttctggttctacttaaacacagcagtgccttttgcccagaaattctccctcatgccgccaatttacatggatcaccacaccttttgactgtgtcctatttggtaaaagttcatctaagttcgatctcaaatgtcatctcttcccatacttccctacttcctcctaatgtttcaatttcatttggaacatatttttatcatagcaattactaaattgcattctagttgctcatatgtccatgccttccaaggcatagatttgagaaccataaaggaggcagtctccctatataactctattctcagtatgaggcaataagtagtcatttcattactatgctaaacctaactgtttaaaatgtatcttatacctaatttcccttaattaattactttttaattttcagcttttacacttggactatgatttgaattctaatgcatttcctcatccatcggacggctcaaatctcattgtagcaacaaatttcatgttggcatttgacacttgcctctatctggcattggcgatttactttgaaaaaattttgccaagtgagtaatgatatgattaaaatcatatatcatttaaatagttttatttctgaaaacaaatctcctaatggatatactatttatattttaagaactattttgtgtatcaacagcaaagagaggaacaaagtcgtcgctactggccaaattatttcttcatttctttctcactacttgacttgtcagaactaaagcctgaattttgtttatagaatcactaaccttcatttgaacttcactttaagtatatggtatttttttttttagacctcttagaaagctagttcctaaacagttctggtaatcatggtcatttatagctgcttatgtctaactgtttagctcgatggttctgagctccggctggacaacagaatcatgtgaagaattttaaagcaagtctaagcccagctcaacctgaagagattctgatttaattaatcaatgcatctacgtttaaaaaaaaatctccccagaagttcacaataggaaagccaatatatcataaattttcatttgtatcaccttgcaacatacaagaatatgagttacacaaaagcagggattcgttttgttcacagatgagatttaagcacccactgcagtgtctcatgcaccctagatacttgtgtgcttcactttctttttttttctttttgagacagactctcactctgtcatccaggctggagtgcagtggcacaatctcggctcactgaaacctctgcctctccagctcaggcaattctcctgcctcagcctcccaagtagctgggattacagatgtgtgccacacgcctggctaatttttctgtttttagtagagacgatggggtttcaccatgttgatcaggctggtctcgaactcctgatctcaggtaatccacccgcctcggcctcccaaagtgctgggattacaggcatgagccacagtgcccggcttgcttcacttttttctccctccttttataaccaaaggcaggccctgattctcccttctgcgtttcctattcaagacagaatgccaagggccctttattcaaaaagcaatgaatacacacttttggaaagggaagaaggggaaagggtgagcaggaagacagccacatcttgaggcaggaaattcatcctgttttgtttttgtttttgttgtttttaagacaatcctttaagaattactgtctcttccttttaaaagaacccagaacaaaagatgtcaggatccactattgttggctagcacacttattacacaattagaattgtttgaatatggtatgttttcatttgattttttccagtagaggtaaaaattacataactgattagaaaaattacttttttgcctactaatattttaaggctttctaccccttgttaacattgcttatttaagacacatacttaaatatattttctctgttctacttttgtttttatggcaaaatctcactgacttttttttgtgtttctatcatactgtatatccctggcatgctgtgtatagttcaggaaatttactcgtgtgacccttgtgcttactaattcttccttttctccttctacttattaaaacatcctggttgtattatttttcatttttgtttatttttccaatgtgtttattctcagtggatccacaaacagatgtcactgtgtttacaattgcttattagtatcctcttaggtaattgttttctctaaccaatttaaattttattttggtgtgcactatgtgatatattccatctttttttagtccttgtttcaaacatactctaatgatattactttaaatattctctttgtacatgttttatcaagttatatcacatattgttacattttcatggctgcattttattttttacttaacattatgtcacaaaaatatctttcacatccatgctttttccagtttcaaaagcatagtattttattattataactagaaaatttatttcatccaaataagtgagttgctccattttcttcctaattgtctctgctcactaagcttgaacttaagaccagaggtgactttgttcaaaacacttctaaagataataaataagaatgacagaaaaattaactggataaaatgacagcattatttcatggtaaatctggtggcagaaggtatccagttatggtggcatgcttttatttgctagatttttcttttgtcaaaagggagagataggtgctaacaacataccatgtggcaggtatacagagagtgtaagacatttattgcatgaatgaaggactgaacatgtgagaaatacacagaagtttgaaaacccataaccttacagtggggatagttgcagaatattagtgaagtacgattcttccgtttcataatgtttcctaatatgaagaaaaacagaagtgatcatagaatactaatacagctggattcatttccagcaagatgtttatgagtaatatgtctttaaagcagatcataaatttgcttaagaggaaaattatggtttgggaatgaaataaagcagaaatacaaaatagctttaaaagtattcattttgtgttaagtttcaattaattattttatcgtgttctttttctttcttacaaatgtgtcatttacttttcttaaatcctattctatcttcttttggattttttttaaaggtatccaatagtcattctcaatttcttctttctttgcctatgtaatgacacctggtcttctagacagaattcagcatgcctgcatatcttacattagcaattcaatctgtctttcttgaggttaagaaattctaaaacatttatttaaattccttttgaaatatttaaaaatcacagtttcattgcttccgataggatttattatagtagagacatctggtatttttttttccttatgaagctacatgtgtcaaaacgtgcattacctgctgttgaccacatgttcaggtttagcaacaaagggctgtgttgccgtgctacattactgtgactctctctccctaacgtggtcattgacccaatatttaattgtcttctggccatgtagatgaatatggacatcgacgtccacctttgtttttcctgaagtcctcattttggtctcaaacacaaaagactgatcacgtggcccttgaagatgaaatggatgccgatccttcatttcatgactcttttgaacaagcgcctccagaattccaagggaaagaagccatcaggtaataaggctgcaggtggagaacagggcaaaaaggcaggaagctaagagatagcacctgaggcaagcagtgttcccttttgtgctctgtagacagttcccacctgtcctcacctatgctgcttctgtcactttccatctcaagttcaaagaaagatccctttaccaaccccttacagcctaacattgtcgacatttacactaaataaaagcttaaattttaccagctaagataattcaacaaaacccttgcccggattcagtcttttacttgtttctcttcaccctcattgctttctgggtctcagttattcactctttgtccccacctcatctatctcccttttttttttttttgacggaattttgctcttgttgcccaggctggagtgcaatggtgcaatctcagctcactgcaacttccacctcccaggttcaagcgattctcctgcctcagcctcccaagtagttggaattacaggcacccaccaccaagcccagctaattttgtgttttgaatagagacggggtttctccatgttggtcaggctggtctttaacacccaacttcacttggcctcacaaagtgctgggattacaggcatgagccaccgcgcctggccttttctctccactttttaaacttcttatttttcttctattttttgtcctttaaaagaagatgaaagagtaagaaagaaggacaaagaaaaggcctagaggtagatacaaagggaattcagggagaggtgccctgcagagttaagcctatctcattctgtgtgacaacaaaatgtccattttgtttggtgctggtgacttttatttctagatatgagaaaataggaagaaagtccttaagatccttggctgtccaagtcatactcatcatcaatgaccagcctgtgtcagtcccctgtgaaatgtctcagattatcccaggttgctgaacttctaaggagcccatttcattttgttcttttaacctgttccatatttatcttccatatttttatttgtcccacaactaagctaggtttactctagcagagcagctcagagcaaaacagtggctttatttgaggtgcttgtgtgtttctttttgttcctctttgatcgctttaacaccttgcccaattataagtgctgtggaatgagagtaaaatggaatttaaaataagaatatttaacgagacagttttggccaggagcggtggctcacacctgcaatcccaacactttaggaggctgaggctagtggatcacttcagctcaggagtttgagaccagcttgagcaacatggcaaaaccccatctctactaaaaatacaaaaattagccaagcatggtgctacacgtcagtaatcccagctacttgggtgactgaggcacaagaatcgcttggactcaggaggcagaggttgcagtgagccaatattgtgccactgcactccagcctgggtgatagagcaagactctctctcaaaaaaaaaaataataataataataatatctaattaaatagctttatatgaatagagactgaatattttatgaatagtagatgataaaataagaaacataaatttgatttggcctatggattatatacttacctggtagaataaaaccatgcagatttatcgcctagaattccagacctataatagtactaagcataagttaatttcattcctttctgtagccatcatcaccatgtaaccaatatcatcttatatgcactgtacatgcgagatgaaatattttacttgccttccaacacagccctaaagccctgcaaaaattttcaggttgtgaaacctgaagctgatctggaataagtacgttggttaaggtaacagagcactaagtggttgtaatgggataagcttagatgggcagtactgtgaaccccatgctcttgctattatgatacattgattgtctttcttactgtagttcttaatgaaccttgggagaccttgaatcaggatggccaaagatctttccaacctgtgccagtggttcacaggagcctttgggtatcgaatgtccatgtcatctcttggccttgctttcttagctttgcagttcagaggtgatcccgttctcaatactaatattagcttataccccaatctatggaacctttgcttatgggtcccaatcacagtgaaattcttataactcctcacatgtaactcctcacatgacgccaatgtgcagacagggttggcaagcggtattctagctgattctgtcacacagctatgactgtgtgagagtgaagacccagatcttcatgtatcctgaagttaagatttatccaatcctgtctaccaaactggaaattacaaactgaagaaaattgtcactttgaagtatcttttctttttttcagaatcagaaatgttacaaaagaatataaaggaaagcctgataaaatagaagccttgaaaggtaaaaaaaaaaaaaaaaaaaaaaaaaaaaaaaaaaaaaaaaaaaaagagagagagaaagaaaatatttgttatattagtattgatttcctgattttaattcagttttgctttcggtgattaattagtggtggtattttagacttgaaaagagttatttgagctgcataagacttttttttctaatgtattgcttctactttataaaagttagaaaaaaatgaatatgttttagaaatagatgtatttagaatctatactgggtaatattgaggtagtctaaggatattctgggtttttttttctacaaactcaagttttttgtctgtaatccaaaagctattggtagatactgtatgtttttcttttgtgtgaaaatgtcacttacctcaaaggagttttagccatgtaataacttactattaatctattcttccatttaataaatactaacattgacctaccatatgcaggcaatgtcaatcaacctattatatagatatgtttcattcatttaaactaagtaatttcaaaatttcaaaagaagctattttgagaaataagtttatagagggaacttttaatgttttattttgaatttaacaacccactatatttatatatagaaaagacaaccattcaagagaattaataacaattcattggctccataatggaatattttttgtggttttaattgttttccatccctttatcttatctttctttcctttctttttttcttcctagatctggtatttgacatttacgaaggccaaatcactgcaatacttggtcacagtggagctggaaagtcaacactgctaaacattcttagtgggttgtctgttcccaccaaaggtacaaactagtttgttttctttttttttaaattatactttaagttttagggtacatgtgcacaacgtgcaggttagttacatatgtatacatgtgccatgttggtgtgctgcacccattaacgcgtcatttaacattagatatatctcctaatgctatccctccccactccccccaccccacaacaggccctggtgtgtgatgttccccttcctgtgtccaagtgttctcattgttcaattcccacctatgagtgagaacatgcggcgtttggttttttgtccttgcaatagtttgctgaaaatgatggtttccagcttcatccatgtccctacaaaggacacgaactcatcattttttatggctgcatagtattccatggtgtatatgtgccacattttcttaatccagtctatcattgagggacatttggcttggttccaagtctttgctactgtgaatagtgccacaataaacatacgtgtgcatgtgtctttatagcagcatgatttatagtcctttgggtatatacccagtaatgggatggctgggtcaaatggtatttctagttctagatccctgaggaatcgccacactgacttccacaatggttgaactcgtttacagtcccaccaacagtgtaaaagtgttcctatttctccacatcctctccagcacctgtggtaaaaactagtttattttcaaagtcaattgacaaataaatcagctgttaatatgaaattctttcaagtgttaatcacaaacacacatacctagggaaaaatggaattttatttaatagtaatattctgtggaagtatgtaatatttaattggtatactgcatatggaatctgagtatttcataataactattttcatgctcattagttgctatttggcattccagcttctatctgtcaactctttttttttttgttaagcaataaggtatttatttttttattttttaaaatttttattttaggtttgggggtgcatgtaaagctttgttacatagataaacacgtcatgggggtttgttgcctatattattacatgacccaggtattaagcccagtacccaatagttatcttttctgctcctctccctcctgcaaccctcccccatcaagtagaccccagtgtctgtgatttgcctttttgtgttcataagttcttatcatttagctccctcttataagtgagaacatatggtatttcattttctgttcctgcattagtttactaaagatgatagcctctagctccacccatgttcccacaaaagatatgatctcattcttttttatagctgcataatattccacggagtgtatgtacccccattttctttatctagtctgtctttgataggcatttaaattgatttcatgtcttattgctcctcatgattctgtgggttgactgggcagtttttctattctggaccaaagtgacaggggctggatgatttaacatggcctcactcacatatctggggcttcagttaggacagctgcgtgtcttttcccacatggaaatatatctttcagaaggcctgctgggattcttcacccaatgatccccatgatcccagcagcaagcaaagacaaatcactaggtggaagctcttcatcagactctgcttgtatcacatttgctaggatactacagggtatataggcaaagctaaatgtgaggggcagacaaagggactacaccttgatgggaaaagctgcagatgagaacatattttgaatatactatgcaactaaagtagaagtttctaatgcctgaattgtataaactgtcaagataaagtcatacgtacatttaattaacagcgattttattaagaaatatcttaagccttatcttgatattaacttttcctttgttacaggttcagtcaccatctataacaataagctttcagaaatggctgacctagaaaatctcagcaagctgaccggagtttgtccacaatccaatgtgcaatttgacttcctcactgtaagagaaaacctcagactctttgctaaaataaaagggattctgccacaagaagtggataaagaggtacaaaaatatgttaaagttaatgtgttggtcaaaatgagattattaaaaccatttgcactgagttttaattttaaattatttgtgcgcaaatcattgtacaattgttggacaagaaaatccaatttaaacaatagctaacattgcatataatttacaatgcgccaagcatatccttaactttaaatctaataaatcatttattcctcatagcaaccctatgagataggtgctattattatccctattttatacatgtggttcaagagagcaaggaacttgaccaacttagtagtcaatgtgtgtgacattcaaacccggaaagtttggctccagtgtttgttctttttttttttttttttttttttttgagacagagttttgctcttgtcgcccaggccggagtgcaatggccctatgccggctcactgtaacatttgcctcccaggttcaagcgattctcctgcctcagcctcctgagtagctgggattacaggcacgccgccaggcttggctaatttttgtatttttagtagaaacaaggtttcgccatgttggccaggctggtctcgaactcctcacctcgttatctgcccgcctcagcctcccaaagtgctgagactatgggtatgagccaccgcgcctgacccagtgtttgtgcttttaaccatttacactttacagccttgtatttataaatttttaaaaaaggaataaattttggtgtatgacataaatactgtcttttggttagatacaaagggttctgctggaattggaaatgaaaaatattcaggatgttcttgctcaaaacttaagtggtggacagaaaagaaagctaacctttgggattgccattttaggagatcctcaggtgagtcacattgaatttgcaggtgaattcaaagtttaaaaaatggaacttttggtaatagttcaaatattttattcgcaaaggacatgtgttataaaatattcataatagaacattaaatagagtatctaaatcctaaccgtaatactctgttaaatataatcaatatggtttttgcgttgttttctggaagaacttcacctttgaggaaaaccgccttatatactttcctcgtttatagattttcctgttggatgaaccaactgctggattggatcccttttcaagacaccaagtatggaaccttctgaaagaacgcaaaacagaccgcgtgatcctcttcagtacccagttcatggatgaggccgacatcctggcgggtaatcactggtttctgttaagtatcctgaggaggactttaagagatctaaaaatatggattggtctctgaacagttatattttgtaattcggtaatctagctgtatctggtaaattgaatggctggtggtaatttgaactggacgcaaagcctcttgcaaccatttcagtgtatcttgcagaattttgtataatttggtcacatagaagcatgatctgccaggaaactcgcttattgcaaaataagtgaagttgagtttctaagagatcaatccttttactcagaattgagggaaatccacttgaaatattcaaatgattttaatgtttcatctgttaaaatatataatgggataattttctatattagaacatatatccacaaaatttaacctccctgatgggatggattgcaaaattcacgtaaacgagattaaaatgtgtctatttcattgagtccttatcgagtcctgcatttaaaaccttagaagctcctgaattaaagtttgattatatagatgattacctgtcttttcttggaaatggatgggccactttttaacaaactttcttctttgctcttcttctttttcagacaggaaagtatttctctcccaagggaagctaaagtgcgcgggctcttctttgtttctaaagaagaaatgggggattggatatcacttaaggtaaggtcacttaagaaggctgggagtagatctagtgtaaggcttgatgcttgaagcaaaacattacaacacacaagaagaatttgtattattgttattttttgttttgttttgtttttgagacggagtatcgatcatctcggctcactgcaagctccgcctcctgggttcactccattctcctgcctcagcctcccgagtagctgggactacatgggcccgccaccacgcccagctaagtttttttgtgtttttggtagagtcggggtttcaccgtgttggccaggatggtctcgatctcctgacctcgtgatccgcccgcctcggcctcccaaagtgctgggattataggcgtgagccaccgcgcccggccaagaatttgtattattatacacaggtgtttgtacaaacatgtacacgtatttgtgtctacctagttagtatgtatatgtaagagatattgatctggagattttagatattgagaatataacaacaaaagtttagataaatatgactaaaaaatatatatctgcaacacaggttttattaatggaggtatgtattaagggaatcttttcaactgacacacttgtattttacaccttcatcatctctcatcttcccagggtgttaatatattcttaagtcggctacttgcttccactccttctagatcttccccttctttcttgttcttctcctcccatccatcctcttcattttattatctttattttgaatagcagcatattctaactgtaatttactgagtgactcagataagatatttaacattattttacttaaaccttctatcttttaacttttaattttaaagggtatatagtaggtgtatagatttatgggggtacatgagatattttgatacaggcatacggtacataataacatcggataaatggggtattcatcacctcaagcattaatcatttctttgtgttacaaacattccagttatatactattttagctgttttaatatatgttgactatagtcaacaatatattgcaatattaatatagtctgtatagtcatattaatatattgtacatgtaataaaatctgtgaagaacgtcacagtaatataatataattatattcacatgtaatataatctgtgaagaatgtgctatcaaatactagatctcattctactaacagtattattgtacccattaaccatccccccttccccaccaccccactacccttctcagcctctggtaaccatccttctactatctccataaaatcaattgttttaattttcaactctcacaaacgaatgaaaacgtatgaagtttgtctttctgtgcctagcttatttcacttaatataatgatctccattccatccatgttgttgcacatgacagtatctcattctttttatggctgaatagtactccattgtgtgtatgtaccacattttctttacccaatcatctgttgatggacacttaggttgcttccaaatctcggctctcgtgaatggtgcatcaataaacacgagagtgcagatatttccttgacatattgatttcctttctttggggtatatacctagtagtgggattgctggatcatatggtagctctatttttagatttttgtggaacttgaaaacgttgtctatagtggctgtactaatttacattcccaccaacagagtacgatgattcccttttctccacatccttgccagcatttgttattgcctgtcttttggataaaagccattctaactggggtgagatgatgtctcattgtagttttgatttgcatttctctggtgatcaatgatattgagccctttttcatatgcctgtttgtcatttgtatgtcttcttttgggaactatctattcagatattttgcccattttgaattggattattagattttttcctattaagttgtttgagctctttatatagtctgattattaatcacttgttagatggatagtttgcaaatattttctcctactctatgagttgtctctttacttgattgtttgctttgttgtgcagaagctttttaatttgatgtaatttcatttgtccattttagctttagtcacctctgcttgtggggtagagaaatctttacccagaccaataccctgggaagtttccccaatgttttcttgtagtagtttcctaggttgaggacttataagtaagtctttaatccatttggatttgatatttgtaaacagtgacagataggagtctaggttcattcttctgcatatggatatccagttttcttagcactgtttattgaagagactttccccaatgtatattcctggtcctttgttgaaaatgagtttactgtagatgtatggatttatttctgcattctctattctgttccactggtctatgtgtctggttttatgccagtaccatgctgttttggttattacaactctagtataatttgaagtccgatgatgtgattccttcagttttgttctttttgctaagaatggctttgtctactctgggccttttgtggttccatataaatattagtttgtttgttttttattctgtgaagaatgtcattggtattttgatagcgattgtgttgaataagtagattgctttgggtagtatgaacattttaacaatattgattcttccaacccatgagcatagaatatctttcctttttgtgtcctcttcaatttcttacatcaatgttttatggttttcactatagagatcttttacttctttggttaagtttatcactaggtatcttattttatttgtagctattgtcaatgggattactttcttgatttctttttcagcttgcttgctgttagcatgtagaaatgctattgatttttgtatattgattttgtaacctgcaactttactgactttgtttatcagttctaatagcattttggtgtagtttttaggatttttcaaatataagatcatatcatttgcccacaaggatgattttatttcttcctttccattttggatgccatttttttctgcctcttatctgattgccacagctaggacttccagtactatgttgaataacaatggtgaaagtgggcatcattgttgtgttccagatcttagaaaaaaggctttcccccattgagtatgatactatctgtaggtttgccatatatggcttttattttgttgagacatgttccttctacacctagatttttgagggttttatcatgaagagatgttgaattttatcaattgctttttcagcatcagttgaagtgatcatatcttttttgccctttattctgttggtatgatgtatcacattgatttccatgcattgaaccatccttgaatctctgggataaatccaaccatgaccaagatgaatgattttttaatgtgttgttgaattcggtttgctagtattttgatgaggattttcacatcaatattccagtcatatctggcctcatagaatgagtttcaaagtatcctctcctcctctatttttcagaataattttgaataggattggtattagttattctttaagtatttggtagaattcagcagtgaattctctgctgaaagactttttattatggctttaatcttgttggttgttattggtatgttcaggttttggatttcttcacggttcaatcttggtagattgtacgtgtctaggaatttgtccatttcttctaggttttctaatttattgacatacagttgctcatagtagccactaaatatcatttgaatttctgcagtatcagttgttatttctcctatttatctctgattttatttatttttgtctttctcttttttttcttttttttagtctggctaaaagtttgtccattttgtttaacttttcaaatttttcaactttttgtattgtttatttcatttcaattttatttatttctgctctgatgtttattatttcttttattctacgacttttggttttggtttgctcttgcttctctagtttttaagaagtgtcgttaggttgtttgtttgaagtttttctctttttgatgtaagcacttattgctataaattctccatttagtaatgcttccaccgtattccataggttttggcatgttgtgtttccattttcatttgtttcaataaatttttcaatttccttcttaatttcttccttgacacactggtcattctaacacatattatttaatttccatgtgtttgtatagtttccaaagttcctcttgtattgatttctagttttattctattgtggtcagagaagctatttggtataatttcaatttgaaaaaaaaatttaagtcttgttttgtggctagcatatcgtgtatccttgagaatgatccatgtgctgaggagacgactgtgtattctgcagccattgcataaaatgttctataaatatttattgggtccatttgatctatagtgcacattaagtccaatgtttttgattttctgtctggatcatctgtccagtgctgaaagtagtgtgttgaagtctccagctattattattgtattgggtctctctctctctctctgtctttagccttaataacatttgcattacatatctgggtgctccagtgttgggtgcatatatatttacaattgttatatcttcttgctgaattgacccttttatcattatatagtgacattctttttctctttctatggtttttgtcttggaattcattttgtctaatataaagatatctatttctgctcttttctgttttctatttgcatggaatgttctctgttattatcccttgaataaactttctatctttatctctttctttatctcctccttaaggccaatgactcttatacttgtcctttggaggctcttttttagatcttgtaggcatgcttcattctttttcaattcttttgtgttttgtctcttctgagtattttcaaatagcctgtcttcaagctcattgattcttctgcttgagagactttgatacattcttcagtatgtcagttgatattttagctccagaatttccgcttgatttttaaacattatttcaatctctttgttaaatttatctgataagattctgagtcccttctctgtgttatcttaaatttatttgaacttcctcaaaacaactattttgaattatctgtctgaaaagtcacatatctttgtcactctggtattggtccctggtaccttatttagtcatttggtgaggtcatgtttttttggatagtcttgatgcttgtggatgttcatcagtgtctgggcattgaggagttaggtatttaatgtagtcttcacagtctgggcttgtttgtacccatccttcttgggaaggctttccaagtattcaaagggaatagaatgttatggtctaagtctttggtcactgcagctgtatcagcactagggggcaccctcaaatccagtaacatggtgattcttgcagactcttcgacgtaccactttggtgctcttggagaatactttggattaccaggcagagatgcttgttcccttcccttatctttctccaaatggagtgtgtgtgtgtgtgtgtgtgtgtgtgtgtgtgtgtattgagctgtctggagctggcagaggggtgacacaagcacccctgtggccaccaccactaggattatgctgggtcagatctaaagccaatacagcactgggtctttcccaagacccgcagcgaccactgcctggctaccgccaatgttcactctaagcccaagggctcttcaggcagcaggtggcaaatacagccaggcctgtgtccttccctttatggtggcaagcttcccactggcccagggtgggtccagaaatgccttctgggaggaaggacctggagtcagaaatcttaggaatctacatggcactgtattctgctgcagctgagctgacacccaaaccagaagacaaagtcttcccactcttccctctcctcaaggagaaggagtctctccccctagtcaccactgccccaggcctgcagcgagtactgcctggctaccactgatgttcactcaaggcccaagggacttcaggcagcttgtagtacatgctgccaggcctgggtagcagctcccttcagggcaatgggctcccctctggcctggggcaagtccagatccaggagccaaggcctagaatccaggaccccaggagtccgcttggtgctctctactccactgtagctaagctggtacctaagctgcaagacaaagtcccctttactcttccctctcttttcctcaggcagaaagtctctccccacagccatcacagctgggaatgtgctaggtcaaacctgaagccagcagagcactgggcctcacccaaggcctgtggcaagtactgcctggctactcctggtgtttattcaaggcccaaaagttctttagtcaggaggtgatgaattctgccagaactgggtctttttcttcaaggcagcaggtgcccttctggcctagggtatgtctaaaaatgtcatctgggagcaagggcctggaatggggtcctcagaactctgcctggtgtcctattctgctgtggctgagcttgtatgcaagttggaaaacaaaatcctatttactcctctctcctctcctcaacagaaggagggagtctctcctggaacagcgagctgcactgtctggtgttgggggagggggtgaaacaggcactcccttggctgctccagctggtgtctctcgaggtcttttgcaccccaagtccattggctttgagcccagaacagcatcaggacttgcccaggaatttcagtccctgtggtcctacgtttatttagatccccagagcactttagtccatggtagtgggatgaatgcttcccctctggctaaggctggtctaaatgctccctctgtgggcagtggccgaattctgccctacgttgcttgtcactgtgacaggcaacactgagttccaatgcaaagtcccacaatgactgtcctctccctcccccaagcatacaacattctctctctgtgccacacagctgctgccaaggatgggaagttgtgtcagcaattcaagactgtctttcctatcctctccagtgcttctttccttatatgatgttaaaaccactatcattgctcacctgatttttttgttcttatgaaggtgcttccttgtgtggacagttgttcaatttggtgttcctgggggatgggaagatttctggagggttctatctggccaccttgctctacctcccctcctaaatcttctattgtttaaaatagaagtgttgttacttttattttacagatgaaattacagactccctagattaagaagtgctggaatcagaaattgaacctgaatatttttaaattctaaatctagtagtcaaatccatattttaaactactgtttttgttacatgattggtcgtttttgtaaatttataccatctatacttaagaaagaaaacaaacctatcatgacaacaatacaaagaaaataggatgacagtttccttaactcatctgcacttgtttaagtcctagaaagttatttgaaaaatatctcatgtagatatttttccagttctgtgtaatgtcccaatttttttttatttcttatagcactttgtttgcatctcttcttggaaattaattaaactatctgaaagtcagtgtttccacctacaaagtgagagtagcaattcctacttacaagtaaaggttatagaaaaataaataagagactgcctggcacactgcatggaaacataacatgttttcaaaataaaaagtgctagtcaggatccctgcccaatttgcgagtccattcatggactcctatttgtgcaattgccttattttcttctaatctaagggccaacaaattatagctcatgagccacatccagcctacttcctctttctgtaaatacagtttggttggagcccagtcatgccctttcttttacacactgctctggctgtctccatgttacaacagcagagtggaagagtttcaacagagttctaacagcctacaaagcctagaaaatttactatctagtacacattttacagaaaaagttttacaacctcccctttcaagcttcaagttcctcaaggaatgactttctgcatgactcattcattccgccccagcactcagcacaagttcctacaagtggccaaggaataattcttaaattgttttcatttcaggagtcagcatcatggaaaacagctacgacattttttgcttcactcttccagtggatttcactacttctaaaaaaatagcatatattcttttaagttcatacatgacttatgtgtcagtggaataatttttgacttatgcatttggtcaaataaaattgctaccatttttaagggcttgtcaagtgcaaacttcactattattccattgttcgaataaccctagaggctgggaatcattattccagttttctaataaagtaactgtttagataagttaaataacacgttccagatgctaaaacaatatttcaaagccaagtcactactgatattttgcccactgtataatttataacctcaattaatagaatattgtgtttgtctgtttctctataatggagaaatagctgtggtatttttcaatggatagactgattttctcaatgatactttgttcttattcaaagttctgggcttagcattacaagaaaagcaaaccacattcatccattattagtttctatctataatccagtttccttcatagcacttactactattgataattattttactcatctggttgtctacatgttttcttcctgacgcccgcactagacaatgaactccataagagcagaataatgctgctttagtcaccattgtatcctcaacactaagtatgatgtttgtcacatactaagaacttagtaaatttgcattggatgactacattgagtaactgaaactgtttggcatctatacttctcacaagtctcttgttcctttgaagcgatacaacaattctatttagtcagcttaaaactgaaccttcaactgcaacgttatccattttgcatagtcctgacctttgctgtactgcaaccctggtattttccactctgtgaccaccctctcttcaggagcttcaatcaatatgaaacttctctgggcactactcctgagtaacctcaccagtaactctcattagctcattcttttcttttgtccatcacatttatatgatttggctgggtttttgtcctcttatttcttgggtttttgtcctcttattttgtgtttgtctgacctatttctggcattagattttaattgattttctttgtcctatagagactagttaattattttcttgctattggagactatgtcgagtaacatatgtctttttttttttttctgaatgccagcttgcagttaaatgaaatatgtgttgaggaaaacataacatcacttgttaaacagcacatccctgatgccaaattatcagccaaaagcgaaggaaaacttatttatacattacccttagaaagaacaaataaatttccaggtaatgtgcatgaacactgtgaaataaaatatgtgaataatagtcatcatcatcataattattatcattacaactaacatttatcaatgtcttacagtatgctcaggtactgaaacataatcaaaagaatagtacaataactgaattattttctgtatagtgggaaatagaattacattctaatagttgtattgtaatgcctgggcattttagagggcttcttttagtccttcttccctagtagtgtgtaacataatattctagtattcataaatgtacacaaacccaaatggttgaaaacctctggcttatgcactacattaaacagccctgtgatgtggctatctgtctcggtgagacttttgcaataactttgggtttttcaggctaacgcataaaagtttactaactatgtttgttgttcagggaacttgttccttaacaatggggcactataagggcccacattagtggttgaaacaattaaccttgctgtatatgtggttaacaaagacatatacattcattcaaatacacattttatggtgacaacacaagcattccttagaatcatcaggaaagtgttacgcaaattctgattagtactttttaacagtaattataatttaaagaaaatttgtagacgttttaggtggaatgaagaatgatgcataatactcattattagcttaaatcttacttcttttctacctttctgtatgaggtattctagtcaagacaaaaagcttttaacctatccttttgcccaagcaggagctccagatggaagcctcaggacttctgtaatcaccctagtattagaattaggtttttatttaagcttgatttaaccactgtaattcaaatccatgcaggcaggggcactgttcactgcttcatgaacaatgacagatgcgtaagtatattttggtgaacgaactaaagaatgaatagatataaaattgctagagcgaataatcactgtcacaattccaggaaaattccctgattcagttccacattctctgcctgttaggtcttgtgaattttttcttccattgttagaaacagaaaattttttaatggtttatattctatgtcttctctttaacaaatattttctaaactacagaagattctacaccatccaattaattctcaaaaaattaattcctttccttttgtcagttagaacataaatggctcccatttatatctgttctctagaaaagacttttcaattaattaggcttagagttgaaaaacccagagtctcacaattaattaaattttaaaaggaagtcagaaaaaactaagattaaactttaatagaaatgcaaatgaatataaattaatgtttgacaaagtaatatttgggttgtaacacatgatgtaaaatagaaaataatatatagaatttgcagaataagatgatctattatgaaatgttaattttcaaatgtttttgacatatcacaagtatagtttcatagatttgtgcttattagtttgaaaaattgtcttcagttcacttgtgattcttgttttaattcactgctgtatatgtattctttagaactttacaaggatcttgatagctatcctgacctaggaattgagaattatggtgtttccatgacaactttgaatgaagtattcctgaagctagaaggaaaatctacaattaatgaatcgggtaaataaaatgcatgaaaattattatgtaaaagcacatatttcaagaacacactgttccaaagatgtgattacaaaatgtggggttcatgattaaggctcttcttagacaagcttgtgtaaaaatgaaacgcatccctgtcaacattgctttgtagttaaaaataatccatttttctacatccaaggctcactgcactcatattagctctaggcttctaagggcaatttcagataaaacatttattctaaatcataaattaatataaaacatgaacccacagatctaaaacacttaagaaccccaaacaatactttaaaatgaaactattaaattcctgtaggccagcaataaagaagagagtcttaattagacatattgtactgttccacagatatcagattctctggtgtcaggtttttcttttttttttctttatgttagaaattggacactatctatccacctattttcaaggtcacaaataacttattctcttgtgttcagactgttttgaagccgaacataataaactctctatttctgatactgcactttttcattctaacattttcatttgttcttttttagagtttcagttctttactatttctcatctgctctcaatattgtccatattttccagtagatcttgtaacatatttatcatagttatttttaaacttgtgtattttaattctaacatgtggaccgtgtgactgatgaccgttatcagtaactgactctgattttttttcctcttccctatgggttatatttccccgcttcttcatatgtcttgaaatttgtattttatcatggatgttactttaacaaaacaggaacactgaggtaaacaatggccagaaaatggcatgactcttcctctgtcagactactgatgtggatggcagaactgatctaatttgtatttggcaagtgcctgggcttttgcacaggttttattagattcagtccactcccagcttcgaatgttttaaaggtagaatcaggtctttcccttagacgtgactttgaattatagcactggaaaaattctatatatttctctatagccctgctatcaaatatctcaataatgattaatctcactgattttcagcctgtcatcactttttgtttatttatttgttagtatacatctctccactcctcattcagtgactggaccctagtggactcatgtattacacaaaaggaaagacccatgaaccctgatgatgtcttgctcaagacactatgcagcttcttgtgtttctctctccgtttttctgagtatctgcccccagctactgctgtactgttcctatgcacttaggaaaggctccacgaaaaaaagttcgtagatgctgtaaactcgttttgtgacttaggtaccccatgattctagtcagttatatcagcccacatataatcacagaatttttaaatctgggctgctttcttttcacctacctatggtggttttctcctttttcctttttctgccatgtccctaaagatgaaagcttccacaggaatcttctccccctagaaatgtttccttcctttatacatgttagttttttagctttctttgtgctctcgcccatctgatggattaaaaataactaatatttattcccttggtaagacaggttgacagtctcttgcaactaacgagaagcagaatatccctgaattattattattattattattattattattattattattattattattatttcttttttttgagatggagtctcgctctgtcacccaggctggagtgcagtggcacgatctcggctcactgcaagctctgcctcccgggttcacgccattctcctgcctcagcttcccgagtagctgcgactacaggtgcccaccaccacgcccggctaatttttttaatggacttttgaccactatcttaagatccttatatcttcattcacagtgtgttttgtgtcctgtcactgtacttatacatttacgggtgtgtgctttttgaggtttgatattaggcttattttagcattatacaatggacagcatcctgggtatccagagattatagagaacacacaaatgaatgcagtctcagaaactattcaaaactgaatagttttgaaatctctgcagtaacaatttatagctaactcccagtttgtagcttgccatttacagtttactccctgttcagagcatgtcaatttgtagcttcattgaacatgtaagatatttgtttcctttactgactttccatgtcatttctaaccactgtgatgaccttgcctatttatcttgacctctgtaatgtattgtctgtatccaaattacctaaggtctcctttctatcccttttgttcaagaaataaatatttcttctatttctgtattttaaggcagtaaccagcaaaaccacgttatacctatagtaacgcggaagagtctaatcatgagatgcttagcagagccaatctctatagtaagctcaataaagtacatatgagttgcttattttatgttttgcagacattgctattttgggagaagtacaagcggaaaaagctgacgacactgaaaggcttgttgagatggaacaagtcctctcttcacttaacaagatgagaaagacaataggtggtgtggctctctggcgacagcaaatctgcgcaattgcaagggttcgcttgttaaagttaaagcatgaaagaaaagctcttttagcactgtaagtatcagagttgccataggttttctttttaagtcaatgcgttaaaaagcaaatctaaggtataaaggcaagcaaaaaaacacaaagatatgatgaattaggcagcagaaagggaaagcatcacagtggaagaagcacaggagagaggcagaatcttgacatccaaaggacaaatattgcatgaaattttatgggatatccaatggccaaaaagcaacaggagaaatgaacaaaggacaaatctacggtttaacatcttgaatttggagttagtaaaaggacaaaatactcaagaaatgtgacagttaattgtgtttaatttttataatttctttatcccattacattataaactgctcagagagtattagatcaggaaatgacattgcattcattttggcaattttcttttgtgtaggctattaattctaatggctggattttgccctcttcttgtggagtataccatggtgaaaatatatcaaaacagttacacctgggaactttctcctcatttgtatttccttgctcctggacaacaaccacatgaccctctcactcaactactgatcatcaataaaacaggtaaaatggtggatacttgatttccaaatacatttactgttcagagcagtacttagaaaacataaccatgagaaagaaaatagcttttcacttattcagcatgtgttaaaaaacaatttatgaaacttaaagataataaatacaggcccccaaagaagcaggaataggtaaagtattttctaaaggagaaacatctggtggcatcttgctaaatgaaagcgtttgtaccaaaatagcatttttaacaggttcattaagatatacttcacaggccatacaatttatccatttaaaatgcacaattccatggttttcagtgtatccacagaactgtgaaaccatcaatacaatcccttttagaatattttcatcaccccataaagaaaccccataccgaatagcaattactcccatgtcgtccctcccccaactcctcagcaatcacaaatttacattctgtttctattgatctgtctactctgaacatgtaatatcactggactcatacaacatgtggtatttggtgactgacttctttcgcttagcatgttttcaaagttgatctatgttgtagcatttatctatgtatcaatacttcatttttattgttgagtaatattttattgatggttataccacaatttatttatcattcatcagcagatggatatattttttcccaataattggatattacgaaaaatgctgctacagatgttcatgtacaagtttttgtttgaacatatgttttcatttctctggggtgtaatcctaaaagtagaattgttgggtcacgtggtaactatgtttaccctttgaaggacctgccagactgtttttcaaagtgactgtaccactttatattcacaccagaaatttttgtggggtttttttttttttttttgagatggaatctcgctctgtgtcaccaggctggagaccagtggcacaatttcggctcactgcaacctccgcctcccagattcaagcgattctcctgcgtcagcctaccaagtagctgggactacaggagcttgccaccacagccagctaatttttttgtatttttggtagagacggggtttcaccatgttggccaggatggtcttgatctcttgacctcgtgatccgcccgcctcagcctcccaaagtgttgggattacaggcgtgagccaccgcgcccggcctcacatcagcaatttttgaggattccagtttctacgtatgcttgccaacacttattttttgttttttctattacatgcatcatcgtgtatgtcaagtagtatcttgtgattttgatttgtattttgttaatggccagtaacgttgagcatcttttcgtgtgataactcgtcaattgtacaccttctttgtagaaatgtctgttttcttttgaaaaaatggattgtatttttaattgagttctaagtgttatgataaaaattcttttatcagatacagtaggtgctcatattcagattctgtatctaagaatttgcctattcactgaaatttattggtaacccccaattacatatctgttgcatttcatgatatttacagatatgctcagagaagtgaacatttttagtcacctgatgtacacattttcaactgagattgaacaaaataacactgctttcttgttttagctctcatactgtaaacaaatgcctttttgcaatctatttcatgccacatttttcacatttttatgtttttttgtgatgattttgctgtttaaaatgacacaaagaatactgctgaagtgtcatttagtgtttctaaatgcaagaaggctgtgacatgtctttttctagtttttttttgttttagggttgtcattatgaacagatgttggatttgtcaaatgttttctctgtgtctactgagatgatcatgtgggttttataccatattattttcagacattaaaccaaccttgcatttataggataaatcatacttggtcatggtgtataatcctttccattttctcccagatttgattttctagggttttgttgataatgttttccatctctattcataagggatattggtctgtagttttattttatgctaatgtctttagatatcagggtaatacttgctgcatataataagttggcaaatgttccctgcacttctttttttttttttttttttttgagactttgtgaaggattgacaatttttgtttattaggtagaaatgtactagtgtagctatctgggtgagggattttctttatgggaagttttgtaattagcaatttgatctcttaattgttacaggtctccttacattttatatttcttcttgtatcagtttaatagtttctgtctttccaggaatttttccattatactatattatctaatttgttgttacacaaacatattccattttaatccttttaatctgtaagactggtattcatgccctctttttgttcctgatcttagtaattttcatgttattttatttttcttggtcatcctagctaagggttcctcaattttgttgatgctttcaaggaaccaacttctagcttaactgtctctattgtttttctattgtctatgtcactcatttccaaaccaatattcttggtttcatttctttctgtttgccttgtgtttagcttgttcctctcttttcagtgtcttaacacagaagtttcactcactggtttgagatttttcttcttttatttaacataggtgtttacagctataaacgtccctctaagctatgctttcgctgcatagcataagtttcggtatatcatgttttaattttcatttatctcaaaatattttctaatttcccttgtgatttcttttctgactcattggttatttaggagtagactatttagtttccaaaaatttgtgattttctaagtttttgttgttgaattctaaattcatcccttgtggtcagagatcatagtttataaaatttcaaccgttttggatgtgttgaggcttgtttgatgtccttgcctttagctcatcttggagaatgttccttgtgcacttgagaagaatgtgcattctgctgttgtgggtgaaaatttgtatatttcacttttcagtgctattttgtatttcgagtctctcttaagtgtatatacgtttataaatgttataacttcctgctgttttgacccttgtatcattagaaaatgtctcttatgctttctagtaacattttttgttttcatctattttgtctgatattagaagagccactccagttttcccatggttttatcttgcatgatgtattgttccaccttctgctttcaatttgtatcaatgaaatttaatatgtgtctcctgtaaatttaatttgatatgtgtctcctataaacagtatatagttggatagtgtttttaaatacaatctaacaatctatgccttttgagtgtattattttattcacaaatcatatttttactaataatgtaggatttgtatctgccagtttattgtttgttttctgaatgtctcatgtcttttttgttcctctatttcttctttactgttttctttggcattgaatatcttctagtttaatgatttaattattttaacgattttttattatatttttgaattatgttcttggtgattgtttttgggcctagaatgtacatcttattttaatctacttaaagtttacacagatttaagattaatgtaacaaagtctacaaatatgtacttactctcctttcttctctcagcttctttaaaagatatgaaatcatactgagtaataattgtaccaatgtattgctggtttaaaaacatatagatgtgatatgtgtaataataacatcaaaatggggaagagtgaatacagctatatcagaggaaagagtctgtagctcattgaaatttttatttaccatttcttgttctcttcatttgttcctgtgaattcatattatcatcttatgtgatgtccttactccaatacagctaggcttccacctgcctcctttgtgccattgttttcaaatattttacatgtctatgttttacgcctcaacaataaaattatatacatactgcattatacatttgcttttaaaatgagttaatacaagagagggaaaaatacgcattatactaccaattataagtacatagttgtgtttgctgatcctctttggccttttcacttggattcaaattgccatctggggttatttgctttcagttttaagtatttcttataaggcaagtctgctataacaaattcttcatttttgtttatcttggaaaaaagttctattctaccttcatcattttttattctttattatttttatttttatagatttacaggataaaagtacagttttgctacatggatatattgtgtagtggtgaagtctgggcttttggtgtaaccatcactcaaacagtgtacatcatacctattaccaccttcatctttgaaagctagttttgctaaatataaaatacttggctgaatttttttcagtactttgaatatgtcattttactgtgttctggcttcctttgtttctgatgagaaatcagctgggttcttattggtgtttccttacacatcaccaaggaaacattctctttgcctttgtcctcaccatttttactctgatgtgtctgggtttggatctctttgcatacatcccacgtggagttggttgaacttcttggatgtataaagtttttaattaaatttggtaagttttcagtcattatttcttcagtggttgtttttctcttcttttatctctctcctctccttctgtaacttccattgcatatgaaataatgtgattaataatgtcccacatttttctgaggttctgtttttttattgttgttgttcttcaggttgcataatcccatttaatatatcttcaggtctgctaattctttctgctgatcattcaaatctactgttgagctccttcagtgaatttttcatttcaattattgtactttcaactccagaatttctatttggttctttattacttgaaataactttttattggtataatctgtttggtgagacattgtcatcatacctttcttcacttctctaaacatgctttcttttagttttttgagcatacttacaatacctgccttgaagtctttgttttttaggtttgctatctcagccttccaaaggcagttcttgttgcctacttttcttcctgtataagagtgacactttcttattttttagcatgtctcataattttggttgaaaactggacatttaaagtaatagattgtaacaactttgaataatgacccccagcttgtcttgaagcttgtgattattgtttactcatttcccctgctttatacaactctgatgccattcttcagaggcataactttggccatgtgcattattcccctgagatggcaatagatttagcagacctttctttgtctcttttcctgacctctccattacactggctaactctactggtatcacattcagttgttaggcaccaccagtagcaagctgattggcctattgttttcaaaaatgcccatatgcataagttgctccacagtttgatccaattacagtaattccctctcatctgaaacattacaagatccccagcagatgcctgaaaccacagatagtaccaaactaatggccatccataagaacacgtttctgttcatgttttttatccacaaatttatcgccttttccatcttaactaagcacttatcatgcactatggctataacttctacagtttgaggtgcaacagcaagactagcatgagtttcttttttcttcttcacaatttacagaagagatttgctctcagagtagatcttaacaacctcagcatacaatttttttattgtttccttattaagtcaataactttcacctttccacttaaaggaagcaatatatggcttctctttgacatatccaaattgccagcattactcctcttgtgctttggggccactattaagtaaaatcagggttaactgaacacaagcactgtgatgtcttgacagtcgatctgataacggaggtggcgactaagtaactaatgagtaggtagcatatgcagtgtggacacagaagacaaggggctgattcacatcctgcacaggacagagtggacgatacgagatttcatccatctgctcagaataccatgcgatttaaaacttatacaatgtttatttctggaatttttcattttgtattttagagatgcagtggactaaaagtaactaaaactgcagaaagtgaaaccatggataagggagcactactataaatatggtcttgtttgtaggaaaagtctttgaagccagttattgaggtgtgtcctctccacagaagggctcttcttaactctctgttttgctgctctctctagtaaacttttagctggtgtatggttcaaccaagggaattgcaatctcctgtcaattgcttaccaacaaaatcttgatggtttttggtgcactcttaggcctgaacttccccaaactctgttccaactaaagtcagtttatttagggagagtttcagcacatactgttcttatggcttgccgctgttcctgaaacaagaatctcaccattgcttcagagctggaagcatggatcgtgcctgattctcttggtgtggaacccctgatttgtgagcagggtacttggcaggggtggtggcctctggtcttctcagcttgcctctcctgtcgtggaaactctgccctacacgtgagatgggacaaggatgattgtgtcccggtgttttgggcctcttattcctagggtagagcttccaccttaggattagggaatgggtggaggaagagaactccagatctcttagccactcttgcctggtattgatcttctgcaacgcagatgtggggaaatgagaaaagtcgatgggaagcccctcccgtgaagatactatagccctgaactgggcttggggaatagggatccctgttcttgcccacaccctttcagagtgaagcttctattacacagatctgggaaggaagtggggagtagacggatcaggctgtggctcaaatgccacaatttctcagtgttcttactgagatttaatacattttattaaataaatgtgtcatcattttctgtatgctcttataacaatttcaaaacattttaatttgttggttttttaggaatttttataagttatgattgtttttctggggagaaggtctactgagctcctcacattgctagtctacatgttgtcttccagtatcaagaaaattttgaaaattaattaataatctagcagtagtaaaatgacttagcaaatttggtggttaatcaatggaagttatcagtatcattaaagctttattggttatggacattcattgcaagattctaaaatctattttgaaagacacttggaactaaaaaaatcttttacattaataataatcataagcaaataaaaatatcatgaaggaattccatgagaaataatagatgttatgtatgttatgtagaaaatatcctgacagtccatattactgcttcacataatgacattaactgtaatttgactacacaacttgacattaatgtttttagttttgtgatacctaatatctttaactacaccttaggggcaagcattgatgactttatacagtctgtggagcaccagaacatagctttagaagtggatgcatttggaactagaaatggcacagatgacccatcttataatggagccatcacagtgtgttgtaatgaaaaggtatgcaggtctctaataatctttctgaaaaatgtgaaaagctaacataatatcaatatactcaggcttccaacttaagaaataaaaatgaaaagcaaatactgttttcatttattacttagtgaattgtattcactggcataaacaattcatatatccatcattgtctactggcacaaactattagcaaaatacatactatagaatacctactatcaagactatatataagttcgaacatttcatgtttcccctcaaggattttataacacatgtattccaaaacttctgttttgttcttaaacaataaacactgaacatatgattctggcctcaagcaagacatccggtgtcctaaatatcagatacatgatttagttttactatatacatgttttgatttacttatacagtatttgattttacttacacagtgtttggctttttattgtgattatttaacaccatatgaaaaacataacctcttaatttaacatgtcaaattttgacttttttagagaacaaaatgaagatatttgagaacttatatcctacttgttatattttagaattacagcttttcgttagcatgcaatgccaaaagattgaattgcttcccagttcttatggacattgttagtaatgggctacttggaatggttaaaccatcagtacatatccgaactgaaagaagtacatttttggaggtaaatatatataatcttacaattcctgactctcctctatcaggaatctcccagatcacccttttaagtgctggaatcttgtttttattgagtaaaccactgcataataaattaacatttggactcattctagttctgtgactttggaaaatcaatacgttttcagagcttcaatttgtttaaagtaaaataaaatgaacaaaacatttttcaaagagaataatgagatcacatggacacaggaaagggaatatcacactctggggactgtggtggggtggggggaggggggagggatagcattgggagatatacctaatgctagatgacgagttagtgggtgcagcgcaccagcatggcacatgtatacatatgtaactaacctgcacaatgtgcacatgtaccctaaaacctaaagtataataaaaaaagaaaaggaaaaaaaaaaaaagagaatatgaagcaataaaaatgaaatcttacagcactgtgaccagcacaagaatagtgaacaaatgaaacaaaggagaaaggaaggaaagaatgaaggaaggaaggaaggaatgaacgaatgaatgaaggaaggaaagaacaaaggaaggaacaaatgaaggaaggggctttattattacttttagaaattttacaaaagaaattcaagacaaagttcaggctagaatttcagactatctacattagaattactgcagattcttgtcaaaaatattaattcccctggcctactccagaccaatcaaaccacttttcctcatgggggtggtgaaaggagggaatctattcttaaacaaaggtccaagtgatcggaatgtatatagccctttaagtttagaaccagaataactaaaagtttgtaatgattcctttttaattattgaatacatacatttctccctttcagagagttctttgagcacatagatcatgtatttttaacactttataaataccttgtacgtaggaaaaaacctgtaacatgataaacatgaaacaacttaattgttaaatacataagtgagtgttaggctcatcaacttatctacatctcattctagggttttatgataatatatatggccaataatcatatactcatgtatacataaaatggatcacatatctgtcattcttttaaatttatttttagaggcagggtctcgctctgccacccagccggagtgcagtggcaggatcatagctcactgtaacctcgaactcctgggctcaagagatcttccgatgttggcctcccaaagtgttgggattacaggtgtgagtcactgcacccagctgccagtattattttcatatggtccagcaagatcttcagtttccttctcacaccatatctcactgtactcaggaagtaaaacttcctttcattaaggatgtgcgagaaacttaatcattaaagtaaatgattttagggacccaccaagtattaattaattttggaatatatgctatggttcacttcattaacattttgtgactgtgaagaccttttaattttctggtttctgagagtagtatgcaataattgggcaaattgcctcagacttctatctatcaagatatcctgtttcaactaggattaattagataccaaccagctcagctgactttgtatttatgtgcccaatatagtcactttaaccaatatccccagcaactcattttattctctattctactttacctgctcattgcccgcaaagtcagagttgcccagattttcagaacttgcttgtatcctgcccaaagtcaatagattggccactaagtattgaccctacccagtactcaggacattctggaagcatccagacaataagctataaccttaccatctatggttagcaagtgtctttctggtgaccaagctgaagaccaccaggctctggttagaactttcttcagtaatgtgtttaatcaaagaagcaactatgagaatcatgaaaataacatgggactggctttcaagagagtttgtgatcttttatccttaaagatttttacaaacaggagtaacaacagatggaactagggcaaagattttcttggtgattttgctctcccttctagtacttcatctctccttttgcgtcctcaaccaatatttatctggtctcatgatgtacctaaaaaactgacttattatcactgtacccataaaatgttggatattttttgagttaagctgtcacatttgagataaagatcagctaagaaattgaatgtatcaactgtgaattataatgtattatttagcaccaaaataaattttagaatcataaagcaagaaaagagaaaaatcttgttcttattattttccaaatgttatcagtgcattcatcttttcaatcacttatctgtaaatttgagtagaaagccaaaagttaagtgtgaaaactggaaggataatgaaggaatctgggaatctcaaaagggacctaaggcagaattatgtaaacttagtctaaaattttaaaaatgtattccagaaaattaactttaaatttcttcattcagttcattgtattctttgggtttttcagaatggacaggacaatccaatcggattcctggcatatatcatgttctggctggttttaacatcgagttgcccaccttacattgccatgagcagcatcgatgattataaggtaataatgagtaattgcaacttccattattttgcataattgaaagcagaaggtaattttacaatttttcataagaatatttctacatgcttaattgaacagccaattcagacataaattctaagttataaaaatgaaagaaagttttataagttgaaatatatagataaataggtaatagagaattattctgaactttatctggatattccaacaagctagaatagacaaaccaactctgaaaaaaaaagcaaagctggaaaatatgcttctgacttcaaggctcactacaaacttgtagtaattaagaatgtgttgtattaattaagaataattatgtagatattttaaatgaaatagacatttcagaaataaacccacacatatatcaattgattttcaataaaattaccaaataacttaaataggggtaagattagacttttcaacaaattgtggtggaacaagttggtatcattctgaaaagaaaaatgttcttaacatccgtcacatgcacaaaattaatttgtaatgaatcacagatcttgtgataggcaatatttttcagatggggaagaagaagcatatgctattttaaaaaagataacttgaacttcatcaaagttaaaagcttctgctctttgtaaaacacgaataaaaaataaaaggcagccgagcttggtggctcacgcctgtaatctcagcactttgggaaaccgaggtgggcggatcacctgagatcaggagtttgacaccagcctggccaacatggcaaaaacctgtctctactaaaaatacaaaaattagctgggtgtggtggtgcatgcctgtgatctcagctactcaggaggctgaggcaggagaatcgcttgaacctggactgcggaggttgcagtgagctgagattgcgccactgcactccagcctgggcaacagaccgagactccatctcaaaaaataaattaattaaataatttaaaaataaaataaaaggcaagccacaggctgggagaaaaatattaactatacttatatatgtgacaaagatttgtatcaaaaatatgtaaagaactctcattcctctgtaatagaggataacctaattttttaaatggacaaagtatttgtatatatactttaccaaagaagatgtacagatggaaaatactcccatgaaaagatggttaatgtcatgagcaatcaggaagatagcctcagtgagatagctctacacactcaataaaactaataatgttagaatgaccaacactatcaagagtttatgaggatgtggagaaaccggaactctcatgcattgtgggtgggattgtaaattgtacaatcacttcgcaaaataatttggctgtttcttataaagttaaaaatatgcttattgttataacctagcaattcttctcctaagtatttactcaaaagaagaaaaaacatctttccacataaacacttgagcattaatgttctgaatagcattaatcataacagccaacaacttgaaacaacccaagtgtcccccaagcagtgaactgataaacaaattctgatatagccatacaatggaatactattcagcagtataacagaaggaacaactaataaatgcaccaacacaggtgagtctcagaaccattacactgagggaatgataaccacaaataattaggtacctttaattaggatgatttaatttatataaaattcttagaaaggtaaaattaatctatagtgacagaaggcaggctcggggtgtggggggtcacttgtaaccagtggtaaaggctattgactgcaaaggatcatgggaaacttcaggggttgttctacaccttgcctatgattgtggtacagaaacatgcattcatcagacctcattcagctatatacttagtatgggtactttttcttgtttgagaattataccccccaaaattaaaaagagattgttgaaataaaaggaaatgatatttttggaaatgcgagaacttgaaaagataaagagaaaacttcaatattgaactgacaacttacaaatgtttatttacagacactcattaatccaaacgaatctataatgtgtttacaaatcacctgagcatcttgtttaaaagatgattccgattcagcagttctgcagtggagccagattttgagtggcaatcttaggcggtgaatttatatgattaataacccaggccaactcccatttttgtgactttatggaaaaagtctatgaaaccttgtgtaagcatctctactatgtcatcttcatctgtttcgttttttctctctctctgttgcccacaaaaagagtgtatggtttatgtaatgttcccttttcatgtggaacatgcaggaatctcaagaaattccatttactagtttgatgtaactataagtctttctggtgttaacataatccaaactttaaaacttcctccgcaggaaacatgaacactttctttggcttttgtgatgccacaatttcaccatgtttatcctaagactgtccattgtttgtctcctttggagattctcattcctctatgtaatatttaaattttggaaatcctcagatattggcccttggctgtcttctcatgttagataccattctgtcttaggcaaacccatctagctctatggcttcgaatcccctctactggctggtcactcctagatctgactctaccccagatctctaattgtatctaatttgacctccaaggttgatacaaactcccttctcagcatttccacagtaggcaacacagatgtctcaagtttcatgcttccaaaactgaactgaatgtagagatacttaaatgtcttccccccttgctattttctccatatatagcagcaccacatgctcagtcatttcctaaagatccaaaaattatcctcaattcttctcttgcctctaatatgttgagtcaatcatcaattccttaccaattcaactacctgcatagacctgtgtctgatgttgtgaggctctgatatgaatctttaggtcaaattatgtctcaggcaggagcattatttagctcatcaaagcccatcaacaaatgaatttaagtattttttaaaagaaaaaaattcacaactcttagaatagtttaatatacaaacctattgattatactgaaaaccacatcacttcataagtagttttaaaacatgtaatttggtatgtttatttagggaatgacaaataatgtaaaatacatttacatttgtaaatgtatttatatttatgtagatacacataaatatttgaatcagtgataaatacttgaatgtggactatggcagaacaacacaatttcttttattccaattaaaggataaagcaattatatatgtgtgtgtgtgtgtgtatgtgtgtgtatatatatggagtgtgtatatatgtgtgtatataaaataaacacacatatatacacactccatatatatatccatatatatgtgtgtgtgtgtatatatccatatatatgtgtgtgtatatatatccatatatataatatatatatccatatataatatatatatatatatggatatatatatatatatatatatatatggaggagagaaaagagagagaggaatcactgtgatgagaaggtagttgtttaagggaataaactgtccatcccattcacccctacccacctgtaagtcattaaatcactgttttgtttgctgcagtgttcatgctttgatcattctaaggtcttcttttacatatttctgccaggtgtgtgatgaacatcaatgtagttcattaaagcagcagactggttatttatgtttgtaactatccacatcccttagtccagattacatttgtagacataatctagaattgttacaaataaaggttttgtttgaatagttccttgcataatccacatattcttaagccacaaactttgtatctttgctgtctcctaattagaacagagctcggtcccagctacggatttccggactctccccttctgcttactggtttgggcaggcgctggtggatgtttccctgtacttcttggtcttcgtttttatatatttaatgagctacatttcaaacttcgaagacatgctacttacaataattcatattattcaagtaagtgacaatatccaagtaagtgacaatattcacaatatcattgtgtgatttaatttgaaattttggaacatttctatcaatatttatatggtcataaattaaagaactataaaatcctgggctatgacaatgttttgaatcctaaatattttccttgattgcatttgtatttaactaagcttcacattcctgttgattttagatcccatgtgctgttggttattccttttccctcatcttcatgacatacgtgatttccttcatctttcgcaaggggagaaaaaatagtggcatttggtcattttgtttctatgttgtaagtatatttcttgtggatgtatactgtatatatttgatatacaattctgagctaatcctttaaattttgccctctgtaggatgataatattatggtctataataaacacaagattacaaattcagttactgacatggtcaaaactagaaattacttcaccaaagtccctaataagaattaattccataaagcctctcttcttttgtctaaattaggaggaaacgtgtataatttaagagtgtctattctaatttcctatgatttcaggatgccaaaaggtaagttattaattcaataaataattgttgacttctgcagtgtgtccaagttaagattgataatgggaggaaggagattaaatggacagtttcaatcctgaaagggctctcaaaagataaacagatgagtaagcaaccacttgttaaaatagtcacgagttattttccatcttaagagtctattatacaactgaataataaagaggtccatgaaaaacagataagggagagattcatttgtgaaaatgaaagcagagatttcttttaaaagatgaaatctgaaaaagagtaagatttcagccaagagaagtatgaggtacaaatagagataacgaacagaaacctagcagaggaaaagcccaagctgatcctaggaactggtaataatctctcctagatatagacaaaaaacaaggtgcacaatggccatggtcctaggtatggcaaaaaataaaatcatggcggcccttaaatgatgttctcaaggatttaaaagcttacagagcagaacagaaataggattagagataaacttgcaggaagaatactttgatagccataaaaatgatggtttggaagacagagaaattagaagtacaacaacttttaagtagtcattacagtgtattagaaggtaaaatatgagggcttccagtgtacctatcactttctgttatccctaattttgtattttagtacttctgcttaagccattccatgttgttaaatgcttctatttccccattggtatagttaccaaaagtcctacctttcatttttgttgttttattcctgttagatatcaatttcaatgttttctttgatttttgatcatctacttttattttttaaagtttatttactgtaattaaaatattatatctatgggtgctgggtgtgtcttatacctgtaaccctagcactttggaaggcctaggtcagtggatcacttgagcccaagaattcaaggccagcctgagcaacatggtgaaaccccatctctactaaaaatacaaaaatattagctgggcatgttggcatgcacctgtagtcccagctatccgggagtctgagggaggaagatcacttgagcccaggagtttgaggctgcagtgagccatgatcacgctactgcacttctacctgggcaacagagcaagactccatctcaaaaaaaaaaagagagaaaaaaattctgcatatcacatcctagatttatcaagtgatacctcatttgtgaaactctaggccaaaggaatttggctaagtcactaaaataaactgttaatggagatatactgatttcagcttggtttgcaagattggagttgaaattagtaatatcttcaagatgagccatctcgatttggaacttacattgaaattcagagtgattaaccttcatatttgcttcttttaggtcactgtattctctgtggctggatttgcgttcagtatcttcgaaagtgatattccatttatcttcacttttttaataccacctgccacaatgattggctgtttgttcttatcttctcatgtaagtaatgacacagtctgtcccagtcccttgaaactcatgaccaattgtgaagctttgcccaatgttgaaggtctactacaacatgtttaaagtgcatggggttcaaagatttctgcctgacggaatccaattgattttctcccagataaaacaatatgttccagctgactggtaatggaaaatttggtcctgattaatatatgggaaggaagggtaaggggtagtgggaaacagagtagtccttatactcatgtggggccttatttcctccttgatatgctcggctttagaaggaagcaaatgaaatgtccctaatctttgggatttcagagttctaaagaagcacccaagataagcaaagtccttttttctggctgactgatacctatacctatgcaaaaggaaggaagttactgtacatgagtgaagaggtatctatgggaaggggaaaggaagagaaggggccccacaaagagaaacgatgggcacaggaaggtatgtgaagttctgtgtgagaagaataaacactgtctctcactgtttggggaggttagcacggatctccaggattctctcgccaggtgattagtaattgataaatcctattgcttcaaacaaaagctcatagaccttgggaggaaggaagacagccccttgctatacactttagaaaggacacttaggtgatattcatggtcaaatgttagcagggctgtttagggccaattcacgtatatgtggacaaaattcaggaaacaaaaaactccctgtttagcaattgtcttttcttttgcagcttctcttttcttctctcttttctgaagaacgaatggatgtacagccatttctggtattcctaattgtaagaacacactgttctttaaaaattatcactttttactaaatttaataattttcagttctgtacacactgtgaaacttcttttattaagttagagatacaggtatctatagcccaaggagatataatgcttgtaaaatccggaagaattatttttacaaagatcaaatgaccaggtaatgtgcctcccaaattttaaggactctgtacaactgttagaggaaatgagaaagtaataatatcacataactatagttgtttcctacgtttctataaaaaagattgaaaatgaacttgatagtttcacaatttgctggataggttattaggagtttgtaattatttcactgaatgtatttttttagaagttcggttattattagtatatctttgatattgaacaattatctttttatgtttctaattgtgcatctctctttattcctagcctttccttcattttatcatttttctttttactcttcgatgtctggaatggaagtttggaaagaaatcaatgagaaaggatcctttctttaggttggaaaaaacacatcagatttttattttgttgatcaatatcgtaaaatatttttcatgcataaatcaattcattaacaaagaggtgccgttgtgctaggataggctggagtaggaaccatgtgcccatacaaataatacagatccagatacctaaacccaagaagattatgatctagtggaagaaacggacctgaaacatggagtattaaggctctatctgacactatccacagtggagcactggggaaagttaaatgtggcaggtcccatctaacaaacaatatattgccagttgaataaatgccattcatccaggaggaaggaacagaatgatccactggccaaggacagcaatagctgtgttcttttcctggtagtgagcatcccagccagtggatcacagactggttcagttattaatgggacttaaaagctgagactattttcggcaccatacaaagaagagtgaccataagcatcttgctccctctgtgtctcccaaaccacatcagtttcatcttttgctattacagaaagttggatgggagactgccaagatgaaagcagacctttaataaatcttctgagatcagtatgaaggaggcactcaagggaagagagactagaataagtatatcctggatattatcagacttagaatggagaggaaaagtcaatatgccacatattctgaagaaatgagagatcaagcatctaacttgtattttgctagaaactcctgattacaaatattctggcccattttccccatgaaaacataatgatgtcaacatggtggtgtcaaagccagggttcccagaaaaattacttcattgagctatgatataaaaattcttcgtcagctattaggtttcaagttgatattgaaaaaaacatatttctatagataagataagcaaggaggttttaaggggatgagagttgtgaagggagattatgatggtttgttaattgctcgtactactcaaacatatgctttaaataatgcaacttttgatacaaagatgaaagccagaaatcaatattaatggatggttttgactctagaatttctccaagaagtagtgatgtgtgtcaaaatccagaagaaccagaaggagaggatgaagatgttcagatggaaagagtgagaacagcaaatgccttgaattctactaattttgatgaggtaaaacataacacaaaggtttttttattagtcagtctaccagtctaattctctaatgattttgagtttctctgttccttacaaatgaggatcactattttagtaggtaattgccatttttacgattaaatgagcgactaaaagtcatgttaactcttttgttcttagaataaattaaaaatagagtgcaatagaaattattaaagccaagaaagaatttcagaatctgagctaagcagcagacatcattgcttgttggagaaagtgcacagtacaaattcagggtcaggtccagcccacagcatttgttttgttgtttgaggataatcagtgcttctctaagtttcattgcccccgtttgatctgaaaggacaggcaagctgtataaaatactgtgctcctgaaaaaactgcctttgtaggagaggaaaatgagtctctcctctccaaaagcaagtgttaggatagggcatggccaaggagcatgtcaccaaatagaaggtcttctttgatgcatggctggggcaacaaagggtccagccaatgggaagatggaattttgtttcaaagctaatggagagaattaaggtctgacataataacttcttgtcatttacagaagccagtcatcattgccagctgtctacgcaaggagtatgcagggaagaggaaaggctgtttttccaagaggaagaataagatagccacgagaaatgtctccttctgtgttagaaaaggttggccatagggatcttccacttctggctcagagccctcctcagaggttcctggttcctaatgagcattattctggaaaccacctcttggttcacatgcagacccagaggagaatgacaatgacagcttcctttgtatgtttcatttctaacttaaattaactcacctcacaaagaggagcctagtcacatctacaactaaaccataagctctctaataagatgaacttttgaagtaataacatttctattaaatgaacacaattgatttcctaaagttcattgtttttcacaagagaaccaagatgtgctagcacactctgaaggcttggccagcaagtgttagatgacctcagtttgtgccattattgcaccaaggttaggatcacaggagacagaatctgaaacacttggcttccaagagtggttttgccactttccatcagtgtgactttgcacaggtaaccccatcattgagagcttctgccccaactacataagaaggggctaaaataacaacttctcagggtggttgtgacaattaaatgacaactaatagcaaatgcttgtcacatagtgagatttcaactatgttttactcttaatgttaccattaaaatagattaatattaagtgtaacctttttttcaggtgaagttttaggattattaggacacaatggagctggtaaaagcacatccattaaggtgataactggagacacaaaaccaactgctggacaagtaggtgaattatgtggaaaatatgttatctaatggtgaaatagattgataagatttgatgaccttaaaaacaacagattccacttaatccttatataactgaagtgattaatgaactacccaagagaataaattcacgaattatcacataaatgcacacaaaagctaagcactgaaaggttgtcacagaatccttagggtgtcgcttttccagtcaaaacctctggagctggtggcgcctttgcccaagtttggctcagacccgctgggctcattctgtccactcagctcagcaggctgcactctgttcatgccaccagcctggatcccaagcctgccaagaatgagccaggtgcatagcggtgatgggtgtgtgagcaagcatggggtctggctgctgcacacagccaggcatgctggttgtggtggggcaggctgctccaggcactggcacaggcgccacctccatgcttgcatactgcaagcggcttccactgcaggcaccaaaaaatgtggtggcacccagaagcttggaggtgccagaaaccacagagccctaaaaaggatgtcacagccctggctcggggatcccctaagtctgggatccccgaagggctgcagctcttctctgcttctcattgcctgcaacatggcaagtggggggcatgtttcagccctgtttgtgttacagcttttttagtcccaccatttggcaggtcctgagctcttgtcccatgtccaggaagaatgaggtatgtgaataactggaggtgaggagcttcactgagcgacagaatagctctcaggagacccaaagtgggtctcctatttgtaggcaggtcatctcgatgagtgtccagcccctaatggagaggagacccaaagtgggtagctcctttctgcagctggtagtccctaagtctgtgtgaatctggctgagtccaggatttttatgggctcagaaaggaggaagtgtgtgccatttggtccatgagtggccatgggcaggcctggaaaaagcatcataagttctcactctgggtcacagactccacctagaaccggcagcctggcacccaggcttcaggccatccctgaagcttgaaggtggcttgaaggtggggtttcaccagagaaccacccctttctatccaggaacctgtctgcctgctgccatcaacatgccatctatggcacccaggtggtttgtgctgaggtgcacctgcaagtccatgctgagctgccctcagcacccccccggactccctcccacacttgtcagggcccaaaatccagagcgagctgaggtggcaggaggctggcatggcagttccaccctgggcacgtacacacccagcagggttgcaacagcacctgggcttggccacaactttgctccaaaattggagcatgcaactgcccctgagattcagtaaaggatgctccaattcagcgaagggcagggctcttacctgtttctggcccctgccagtcccccggagtacacagccccagtcacacctcccctgctacagccagcatctttgctgtggtggctccagacaggctgccactgccatcaaggagtaactattaaaggtattaagacgtctcccttgctgcagccagcatctttgctgtgatggctgcagacgggctgcagccaccatcaaggggtaattattaaaggcattaagagagaatgtccagcatcagagctgaaattaatgccagaattcacacacatcctatttatactgccatcagtcacacggatttgcactttcagtgagcattgtctttccagtatgtaatatttaatctttcataaaactgtttttaaaaaactgtattagacagttgtccttcacaaaatgcttagttattggaacatacatttttgtgcaaatgcaactatttttggggagtgttttcaagaaatagatcaaaaattagatacaagggggtgaaattgactttaattgtacttctaatttagttgtataaggtggctaggcaaacagaaaaagagctcaggtttatctaagagagacatcatggggtagagataaaacattttctcctaaattctatggcagaagatagaaaaccttaagaactcttttacaaagaatgtccaagggaagtacagaacagaatataaggcagatgcctgtgaaactgtaccgtgggaaaggggctagtagtcaagccaagaaaggaaaagacagcttggaatgctattgacaaatactccactaatgaaagaagagaaaaccgatattcacaatccctctgtagccacagtgagagcagatgttcatgaaggtacctctctgctggtggcttggccaactctaatttagtccttaacttcaatcatggacaccctccaactcagtcaccacctgggcccaaagtcagtattttatttctcattaagcatgggaggaaaggagataactgctcattaatacattggaatgaaatcttgtaaaaggtaagtctgacctgaagtagaaagccagccatttgggtgtcacaaaataagcttaattggatcagccagcgtgagtttttttaatccatgcattctcctgattaaatactttcagtgaacgcttgctgctctatggctggaaggacacatccctgcttgtcttgcaagcagctgcaggaactggcttccctgtccctcttgccacatatttgtcctccccgtcaagcttccacatcaagcttcatccccacacagggctttggtctcgctcttgctctgccccagattccttgctcttgcctttttttccatgactagcatcttctcctctttgttgaaatggccctcagaagacaggctctttctaattaccctacctactgccacttccccagttattcttaccccagcctcctgaatttccataacagcaccacttttgatctgtctttattctgcatgttcatttctctacttgtttattgcctgattcattcagtagaatgaaaactccagataacgaagcactagttattccaccctccgctgtacccacaggcaacacagcacttgttacataggaggtactcaaaagatgttgatccatgagcgaagttaaatagtaattcaatcaatatgcttcattttgacagtgatttaaaaaaaatggatataaactgttggccaggatggacaggcaccacatttatgggatattggatttttcagctgagattggattgttggctgtggacacacttattttcctgtatttgctctctgacaacctttctccaatgcaaaatgattacagattattaaacccaatgaggtttagagtttctctagtttttctaggttcgtgaagagaatgatgtcatggaaatactcaaagaagcagtgcagaaggtaggttctgagagggaactttcatctgcaggtgctactgaaagggagcggtggaggggatgccctggagttcctggggtactgccctcaggagaacgcgctgtggcccaacctgacagtgaggcagcacctggaggtgtacgccgccgtgaaagggctgaggaaaggggatgctgaggttgccatcacacggtacacagaggagccacatctgttctatacccaagggaggggtggaggaggttgagagtgatgaccctcacaggaaattcaggatgggagactctaaatgctgacccaggtcacactgggtagatttacaactagaaactcctttcctggatatcaaagtattaagtttctttctcatattaaataagaaaatttaaaaaggctgggcgcagtggctcatgcctctaaccccagcactttgggaggctgaggcaggtggactgcttgagctcgtgagtttcagaccagcctaggcaacttggtgaaacctcatctctaaattaaaaagaaaaatacaaaaatacaaaaattagccgggcatggtggtgcgcacctgtggtcccagctacttgggaaactgaggtgggaggatggcttgagccaggaggcagaggctgcagtgagccaagattacaccactgcactccagcctcggggatagagtcagaccttgtctcaaaaaaataataataataaaatttaaaatttaaaaagtaattattcattgctaaaatgtatagaaaatactaaaatttggactgtcatagaacaactatttggatatcatgtcatgtccttctatttcttcaaaaagcaatattatcttttgtaggggagcaagtcagccagtaatatcacccctccttccctgccccccgaccacatgtatttccagaactgcatttttgagttctgcttctccacccttgcttgggttatcctcttatctatttcctcttgtcaagaagactgtacgactctcctgtttccttcaggttagtggatgcgctcaagctgcaggaccagctgaagtctcccgtgaagaccttgtcagagggaataaagagaaaggtacgggcagggcttggtgttgctctgcaagtgccatagatgggaaccagatgggctgttcctcccgttgcagctgtgctttgtcctgagcatactggggaacccgtcagtggtgcttctggatgagccgtcgaccgggatggaccccgaggggcagcagcaaatgtggtgaggaacattaccacggtcagggacagcacggatgacttgcatggagcctgtgaaccatttttcttctgtaaaaattgtcccttaaactcttttgtggagaacaaaaaaactatcaatgtcacttgtaaaaccaatactttgcaaaaaaaaaagatctttccctgatgatattttacaaccatttcttattgaagaaagaattaccattgttagggcccataggtctcactcttgagtttcataagcgctcagctgatcttttaggtgcatttctagatcacaatcacgtagtgttccatacttagcatgagaacagtagttctcattaaggtgtaaacatggttgtcattgtacgtgtttactgtacattttattttcttctcactaggttgtgagacgctgttgttaaattttatgtcattctgttccccttcacacagacttctcacaaacaagcctctcttgcttagcacttctctttgaacacaaccctataatgaatgttgtgttctgtaaacgcccctcttccaatgcatgattccagtttaacagctctcacctagcttgtccttcctcatcctacctgccctattaagaaccctcttttacttaatctctttttgctaattattcacacgcatgccagttaaaaattcttttctctatctctttctgattaattagaggatttcctaaattgcaaataatctcttgacattataggcaggccatccgggccacctttagaaacacggaaaggggtgccctcctaaccacccactacatggcagaggctgaggccgtgtgtgaccgagtggccatcatggtatctgggaggttgaggtgagtgcctgtcctggacccacacttgagcccaaggtgcattgctggaaatttttgtctgtggcagggagagatcactgaaaacagctgaaatgactgtgcccaggtctaacaatagggaccttgagacaatgctagcagcaaatcaagtttctcaaacaacatactgaatggttttttttttctcctttctcatatgacctcatcctccagatgtatcggttccatccaacacctgaaaagcaaatttggcaaagattacctgctggagatgaaggtgaagaacctggcacaagtggagcccctccatgcagagatcctgaggcttttcccccaggctgctcggcaggaaaggtaaacatggttgctgttttggaaatggtaccaaatgttcactgttacttgtcagttatgttgagtgatagtcattcaaaaggaaaacctaaaagaaagagattatttgttggattctgcaggaagtaaactagagaagagaaagcagacgtaagagctgatatagcaaatgtcatggttccactatgcgccaggggctgtcctggtattgtgttatcctatccaaaacttacagagacttttcaccgtagacatagctattccagtaaaaaaaatgagtagacttcaaaaaagcgttgtgagtatccttcgtaaatgaaattgattattatctttatgaagtggaaattggctgagagacaggttaggtcacatgagaagttaacaagtggcagaaccaagaggtaaacctaattattttatttcaaatcaattaacatttccaattttatgtaaattctggtaacagcatcatcctgatgtatttattttcatagacagaaaaaaattaaagagtagccttaggatcatttttaacacctagaatttatagcagatgatagataatttaggagttaggtgaaaaaaatgataacaaggagaaataagtcatcataacaatgtgggaaaatatatttctacagtgtaatataaatggaaaagcaatgctataattcaatgtccagctcatggctgtatagaaatacatcatgaagccacagggaataagcgaaataggtgagaatgactgcaccataaatatatgtaatgatgtcttgtgaaatgaaatgtaaatcttcttaattttcaaatgatgaaaagacaaacatttatctgagaaacaaaatattaaaaaatgttgttgcctaccttatttggtgctgaatttctgctcttctaaccagaggctcaattacattatcctctattaggaaggcagtttgagtaggatggaggagaaggagagatatgtgacttgtgggaaatatatctagatttctaccctatttgaggaactttaagaaactatgcagtataaattccttgttgaaggatgaagttgaagatcaagtattcagttagaaaacaaggtggaagatgactttggcaaatcttgaaatatcatctggacagcacctactcacttccatccaaggggccaacaacactaaactgtctgagtattacactcccttcccccagttctccttgtgaactgcttccttttgattattatcaattcaccttacccttttttcctacacaaaactgactctcatttatagaaataacaacccacatacaaagctacacaaatcaaaacaatatggcactagtgtaaagaccaacatattgatcaaaggaacagaatagacagccgagaaataaatccctgaatatatggccaactgatcttcaaaaagcgtgccaagaatacatgatggggaagggatagtctcttcaaccaattgtgttgggaaaacaggatatccacatgcagaagaatgaaactagaccccatcttatgccatacacaaaaatcaactcaaaatggatgaaagacataaacataagacctgaaattgttgaactcctagaagaaaacataggaggaaagcttcatgacattggtcttggcaatgagttcatggatatgacaacaaaagcatagacaataaaaacaaaaataaacaagcgggatgatataaaactagaaagcttccacacagcaaaagaaacaattgacaaagtgaaaggcaacctatggaatgggaggattatttgcaaattatatatatgacaaagggttaatgtccaaaatacagtcatgcactgctgaacaatagggatactttcagagaaatgggtcgttaagcaatttcatcattgtgtgaatatcactgagtgaatttacacaaacctagatggtgtagcttactgcaaacctaggctatatggtatatcctattgctcctaggctacaaacctgtacagcatgtgactgcagggaatactgtaggcaattgtaacacaataagaacttgtgtatctaaacatagcaaaagatagagtaaaaatcggcataaaagataaaaaatgatacacctgtatagggcacttaccatgaacgcagcttgcaagactggatgtagctctgggcgaccattggtgagacagtggtgagtgaatgcgaaggcctgggacattactgtacatgacttttataaacactgtacacttaggctacactaaatttacttttaaaatttatttaataaattaaccttagtgttctgtaactttataaacttctaaaatttttttaactttttaacttttttgtagtaacacgtaacttaaaatacaaacacattgtatggctgtacaaaaatattttcttttttcatatccatattctataagctattttctatttctaaaattattcatttgttttttctacttaacattttttattaaaaagtgagacacaaacacacacacattagctgaggcctacacagagtcaggattatcaacatcactgtcttctatctccacatcttgtcccactggaaggtcttcggggcaatgacacatgtggagctgtcatctcctgtgatagcaatgccttcttctttttttttattttttttattttttattttttatttttttttaattatactttaagttttagggtacatgtgcacattgtgcaggttagttacatatgtatacatgtgccatgctggtgcgctgcacccactaactcgtcatctagcattaggtatatctcccgatgctatccctcccccctccccccaccccacaacagtcccagagtgtgatattccccttcctgtgtccatgtgatctcgttcaattcccacctatgagtgagaatatgcggtgtttggttttttgttcttgcaatagtttactgagaatgatgatttccaatttcatccatgtccctacaaaagacatgaattcatcattttttatggctgcatagtattccatggtgtatatgtgccacattttcttaatccagtctatcattgttggacatttgggttggttccaagtctttgctattgtgaataatgccgcaataaacatacatgtgcatgtgtctttatagcagcatgatttatagtcctttgggtatatacccagtaatgggatggctgggtcaaatggtatttccagttgtagatccctgtgcaatgccttcttctgaaacacctcccgaaggacctgcctgaggcttttttacagttaacttttttataagtagaagtagtacactctaaaataatgataaaaagtatagtatggtatagtatagtatatacataaactagtaacatagtcatttatcattatcaagtattgtgtactatagataattgcatacttttttatgattggcagcacagtaagtttggttacaccagcatcccgacaaacacataagtaatatgttatgctataatgtcatcatggctatgatgtctctaagcaatagaatttttcagctccattataagcttacggggtcactgtcatatatgtagtccattattgattatgacatcattatgtggcctatgactgtgtataggaaattcctaaactccagtagcaaaaaaaaactaataacccaattaagaatgtgctaaggacttgaatagacatttctccaaagaagatatgcaaatgaacatgtatatgaaaaactgttaaatgtcattagtcatcagggaaatgcaaatcaaaaccacaataagatatcacctcacatctgttaggatggtgctatcgtttgagtgtcccctccaaaactcatgtcggaatttaattaccattttgatggtattaaaaggtaggaccaggtgggacctttaagagattattaggtcatgaaagctctgccctcatgagtggattaatctattcaaggattgataggttatctcgggagtaagttagttatcttgggagtgggtctgttataaaagccagtttggctctctcttgagtgcccctcccaccctataatgccatctgccaagttatgacacagcaagaaaaccctcaccagatgtatcccctcaatctgtaacttcccagcctccagaataataagaaataaattatttttattataaattgcccagtctgtggtatagtgtcatagcaacaaaaaactggactaagatggatggctattccccccaaaaaaataactgttgctaaggaggtggagaaattggaatgcttgcacacttttggtagaaatgcaaaatggtgcagccactatggaaagcaatatggtagattctcaaaatatcaaaaatagaactatcttacgtcctagcaattgcatttctgggtatgtatccaaaagaactgaaatcaggatctcaaagagatacctgcacccacattttcattgcagcactattcttaatagccaagatgtgtaaacagtctaagtgttcactgagagataaatggatgaagtaaatgtgttaggtacatgtaatgaaatactatctgaccttgaaaagaaattctgcaacatgtgacagcacagatgaaccttgaggactttatgctgagtgaactaaatcagtcacataaagacaaactctgcatgattctacttataagatatctaaaatagtcaaattcatagaatcaaatagtactaggctggggagagaagaatatgagaagttactcatcatagatgtaaaattttagttaagcaagatgaataagctttagagatcttctgtacctcattatactctcttttgtcccactgaacctgcagccggaatcaccccaaacacagtggcaggggagtttccacaagagagttccccaaactgtcccaagatggggccggttgggattccaaaaagagaactaagtccacagtgatcagtccaaatcatttatcagggcaacttccttacagagtgggctgcagcaattttcgagatgaacagtgagagaaaaggggtgttctacctaggcatgtctacagtgaggggtcaggttatggagtttttatgaaggtttaaggaatttggcacagggtcagggttagttgttttggacaacaatctgaatagctttatctgttcctgggaatgttcaaggccctagcttgggttcaaaccagctgggaaagaccttctgttggccagatgacagagcagtcaagaccctctgatttttggtcagaacacagaaaaatgtgaaggaaactgggggaccctacatactcatagtcaacagtactggattgttcacttcgaaatttgttaacagggtagatctcatgttaaatgttcctaacaccattttttaaaagaaaaaaaaagaccagagagatgattgccatcagttcacatctggcacaagtggtatcactcttcttacctctccttttctctcaggtactcctctctgatggtttataagttgccagtggaagatgtgcaacctttagcccaagctttcttcaaattagagaagggtaagaagtatgactttgaagtacgaccctggaaagaagataatttcaaatcataaaataatcacctttatgacaaaaatgaaatgtgacaaaatgcattacattttaaagttacagtctcaaattgaattttaggaagacccaaaccaaggagatagagggattctctgtgtctgtgccaggggataatgagagtgatttttttcacttttgctttgtggggttttgtcatgtatttttgcatgtatgttggtaaaacctaagtcaaaactcagttatatatgcatttaagaaaactttcttttgaaacatctatgcatacatatttaaaattaaatttttccgtggactggcatattattttactgtcttagcctgtatattaagaaactgactcctgtctggtcattgaaacaatctcctcgcatctgtcacattttagaactaacttccctgcatctgtcatcacaggttcatgttttccttgcaattttagctcattaactctgctactctgaactgtgctagtcagaactctctcgctatactgttttcattgtcactgctcagtgatatatctttgcttgcttatcctctgccctaaggaagagattcagatcttctagttctagaggaattgtctaacttgctagagcatcaggaattgtctgattctctccttgagagcatctgtggtcacagtaatgcatcttcttttcattctctgatgtatgtgagctctccaactttctgggccacgtagtcattcacagcactctccaggttggcattaagcccagtactgacctgaaacttttggtggcatatttccaatctgctgagctcctattagagctctaaccgcctctcccagtctattttggtcaaaagaacagttcctaacccaatcagaggaagctgcaatggtttttggatagaggtccgtgaagatacctgctctctaaaaaggctcacaaatccttctccataatcttctgatacaagccttttcaaaatatgtctgccttccacctgtttctgtgttgaatgtgcaaaacccactggcccacaggcaagaaagaaagcttactcagtagcattttctcctttaaatacagttcgcaaaaactgcacaacatacaagcataattcaagcgctttttctcccaaacctaagtaaatgcattggtgtattcttaactgaacgatgtacttaagacatgaatgaatattaccttaacctatttaagatttttaaaaaatatatcatttgtactatatgctgatttatgagacctctagatatgaaatatatgaactaatacatgttcatccctatgcagttaaacagagctttgacctagaggagtacagcctctcacagtctaccctggagcaggtgggtcatttttagggattcgtatcatccatggtatatgtgtataaaacattccctgggagctgcagaggcagcacggcattgttctcctctctttatttccttcctccctttcaggttttcctggagctctccaaggagcaggagctgggtgattttgaggaggattttgatccctcagtgaagtggaagctcctcccccaggaagagccttaaaaccccaaattctgtgttcctgtttaaacccgtggttttttttaaatacatttatttttatagcagcaatgttctatttttagaaactatattataagtacagaaatggttctccgtgtggtgggaggaggaggttcgggtgctgggtaagtgccatgtcagtgtggacagaggcatttgactaagccaacctcctctcacagcctctgtatctctgcaggccatactggttccattgttctgtataatactgaataaataaatttacttttacatgatcgtataagtttctagataagataaacaaattttgtttaaatttttttaataaaaatcttaaaacactttttttctaacctagactgagaaattcatgtttacttttctaggtgtatgatactttgtaaagttgatactttcctaagaatttaacatgtcatatttttgaaatagatttaagtgtgcttcttattgctaaaaatactaaatgtcatgggtcatagtatctgatatcaatatcgttgataacatatccacaggtaacaccatgatgtaggcataaatggaaaacaaaaaccctactatttcaaatatattgtacttttttatttctgtaagccaactgtgtgccattttcactggacttttaaatctagactttagtgatgtctacattgtaaatgatcttttgtggatatttgtcacttggtttcagaaagttcacaaatgtagcaacagctcacatgactgagtaggtagaaaatgtgaaataaatctcatatatatagttttg

SEQ ID NO: 53 - DNA, 3419 bp, Homo sapiens
cggaaatggctggcccttgccagcctggtgtgtgatgtgatgagtttgggaaggacagtttccatgagaagcagtggcagggatggggatggatgccttcgttgttccaggcctgtcagggggcccaggtccctagcagtccctgccctctgccctggactggaagctgactaggagagctacgaatcagaacaactggccattttctagctggagatgccagctccgatggcatggagggccctggggccaccccaggtgtctttacctcatcctggtgtgtaataaatcactgaccatggagccatcatggctgaaataactggtgtgaggtgcctgatttcctgccacagcctctcaacaccctccacagtgcccttccacgcctgggtatggcctgggtggaggggacctcagggctagggaaggagaccatgtgtgtcttggaaacactgtagcatccctgtctccctgaacttgcctcccaggaggctggcagccacacctcattccttctggtggttgagtggccagggagccttggggtcaatcaggcttgggtttctcagcatggcccctctagctatgtggccttggatttgtcacctctctctgagcctttgtgtcggaagaggcagaataaacatgacagtctcatttctcagaaaggtcaatgaaacaaaaaaagatgacggcagccaaccaactcttcccacaaggcactcagcacagtgcctgccacttggccagatcacaggatgtgggcagtatcggcccctatgtgttcctgcctaggcccagcccctctccttgcctcagtgctccctatctgtgaaatggagctgagatggctggagccagggtccagctagaggacaatgcccacgtggcatcttcggggccctggaggagggagtgggaggaggatgggaggggtgaggtgtcagttccccattggtctaggccaggtgttctgtggcggtccccacaccacacaagcacacacacatctgcacctcaaccacagactacacttgctgaactggctcctggggccatgaggctgtcactgccactgctgctgctgctgctgggagcctgggccatcccagggggcctcggggacagggcgccactcacagccacagccccacaactggatgatgaggagatgtactcagcccacatgcccgctcacctgcgctgtgatgcctgcagagctgtggcttaccaggtgagtccttcaccactgtcaccctgccctgctcacaccccttctcaagccagacccctccacccacctcacattccaccaccggcctttgatccccaatccctaccactgggcatcaagccacagatgcagcctttcatatattccatgcctcagtttacccatctgcctgcctaacagcagacaatctgggagacctcctcagtattttgagaccccagggaatcactcacttgtccttagacttctccctttccaggcccatccttgagtccggactccctccccaaccctgacggggcggctttggctatgtgtacatggtgcaagtgcacacgtgtgagcgcctgcacgtgagtatgcgtgtgtctggcttcacacacacacctgctgagcatgcctgcgtgccagtgtctctgtgaggtgggggcctgggagtacttgtgtgattgaatattgggctccagtttttcttaccttgctcttgtggtttaaaatggcacgtgccggccgggcgcggtggctcacgcctgtaatcccagcactttgggaggctgagcggggccgatcgcctgaactcaggagttcgagaccagcctggccaacatggtgaaaccccgtcactactgaaaatacaaaattttagccgggtgtggtggcacatacctgtagtcccagctacctgggaggctgagggagaagaatcacttgaacctgggaggtggaggctgcagtgagctgagatcgtaccactgcactccagcctgggcgacgaacggcgtgagactctctctaaataaataaataaataaaaataaaatgacacttgccactgggcaggtgtgccctggacgagggaccccagtgcccaggcctcacctaccacttcagcatttctttcccatcccccatccccatcccagagagctttgggggctgggggaggggccatgcaacagcctcacaggtgcttcctgctcaaacggctctcttgccactttattttccccagagactctgctcctatcctccccacctccccctaactgagcagcagtcctgaggccctgcctcccagtccctccttgttccagatgtggcaaaatctggcaaaggcagagaccaaacttcatacctcaaactctggggggcggcgggagctgagcgagttggtctacacggatgtcctggaccggagctgctcccggaactggcaggagtgagttgccaatcctgccccccacctccctcctccaagggcaggcctggtgggtggagattcccactcagccgctcacacaacacacacactcctctaggactctggtccaagggaggggctggctgggatgaagtctgggctctggagctgagagcaagtgggagagcagagggccagtggacaaggtcaccttgtgaccttgggccaggggctttccctctctgaattccacaaatgcccagcatgtccagcttgctgtggagatgggtctctccctggctgggctcctgccaaaactgtactcctctcctctccactgccaccagctacggagttcgagaagtggaccaagtgaaacgtctcacaggcccaggacttagcgaggggccagagccaagcatcagcgtgatggtcacagggggcccctggcctaccaggtgatgcccggggcttggggataggatgaagctcctggagccttggtttgccccactgtgggctgggcagcatctgaggctcctgctgggctcccctaggctctccaggacatgtttgcactacttgggggagtttggagaagaccagatctatgaagcccaccaacaaggccgaggggctctggaggcattgctatgtgggggaccccagggggcctgctcagagaaggtgtcagccacaagagaagagctctagtcctggactctaccctcctctgaaagaagctggggcttgctctgacggtctccactcccgtctgcaggcagccaggagggcaggaagcccttgctctgtgctgccatcctgcctccctcctccagcctcagggcactcgggcctgggtgggagtcaacgccttcccctctggactcaaataaaacccagtgacctcacttcttttctctgcaaaaggtgcttgtggggctgggagtgcagacattggtgtttctgctgatgtcccttgtg

SEQ ID NO: 54 - DNA, 32379 bp, Homo sapiens
tacttgtgttgacatttgcgaggtagtattgccttgcaaatacaggctcaactccataaccacaaggagagcatttgaagcattttaaaaaatagcaatgaggtatctacttttttaacaccgtatggcaaaggaacagtgaacatttgaatgggtattcagcagtgtaaaacgctgacagcaaaactataccttccattgagttggcagctcattcttaagaagatattcatcccggcacaggtatcggacctgaagttaatctcagtgtatccccctcttcctctacaatgcagtttttaactctaactcaggagaatgtttaagtcaggagaattttaaaaaatatcaaaatcagtcttttaaatttcttttaaaaatatgtgcatatttataaaatattctgtataaataataaagtgtggtcatgttttttttttttttggagacggagtctctctttgtcacccaggctggaatgcagtggcgctatctcggctcactgcaagctccgcctccagggttcacgccattctcctgcctcagcctcccaggtagctgggactacaggcgcccgccaccacgcctggctaattttatattttcagtagagacggggtttcatcgtgttagccaggatggtctccatctcctgacctcgtgatccccccgcctcggcctcccaaagtgctgcgattacaggcatgagccaccgcgcctggcccggtcatgttatattttaagtttttataattgaatacttaaaacatacataaaagtagacagaatagtatcatgaatgcccatgtacatatcgccagccccaccaacaacccataggtcatcctgccctgtccacacctttacccattccttacagtcctgtattattttgaaataaatcccagatattatatatttcattcattaatacttaggttaattaggtaattgacctaaaatataaaaactcttttataaataaccatattatcatcatatctgaaaaattaataattccttaattatcaaatatccattatttaaatttataattgtgtcataaatattgtcataaatagatttgctgttttaaagcttgttccttcattttctctgttttgttttagataaacattgtcataaatagatttgttgttttaaagcttgttccttcattttctctgattgttttgttttagattcagaggttacttatgcttgtttgttacatggatgttacatgtgtaatgggggatattggacttctagtgtactcatcacccatatactgaacactgtactcaaaaggtaatttttcaaccctcatccccctccaacctccccccttttggagtctgcagcgtctattatgtccacctgtgtccatgtgtacccatggcttagctgccacttataggtgagaacgtgccgtattccctctccattttgtgtgtgtaatttatttctattgaataaatcaatttgtttgtatttcagattcccctgctggtttgatgattagagaatagttgcacttgtttcctttattctctgttttccctgtgaattggtcattggatataaaggccccattcaattcaggattttttgttttggggttttttggtgggggaaaggcaggatattttcttgctttcattgtgtcagatcctatcattttcagtgcagtttttaaaagctaacttttctattttctcttacctcatccttgcctttgttttgcccacaccttctatctgcaagtaacccatattaaaaacagagtgcataccctttcatatttttctccatattcacataggtatctttacatatgtacacagagtttgctttacaaaaatgaggtcatggaaagccttccaagtcaaatagtagagctcgagtttgttctatttagtggctgcaaaataatattccactgtgcatatgtaccacaatttattcagttatctcactactagtgggcacttgctttgctcccagttctttttgccccatcctgttcatatacacttatatacatttatataggatagaatcctaggagcaggatttttgtctcaaatagtagctttttattttaacagattttttttctggacagctttcaaaaaaggctgtagcaattcacatatccatcagcaaaggataagatcgccctttcccccacaatcttaaatagtctcaaggagccagcaagaatcaggggttctccaaggagaggggaaagtctatgagattccttactcagcaataaatgagctaacagtgaattattcctcaatagaaaggcccctttctattcatctttggatctttttagccaaataggcctcacacagaaccaaagcccagaacaacccaaaacagggtctgaagtccagaacaacccaaaacaaagtccagaacaagccaaacaggatctgaagacagttgtctctaactcactcctccccacttcatgaatccccgtgagttctttcccactggatagtacttgcatattacacaatcagctgcatctagcatctgctcttaatttcatttgatattttatcatctcagttaagattctgggaaaaagaagttgccttctttttgaaagggattgaaagaaactaggaaacttggcaggaagatcattcttaagccaggaaaaaaatttttaatgctcacatgtgaacatgtgatggtcataccagaaggagcacccacctccctccctctgtgacagacacattttcttagccttcacctttccttctttcaagttgctgaaaatccacagtgtttctgttcatttgttactttcattctcacctatcttctctcttgctccatctaccagaacaataattccccatataatacttctcacttcacttttcaacgcaggacctcttgttgggtaagctaaaaggatatgtgctctgtaaataagaaaaatctttattcaaagaatctatcaaatgttcccatgactccatctctatttgtatatctaaagattgcatagtagagaaaaacaaaagattagccctgcttcatcttacagctgggagagtcatgaaaggccaaatgggtaacaaagctcctggttttgaccaagcctagccaaagaagctactcaaatgtcaaaggcattgtttgtataaaaagggaaccaaagtacaggttccctttacagtagaaataagagaactccctgttgacaaagggaggaggaagaaaatataaagtacacttttaaaacatgaagtcttcatagcagcttatagtcgttcagagaaacatgttccactgagaatgacttgagagagaggattacatcattatgccagaaggaagaagccactgtgcatgctctatcaccagcctcaccctcctggtcagccttacaagagtgacactggatatactccagaagttggacccaccacagcctgcacactggagtaagtgctttcctccagttgaagctcatcttagaatgatctgtgacttagaccatccccagaatggtgtagttgcaggaagcctaacgtatgtctcctgagacagcctcagatctgagtttcctccttatgttttggtatttggaaaggggtggagaagatactcttgggtagaagtatgggaggcatacagattcagaagaaaaaggataactctatctttagtgtgttgtctgtggtggcatctagccttaccactgtatacttacattccacctacaaacattaaaataaaatgcacagtgcactcctttgttttaaaaaggaactaggaaaaaactcaaatggcaatttggttccagattttttttttaatgtgatctttgatctgaagtcaatgtaggatgagttctgaacaaagtagcactttcaaaggttgtatattaaagaggtgaaatgaaagacaacttggcacttgagatatgaatttgaatgtgtatatggttacagtctggataagacactgctaacatgacttcattaactgatcgcctatgtgggaccattggacaaggagagggggtgttctggctgtggtgccatatactgaaactgaacccatgagttgggcccacaggaattgagggacaagccagatagatggcaagaattctaatttccaatatgcaaatcagtctaaacatttgactttttttaagtctatttggaaagtttttgaaacacggctgcactaggcgagttcattaagtagcaaaattttaactattgttataactttttctttgcccttttcagttaacactgcatgaccacccaggtgcatgaggctctcttctcctcttagtgacaataacaggctcacaggaagggttcagtattaattatttataccttacttcatgtggctctaagtcaatgtattgtctatgaggttttatatttaagccatacttatgaaatgctaaagaggaaaaagcatatttagcacatttggggcaccctaaatgtgaacctgagtaaatttcagtttgtttgtttgtttgtttttgtttgttttgagacggagtctcacgctgttacccaggctggagggcaatggcgcgatcttggctcacacgcaacttggcctcccagattcaagagattctgtcttagcttaccaagttgctgggattacaggtgcccaccaccatgcctggctaattttttgtatttttagtagagatggggtttcacgatgttggccaggctagtctcaaacttctgacctcaagtgatccgcccgctttggcctcccaaagtgggtttgttgttcttttaaagaaaaaagaccactacttattttaaagggtgatagcagtgtcctgactctacctagacagatatgttcattcatgtgctcattccagttgaaccataataactgcaattttcaaaggaggaatacagagtctgggaaatcagaagagtatagcaacaaactggtatacgaggaaactgaaaatgaaaaatcagcaaagtggtatttgtacctgcctgagtggctacagtggtgaaggtgaagggtggcaggctagattagcaccatctcctcccctcctcgcctgcggcctcagtactttccactgtggtcccaggatacgccaggtcaactgtgatcaactctgacacagacaaactctgggaggggaggaggcatcctttcctattctcagcggtctcagttccagagaccactttagtaagctctccttgtcataccttaaaacataaattaagacccataagtaattccaaaacctcattttattatgttgtttttatctccttgctcgcccatcttaaaaaaaatggtaacaccaatctcagagactgatttctcctacttattctcttaggagggaaggagtgttaaataagccaaggcatgctaacaggaaggaaaaaatggagattatgaagaataatcacaatttgaaaactattaaaaccacgcaccaggcagtttacaaaatatttatttctttgttatattatttctgctgctgaatttggtcaagagattgtactaatcataaaatgaatgttattgatcattttaaagtctcttctaaaagtagctaaatttatactgctgattccttttgaaacatgcgacctacagcttcttggcttttatgagctattcaagagatatttagtcatcacgttgtgtcacaatgggagtgactcacagagcaaggagagaacctgaggattcctcacacatgtagtactcagagctctacggaaacccaggcacctcgacctcaagaggatcagcctggccagggtggcacaactcttccttccccgtgcacagcaggaaagctgccatcagctgagcaagtccaccaacagtttctgtgtcccacttcatctttaataaggtaactgatgacagttttgtcatttattcttttatttatcaagtcaatctaaactttctttgattttcctcactcttgcagaatgaatcggtggtctttcaagctgtggtcaatgttgctacttcttttaatgtaacacattagaacccagtgatgggagctgggtccatctcaccatagaaatgacctcggtgtgacctgggatcttgccttgaactcctccaggactctctttgaatgtcctttagcaccctagtgtcccaattcaattcatattttattttctctgtgccttcttgacactatctgtgaatcttatgattaattggaaactggagggggaagtctccaaaaagcacaggattcttagatgagtttcttactgaagcagcagattctctgtcaactgcaggtctgatctgtttgtctgtccgctttatcaatattatcagatgtaagtttacatgaatacacacacatattcactaaactgaggggaaaaaatgccttgtaggtcataaaaaagcagggaaattcccaacaattcatatttgatccctggatccaggggtggcagcaataagcctgctttagatatttactccccattttatgatccggtggtttggtttttcaaatgatgatatggctcctttcgcaatgacttgatgtttaggaggtgtgcttcaataaatacattttaaaatcaacaatcaagttagagttgtacaaatggctctgaaatgtcccactacactgttagaccaagggcacagattgtgcttctgtactatttatcctagtatccctcggcatatattaactgctctaaaaatctccttggctacacgctgcatcaaatcaaagttaaatgttataccacctttctattctatttttaatattcaaagagggtgctcagattttagaacaaatttcaatgtttaagtacacacaaaaaaatcattaactcatatatttcaagagtaggaaatgggaactggtgttaaaactcttataacaaatgtcactgtcttaagggacagtgtttaaaaacgcatacctggccgggcgcggtggctcatgcctgtaatcccagcactttgggaggccgaggccggcggatcacaaggtcaggagatcgagaccatcctggctaacacggtgaaacctggtctctactaaaaatacaaaaaattagctaggcgtggcagcgtgcgcctgtagtcccagctacttgggaggctgaggcaggagaatggtgtgaacccgggaggtggagcttgcagtgagctgagatcacgccactgcactccagcctgggcgacagagcgagactccgtctcaaaaaaaaaaaacaacaacaacaaaaaactcagaccttttcttctgctcaaagatcactgtggctgaaatatactgaagttttaaacacacttttggaacctatacatatgttctatgttctaagctttccttaaagccttgtgactacaaatgataactgtacacaacatataatctttcccagatagcaattgttatgcagtgaccataaataaagtaatcatagctttaacaataatttgtaacctgctaatactgtcaggaaacattgtcaaaataataaacctaggagggacttgggataattaatgaatagttagggatgtgatggtgaattataatttaaacgttttgaaggaaggcaaaagaaaatcagagatgcttttatccttagaactaaaaatgcaaaatgtaaatccagcagatcttccctatttgaggcagttggtacacctctgctaggagggagggaagctacatcctgaggaggctgtctgagtgaatctgtagtggaagtacacacgaactccatgcctcgctgtcccagtacccaaagcacagtctggctgccaaggattacctcctgccctcagggaagcaggaatcaagggcaaatgtaactaaccagaggaggagcttcttcatccattgagtaagggaacttaccctcccacgacgataaataccaactcaactatatcatcagcagcataataattattataattgttatttcagtcagactctcaaaaaagcattcgttgcttaatgcaagcacatttaatgtagggtcccttggtgccattaaaaaatttttttttcagatttctgggtggaccatttgaacacatttctcacagaaacataattttttagtttatgtcaataggttccagtgttcatttttttttaagtgtggaagaaatctctaaaagccacctgggttttttttttttttttaaacaaaacaaaacaaaaaccagtttttttttacttcaatgaaaaggaaaaaatgaaaaaggaatgttgtgttaagtcaaccgggtttacaatattcaaatatacaagaggcatacatgttcagtggctttcagtattcagaaagccatgcaagagaactccaaaaagagaatactttagaaaatcattgctcaatgttttctatttgatgtattttggtaaacaacatagttgttgattcaacttgggccacaattgcaacacattggaagtaaataaagattctacaaactcctgacagtgtggttgactagctttggtatcgctttctaaaaggaaacacttcatgaagttatgtggaaataaaatcaactggtctgggaggaactatctagaaagaactctacattgcttataaaaagtatacctcacaataatattgagatattttctgttcttttttttaaactgtgtcatttatttttaagaaacagaggaaggtgaataagagaagtgaaattaaataatcctattttaacttttttactaggaaaacaaactcaggaagaaaaagaaaagcagaagtgatcaaggagagcgctcgagttgcaatattttcctttggctgctgacaggcagttactataaagcattgtgcatggtgtatgaaagacaaaactagttctcctttcttggtttcttttgaatctttgtgatatggtagagaaagtttgataaagtgttcttgtgcctgctgtcgactgataatgtgttcatctctttgcagttcttccttctctttcacacagtttagagttcagagagttttagttctggtcactctctggcaagtgaccatagttatgacctctactctacaccagaaatatcttgacaattacatgagataaatattacataaacacttcccaaaactttgtaatgttatcaaaattggaagtgtgaatattatgtattattataattgctatcatccttttgccccagcgattcagaggtctcaaagattaatccaattatcactagaactctggagctacagtggagacttccttctttccttccttttttccttctttgctgtacaacatttactaaacatcaacataatgccaagtatcatacaaggaactggtaatgtagagaagtatatgcagagcccagagttgagtgggaatacagactgcagtggtagaacagaatggtctgggtatcagtcccggaattgccactacaactgtagctggagccaattaaacagagcttctgaatgtgtttcctcctctatacagtgaagataattttgtcgtaaggtgtaaataagataaatatttatagatcctaggaaacggcctacaacatgttaggcactcaatgaaccatagcagttattatcattcctccctgacttggtcaaccaggaacttgagaatcatagatttgctaggaggatattttgaattctgtagggtcagttggccacccaccaaagggtacccccagaggagctgggggtcaacagcatggggtaaaccttgagggagggaacagatgggaggtgattggatgaagagatttgggtgaggacacagagccaaaccatatcagcctcttatcctcctgatgacaaaaagacattttaaaatatttatatagagggaaattaatgcttgcagcagcaggatatgagtaatttttataagtaacccaacttttccatgaggccattaaaaaaagaaactcatcaatgtgatactaccaaggaaccaatgactaagtttccagaaaagtagttctagtgctatgatattctggactcccaacactaggaagttctagaacagtggttctaaactgggggatattttgtcctccaggggacatttggcattatctggagacatttttggttttcacaacttggggaggggtgctactgctgactagagagtagaggccagagatgccactaaacatgctaaatgcacaggactgaccccacaacaaataattacctggcccaaaatatcaaaattactcagttagaggaatcaatgcctaaatatgagcaatacatagagcagactgcctcataaagtgaaagtgattcaccctgccatgaagataacaaagttcttactgtaacggcagacattaggtcacttcacccagtactctccaaggtagatgttgtatttctactttacaggtaggaaaatggaggctaagaaaagttaatttgtccgagggccctctgatgatagtgaaactgggatggaacctctgcctgcttgcttctgaggtctgggctcctaactactgctctactgcctcgagccaagagatttacgccctattaagcaatttgttgtgcgataaattggaagacacagcagataagcaaacaactcaagcaaccaggtcagttcctggagtttctgaattgttgggaccaaggggccgtgcagaggtaaccacagctggcgtagtgtggttgaggtagccctattagccttttagttgctgttactaatttatttctcagtggtcaatgaaccaattggccatcaatcagctttgtgtataggtcatgttcccatggctctgacccaggttgctgctcagagttggcatcgtggctaaaatattactagaggtcaaagatatgtgtgtgtttgtggttgatttagtcgagtgatctagaggaatctgaaccagcatttctgggcaataatacttgagttaaggagagtgtagcaaaactctaggttagcattggcagtccctaggattcagactgtaggcctaaatgaccctcagtccagagctgtacctaatgaggacaatacattttaatgtgagtccattcttaacagcaaaatttcctctttgcttgtcaccagggaaaaatgggtttgcatagaaaaggtggagattgagggggaagcagaatggacaaggagtaaagagggaatccaactacttagatttgagctttcgttcttctttggtagttgtagaggtgagcttaccaaagcatagatgacaggcaatgtggtatacaagttactacactccaaaagtctggggttcttacttattttgtgcatgacatccaaagtagcctaataaaatcttttcacagaaaaaaaagctttactttcctttgccaaatttttaactttttattctgaaataatttcagaattattgaaaaatttagagactaggacaacccagattcctcaaatattaacactttaccacatctgccttctcattcctctctatatacataggtgcatgtgtggttttaatgtttatttatatacatatcattattattttcttaactgtttgagagtaagttgaagacatgatgctccttactctttaaatacttcagtgtgtatttcctaaaaagcaggccatgttctacatcatcacagtataattatcaaaattgggaaattaatattaatgcaatactatttatcaaattttaagatcttattcaaatttcacttgctggcctaataatgttctttctgaaaaaagaaaaaaaaattttgatccaggatcacatattgcatttggttgttgtatctcgttggtctcctttgatctgaaatggtcctcagtatttcttttacttcatgactttgatgtttttgaagagtacagccatatatttagaagcactggaagatgtttccccatgcataattagctttggatgctccacagaagagctgttgtgtccttccctgtgtgccatctcagggggcatgcgatgttggtttgttccataactagtgatgtgaatccttatcacttggttaaggtggtatccgtcagatttctccactataaaattaccattattctctctttaatttgaaagtatatgacagggagattctttgagattctataatgactgtctgtcatcggaatttgacccactagttttagcatccattgatcattcctgcctgaaaccattgttgctatgtcagttgccaaatggtgatattctaattccatcattcgtctgacacttattagatggcatattaattctaaggaaaaatttccatttatccttatttattgattgatttacttcagaatggattcatgaattcatatctgatttaatgagttattacccattatcactattggctttgatgctcaaattgtctcttacttcgccagtgggagccccttccagctgacatctatgtactagtgatgtatctccagcattcgttgagcacttacttacttgtagcataagatgctccaggcttattttgtacattcgcctccaagctcagccctgatgttagcttttccaaagaacatgaacacaatgtttagaaattggtttctgagcccttggtatgttcattgttgttggagtgtcattgtttctagctcatcgggtagatctagaaagttacctatccatttttgtatttactgactcatattaaaaaccaggagttcatactgattcttccaactataatcccactccacagagttcattccagcctctcctttttcatatttgctactcctccttctgacagtgtgaagcctggcttccatcatccacagcttagttacagttgacccttaaacaacacagggattggggcgccagtgccccattcagtcgaaaattcatgtataacttttgactccctcaaaacttaactcacagcctactgttgaccagaagccttaccaaaaacatagtcaattaacacatattttgtatatgtattatatactgtactcttataaactagagaaaagaaaatattattaagaaaagcataaggaagataaaatatacttactgttttttaagtggaagtggatcatcataatggtcttcacccttaccatcttcatgttgagtaggctgaggaggaaaaaagaagagaggttggtcttattgtttcaggggtggcagaggctgaagaaaataagacataagtggatccaggcagtttggatccaatatgggatccaacagcccacgttgttcagatgtcagctgtgcttattttctcaatcaaataatttgaaataatagggttgtctgttttctagctctggtggaggcttggattttatgtgattctatttgttcttctctttgaattgtgcatagtttttggagtacgtcctaggaaatttggattgacatgactgtcactactacagctacctcagaagtgagaataacttttttaacacttgaagtgaaatacatagtattacaaaagaaaactactgtattgaaatacatccaaatatttataagtttattttattaacatggtggcaggaacaataaccaccataattttgaagtagtaatcagcattaatcatattttgagataattccaacaaatgcaatgtaacatgaaaatatttattatttctattggtaacaaaatcacaggcaatacaaatactactgcggtttgttgtttcttccgtaattgaagattgtgctaaacttcaattacagttcaggaaaaaaaaaaagatgggatctttttcccatccaaatgtagaaacccctgaattctatccacagactctctcaaagttctaatggcacccttttgtctgagaagctttcatagatgcccaaatcatccatccaactgaattcaatcccttaggggctggtaacccagtttcatgcacaggaacatgcatgaaacataccctccttgtggcttcccttcccccattccctcatctactttcccctctgggaccttgtgtcagttattatactataacagaggaggttatgaggggagatgactctgtagccacaactatttcagatgtcagatgttgcttttggccagtggacttttatccctgcctctcagcaatcatggacaagatgtgaagtgtcgaccttatcaactcagcttgtcagcttggacacttctcagcccagcccagagtggagtgctccagtccccagagcccctcatctgtctcctatagtggaaggacacagcactctagtcccagtgaccttggcaaatcactttgttgctttgagccagtttctaaggcaaataatatgccctctctaactcaaaacgctattgagaggacaaaatgagacctgtgtgtgaaagcacagcatagagtgccttactaatgtatgacattattttactgtgactccctcgtgcatgcccctggtaaaaatgacaacacaaaaacttccaactctctgctctagagaacataaaaccccacaaatatttgtcttcttcaaataattcccctgggagtttagactgcaatgaaagctgcagaatccattcagaaaatatattaaacatttcgcctttcggtgattatttactgaagccagatttgagcaaaacgctatattagttgaatttgtagatacaaaatttccttaaaaggtttaaacatgtaattttgcaagagttagttataccacttcccctcccataattatacatttataatgtatttgagaacgggaaatcttgctacatggacattgatttgcaacaaattataactcttacacagaaaagagttggaaaaactataccaaattattaagccatggtaatctaaaaagttgactacttcagaaatagctgtagctataccacaagaatcaagtaggttctccaaacatatttttatattcctctgacttaatttttatcaactgacttttttttttttttttttttttttttgtgacagagtcttgcactgtcgccagggctggagtgcaatggcatgatctcggctcactacaacctccaccttctgggttcacgattctcctgcctgattctcctgcctgattctccagccctagcctcctgagtagctgggattacaggcaccctccaccacacccagctaattttttgtatttttagtagagatggggtttcactatgttggccagactggtctcaaactccagaccttgtgatctgcccccctctgcctcccaaagtgctgggattacaggagtgagccaccaggcccggctgaactgacaattcttttatcattttttttttctttagctatagatcttctgggggaagaaagataaaagcagagcccgaaattttcttgagaagtgaagaagacattacattgattttttttaatctgaaatagtctgtttctcaaacagcagtaaaaatagtgtgtgtgtgtctgtgtgtgtggtgtttaaaattctgtgtgtatgtttatatttcttgatctagaaagaaaactttacaaatacagaagaaaatggggaaaatgcactaaaatattgaatcaagtgttataatcattactatcttctttttttctatgttttttcttgaggataaattacttttacaagcagaaaaaaataaatgatttttgaaaaggattcgaaggaaaaattaggaaataattgtaagaaaataaagtccaggctgggcgtggtggctcacgcctgtaatccccgcactttgggaggccgaggcaggtggatcacctgaggccaggagttcaagacaagcctggccaacatggagaaaccccacctctactaaaaatacaaaaattagccgggtgcctgtaatggtggcaggtgcttgtaatcccagctactcaggaagctgaggcatgaaaatctcttgaacccaggaggtggaggttgcaatgagccgagattgcaccactgcactccagcctgggcgacaacagcgaaattccatctgaaagaaagaaagaaagaaagaaagagagagagagagggagggagggagggagggagggggagagagagagagagagagagagagagagagagagagagagagagagagagagagagagagagagaaagaaagaaagaaagaaagaaagaaagaaagaaagaaagaaagaaagaaagaaagaaagaaagaaaataaagtccaaagtctataaactcgcttggcctctcagttcctttttgaactcagtgtccaggaacagccatgattccaaaagcacccacaagttctgaacttcaactcagggcctattgattgtcctctgtgaggcattttaaagcccctctggagtctcagggtgggtcaagattaagggcaaagatattgcgtggacacaggaggaagctttttgggtcatggaggaagaaaataaggtctttcccacatgtggttctctctttagcccctctcccttccacaggctcagagagccaacacagacctgctcctctgtggggagggagctgatgatctcattctcttgggctgccccatcactgagtgtggagggctgggcccatggtactcagacctgaggcagctggccatacagccttggcacccaggcataaacctcaggttcttgttcacttcctctttctggatggcttgcttttctctggcaccagtaccccatggtaagagtaatatatgctgaggggaaacgcagatgcaggcttctgaagaaaaaggaaagaaagccctctacctgcctgattttaggccctaggctacctctagccctgacaaaattaattttccaagtagttctgctgcacatatggtcaaagcttccgttttacagcatacatttgcttggctttatcctttgtccatgtgatttttttctcacaggagactggtgttcacagaagacagaatttggggatgtgggagtctggtttgggacatggtgcattggccagcatttccctctcagtcacttcccatttatcttgccctttcttggtgaactcacttgttgcctcccactttaatactcatctgcattggggtgtaatgatctcagagttgggttgaagattgacattaacccatttaaaataagaaaatggaagccaagttgggaatatcttagtggcaacaaaaaatgctcttcttctcctgacagtttgaagataattgggagtctgacagaacaattaaaattgaattattgtttctaatagattttaagcccattctgcagtggaatttcatgaactagcaagaggtaagattttactgtgagggtctgtcttcctgatagacgagttcactcctgagattaataccatcactccacatagctccagctggccgtggcaactcaatggcttgtgtcaattttgccatggctcccctctccctctcttccatttaatttctctgaatactccttggttagtttttgcattactttagaggaacgatttatcatttagatggccatcttcccaacaaacaaccaaataagagttattgtttctttaactttctatttatccacactaatgcattaaaatatctcaaattcatcagtcctgggttataatgccttggtagttctaatttgaattttctttttcactttgaacactcaggacaccatcttcttgtattatacaagaaaggagtgtacctatcacacacagggggaaaaatgctcttttgggtgctaggcctcctaatcctctgtggttttctgtggactcgtaaaggaaaactaaagattgaagacatcactgataagtacatttttatcactggatgtgactcgggctttggaaacttggcagccagaacttttgataaaaagggatttcatgtaatcgctgcctgtctgactgaatcaggatcaacagctttaaaggcagaaacctcagagagacttcgtactgtgcttctggatgtgaccgacccagagaatgtcaagaggactgcccagtgggtgaagaaccaagttggggagaaaggtgagagacatggaagtgggtaggatgggacagggataggggatagggaggtaaccaaagctaaataaaacatgctcaagttttaaatggcctttcgagaaaatgtttcctaaataccggctgtgtacttctctaatcttaggatagcttctgagtagttccaagtacaggctgtctgtgtgcatgagaaacacagcccagaagacccttgggcctaagtctcagtgggtgaattcagggctgagatgaaagtattgactttccatggtcttctcctgtaaagggctattctcccctgccccatatacagcaaaggaatttagactaaaatgtacaggagaatatgggggcaattcccaaattgccatctggatacctggcacccacttctccctgcaaaatgattctaaagctcacacattttcaatgggcaaggttgaaaatggcctgagaatttgagtatgagtgtcttacatagttaaggtagagtagtgagcctttggatgtccattctgcaatagattctgctatggtgactgtattctgaactagaagaatttttattggctttgaatgaagtgtgaaacattctcatggattaagatgttaggattcacaaaggaaaaaacaaatgtttgcgattttttttctagcacatcttgatcatgtagctgagactctgaagctcaaaagcaatgatttgataaggcttcgatttttaacacttgaattccaacacctttaaaaatactaaatgtttcccattttaaacaagccaagtgaatgactgaattcttaaccaaaaataaatgtgaagtagattgatatcactctttgtccatacagaacattatataaatattctctggccttactatctagcaaggcaggaaaaatagatcaatttgttctcactcataggtgggaattgaacaatgagaacacatggacacaggaaggggaacatcacacatcggggcctgttgtggggtggggggaggggggagggatagcattaggagatatatctaacgttaaatgacgtgttaatgggagcagcacaccaacatggcacatgtatacatatgtaacaaactgcatgttgtgcacatgtaccctaaaacttaaagtataataagaaaaatagatcaatttactctacatctgagattaaaaagcagaaagactcactcacagagtttcagtatttgacattcagaaccagaaatagagtaacagcgagaacttgaactatttcagtttagcctcccaccctctctgctatcacttcccaaaactgcgaagtatttcagagtaggaaaatgacttcaaggaggaaatggcaccattgtgcaaagcaggggctgtattttcatcaaaggtggcaaataagtactgtcttaccacacctcttttccttcctctctgttctaggtctctggggtctgatcaataatgctggtgttcccggcgtgctggctcccactgactggctgacactagaggactacagagaacctattgaagtgaacctgtttggactcatcagtgtgacactaaatatgcttcctttggtcaagaaagctcaagggagagttattaatgtctccagtgttggaggtcgccttgcaatcgttggagggggctatactccatccaaatatgcagtggaaggtttcaatgacagcttaaggtaaatcaaattaatcaacttattaggaaacaatagctgcaaacgtttactgaatgcttatgtacaagacatcctatttagtacctttcaaaaagtctaccatatttatctctaatttttgtgggtacatagtaggtatatatatttatggttatatgagatattttgatataagtatacaatgcatagtaattacatcaaggtaagtggagtatccatcacctcaagcatttatcctttctttgtgttacaaaaaatccaattatactctttgagttatttttaaatctgtgataaattgttgactgtagtcaccctgttgtgctatcaaatactagatcttattcattccatctagttatatttctatatttctgtaccccctaaccattccctctcacccccactaccctctcaagcatctagtaactatctctctactttctgtctccatgagtttgttttaatttttagctctcacaaataagtgagaacatgggaacttcgtttttctgtgcctggcttgttttacttaacataatgaccaccagttccatccaagttgttgcaaatgacaggatctcattcttttttatggctcaatagtactccattgtatatatatactgcattttccttattcatttttctattgatggacatttaggttgcttccaaattttagctgttgtgaacagtgctacaacgaacatgatagtgtagatatctctttgatatgtttatttcctttcttttgggtatatacccagcagcggtattgctggatcatatggtagctcaatttttagttttttgagaaacctccaaactgttttccatagtggttgtactaatttacattcccaccaatagtgtacgaggattcccttttctcacatcatcatcagcatttgttattgcctgtcttttgtaaatatgccattttaactggggtaaggtaatatttcattgtacttttgatttgcatttttctgatgatcaatgatgttgagcacctttcatatacctattttccacttgtatgtcttttcagaaatatctactcagatcttttgcccattataaattggattattagacttttccccatagagttaagttccttatatattctgatttttaattccttgtcagatgggtagctttcaaatattttctcccattctatgtgttgtcttttcacttttttgattgtttcctttgctgtgcagaagcttttcaaattgatgtaatcccatttgtccatttttgctttagttgcctgtgtttgtggcatattactcaagaaatctttgcccagctaattgtcctggagagttactccaatgttttcttgtagtagtttcagagtttgaggtcttagatttaagtctttaatccattttgatatgatttttgtatatggtaagagattttgtatatgcacaagagattcttctgcatgtggacatccagttttcctagcatcatttattgaaaagactatcctttccccaatacatgttcttgacacctttgtcaaaaacgaatcattgtagatgtatggatttgtttctgggttctctgtcctgttccattggtctatgtgtccatttttataccagtaccatgctgttttgtttactatagctttatagaaaatttgaagtcatgtaatgtgattcctccagttttgtatttgtccagggtgtctttggctactctgggtcttttgtgtttctatataaattttaggattgttttttctatttctgtaaagaatgtcattggtattttgataggaattgcattgaatctgtagattgctattggtattgtgcacattttaataatactgattcttccaatccatgaacatggaatacctttccactttttgtatcctcttcaatttcttttatcaatgttttatagtttttattgcagagagctctcatttctttaagttaactcctaggcattttattttatttttaacttgtaaatggaattaattccttgatttcttttttggattgtttgctgttggcatacagaaattgtttgctgttggcaatagaaatcttttttggattgtttgctgttagctactgatttttgtatgttgattttgtatcctgcaactttactgaatttatttgttctaatagtttttatgtgtgtggagtctttaggtttttccaaatataagatcatatcatctgcaaacaaggataatttgacttcctcctttccaaattgggttggagctccattgtatgttatttgtttttgaggaatctccaaacaaatattgctgcttttaagatcctttctttatacttgacctttgggagcttgattaataaatgccttgtggtagtcttctttgggttaaatctgcttagtgttctataactttcttgtacttggatattggtgtcttcctctaggtttgggaagttctctgttgaatgaactttctaccccatctctctctctctctccctcctctataaagccagtaactcagatttgcccttttgaggctattttttagattctgtagctatgcctcattcttttttttttcttttgtctcctctgactgtgtgttttcaaatagcctgtcttcaagcttactaatttttttattttgcttgatcaattctgctggtaagagactgactcattctttattatgtgaattgcatttttcaaatccaggattcctgcttgattctttttaattatttgtctcgttgtcaaatttatctgataggattctgaattccttctttgtgttatcttgaatttcactgagtttcctcaaaacagctattttgaattctctgtctgaaaggtctcatgtctctgtctcaccaggattggtctcttgtgtcttatttcattcatttggtgaggtcctgtttttctgggtggtcttgatgcttgtggattttttttttttatgtctgtgcattgaagagttaggtatttattgcagtcttcacagtctgggcttgtttgtactcatccttctggggaagtctttccaggtatttgaagggacttggctgttgtgatctaactttttagttcctgaagccatatcttcattagggggcaacccaagcccagtaagaccgtgcctcttgtaggctcatagaggtaccaccttgatggtcttggataagatccagaagaattatctggtttaccaggaaaagactcttgttctcttcccttactttctcccaaacaagtggagcttctgtctatatactgagctgcctagagctggtggaagagtgacacaagcactcctgaccaccatcattgggactgcactgagtcagacccaaggccctctgtaatattgcctggctactgcctatgtttactcaaagccctgaggctctacaattagcaggtggtgaagccagccaataagacttgtgtccttcccttcggggtggcaagttctccctacccttgggtgaggtgtccagagatgccatgtggaagccaggggctggagtcagaaactttaggaatctacctggtaatctattctactgtggttgagccagcatccaaaccacaatacaaagtctttcccacttttccctccccttttcacaagcagaggagtctctcaccatagctactaccacctcaggcctgcgggaagtattgcctggctatgaccaatgtttactcaaagcccaagggctcttcaatcagcttgtggtcaatgttgttagggttgagactctcatttcagggcactgggctcccctctggcccaggataggttgagaaatgccatctaagagccaaggcctggaattggagacgctaagtgcccacttggtgctctaccccactgtagtcaaaccaagctggcacctaagctgcaagacaacatctcctttactcttccgtctccttttctgaagcacaaggagtctccccctatagccatcatagctgggaatgtcctaggtcacacctgaggccagcatgtctctgagtctcacccaaggcccatggtgagtaccttgggtattgctcctgatttttcagggcccaagggctctttagtcagcaggtaatgaattttgctaggactaatttcttcccttcaaggcagtgggtttccttctggctcaggacaagtctagaaatgttgtccaggaggtagggcctggaataggggcctcaggactctacctggtgccctatcctactgtggctaagctgttatccaagtcacaagacaaagtcctctttattctccccttacctctcctcaagcaaagggaaggagtctctccaagagctgtgggctgcgcggtctggggctgggggaggggtagcacaagcactctcctggctgcccaagctggcatcttactaggttgcttgccccccaagtccactgtctccgagcacagcaccaggacttgcccaggaattgcaatccttgtgacctggactgcctttgaagtttatttagaaccccacagcacgttagcccacactgttgaggcttgctggcactcaggttccagctactgaaatgggcaattcctcctccggctagggctggtttgaatgctccctctatgggtgctggctgagttctgcctggtgttgctttccactgtgacagggcagcactgagttccaatgcaaagtcccacaatcactgtgctctccctcccaccccaagtacgcagattctgcctccatgccacagagttgctgctggtctatggaggaggagtagcatcaacaattcaagactgtctttcctaccctcttcagggcctctttcagtgatatgaagttaaagtgatataaagttagggactgtgatcactcatctgatttttggttttatgaaggtttttttgcatgaatagttgtttaatttggtgttcctgtggggaggatgatcaatgaaggcttctatttggccatcctgctccacctctaccctatttagtactttaagttattcccagtgtatagatgatgccactaaaactaaaagagtttaattaatttgcgcaaggtcacccagctggtaagtggcagaactgagatttgaacccaagtttaactcctttttactttttgccttaatacatgatgctcagagtggcagcgaatttatattcaactggtcagtttgtcagatatttagggaatcatatagaaaggctagatcagaataggcttctccattggtttactgtcagttgcagacacaacagtaccaccctatttaaaccttcagtagaaaaccattagttcttaaatagcttctccaagcatgctgtccaagctttatagcttcattccgtgggagagactgggggaagtgtgcttaatccatcttacctggaaccagaacttatcaccatcagttcaaatcccctaaagtacaagtggttctttcagtcaagattctggcaggaaatggtggcacattaaaactgggtaaaaggcagagagtatgcttaaaggacttataaacatgtgtgaggtatctactgaaatctcaaaggatacaatctaggggctaatgacagtaggtgtatttctcttcagaggactgaagggacaaggagacagggcagtttccagaacctggagacgcagaggctgttgttttcagttaagggataaaaataaccagtgttgacaccacaggaggataactactctgaccccctcacctctttcctgatcccccactggcactttcaatagactgaactcaacagaagccagagtatacttagtgcaggtaagattcccaggatatgatgcagacagagggtggaggaaaggactagagaagcaagcggaagatattcagctgagtggtgccacaataggcaagtgagaagacaaagttagttatagtttttcctttgattcatccatttatttatttgactattatttgttgaaggcatatgttagagtttatgatttataccatggacctaggtttagtttactaataaaaggttaaaattactccactgaaattaataaagatagagcaacttcattttgccatttgatcaggttgccaagtttgattctcctaggaaataagcacaaaaatattggaacaattcttccaaaaaactaatgtgcatttgaatcacctggggatcttttcaaaatgcagattttgattaagtggatctggagaggagcctgagaccctgcatttctaacaagctccaggtgctgcccatggttcagggatcacactttgagtagcaaggtcataaaaaaacctccattggtctctttggttgacctttgtttccactctacaaccagcagtatcataataaaattgtagtatatgtaattagagatttactcacttttaaaaaagatttcaactgaagggtttgtgagctttgccatgcaggtatgccatgcctaatagtaatcaataaagagtatttttcttaaatgaatcatggaactagtattttaaatggtgttatgtaggtgcgccacaatccagtgtcagcgtcacaatttctatatataggagggtttaggggcagcagtccatttgagagagggttggggctccttaaaactgtattttcccagcatgcatactgatttaatatggtttttacttacctggtaagcttagttggagggcgtaaggccacttgtccctagtacgttatttttatgagtgggtggggagaaaagtcttcctaaatagcctcttggcactgctacttccacaatctagaggaaattgggcaacaggtgaataaaacaaaagtaagttgggaaataatcttttttaattttagtacaagtcatataccttacagaatatttcaaggtcaagctaacttgcatttttagtaaaatatatttcaaactttacaataataacgttgctagaaagcagaacctaagaaaaaataaattacattttaagtccactaatagagcttttaaaaatcttatggtgaagagttttataaaatgaataaatacttccttatattatatattcctggtaggaaaataaatcaaatttaggaaacgactattcatatactggtttgctgtacaggtggtccctgacttgcaatgttaaacatgacttttcaactttacaatggtgtgaaagtgagatgcatgcattacaaacttttcttagaatttggaattttgatcttttaccagcagcaatatgtacaatactctctcgcgatgctgtgcagtggcagtaaaccccagctccccgtcagccgttgcaatcacagggcaaagaactgctatgctgcagggcactgtgtggccagatgattttgccccattgtgggccaatgtaagtgtcctgaggacgtttaatgtaggctaggctaagccatgatgtttgacaggttaggtatattagatgcattttttgacataggatattttcaacttacaatgagtttatcaggatgtgaccccacaggaacatctgtatattggtttgctttaaagaaaggggcaccatgattcctgtaaaaccttgatgcctagggaatgagtaggcttttagttttctgctgcagcatgatataaaataaaataaaataaaataaaataaaataaaataaaataaaataaaataaaataaaataaaataaaataaaacttgctcaacagcatagggagcaggttagtcacatcagggattatcgtattgtgtccttcagcacatcctcatttgtgctgcaatctccttatgttgctagaatggaggtgaacttgtccatccaggctatcattagttcatttcaccataaggtggtttaagtactgataagaaacctgttcataacctgaatgtccacttagtcaatgatgagagcgtggagaacactctaggaagaacaacagtggactgggggtggtgtccacccagatccctttcctgtcctgccgttaactagtcctcacttcaccactctgaacctcagtttcctcacttgcaaaatgaaagggagagagaataagatatttctttcaaatgcacccaaatctgtgattccatgaaaagattcgtgagaaaatagtcactcaaatagcaaatattttctaaacaaacccggattaaacatcttcaatgggttcttttcacagacgggacatgaaagcttttggtgtgcacgtctcatgcattgaaccaggattgttcaaaacaaacttggcagatccagtaaaggtaattgaaaaaaaactcgccatttgggagcagctgtctccagacatcaaacaacaatatggagaaggttacattgaaaaaagtgagtttccgggcggtgccaatgtcctctagaattctttgtcctgaacagcatgaaggagattcaaatacagatgaaataacaaggttctgagtaataccccaataaggatcttaaccatggatcagggatctcctattaatttcagtgtcatctcttgcttctgtttataaacatttactgagcaattacaaactgccaagttatctgctaagtgtcttatgaattatattatttactcctcaaaaactattagagtaatgagcagaggcttgagaaagtgaaatgtcctgctcaagattacacaacacctcctagtcatgcctggacctgagcccaggaaggcaagtcgagccacggtcttcacctttgccatacctcctcttttcctcaagcaccagctgtacacttggcattaaggatttatggtggttacaaaagatggaaaaggttcagcctctgacctttagtttacaacctagttgacaacaagaagtaaccaagcgagaatgtaaaacaatgaaataatgtagcacacaataaaattaatcctttacttcttaggtgtaatctaacagcccagaaatggtgctagatggtgtggtttctaattccccagggaatttagaccaggaaaagagcatggctggttaagccctaatggggcaggtcaggtttgaataagaggaaaggacaggaaataattacttgggtggaaactttctggagcaggaacacatggaggagaagatggaagacaccaggagccttcctggtcaagagattgagtcagagatgggagaataataataaagatgacataatgacaactaacaaatagtaaatatttactatgtacttgtcaccattctaagtgctttacagggacactcatttaaaatcccccaaaaaactcttattatcgtcttcattttatagaaatagaggcatagagaataacttaccaaaattgtaccaccagtaagtggaagagctagatttggacccaggcagcctgaccgtgccatttatgcttggccatggcactataatgtgaacaaggcattaaggactttggttacactcctgttatcaggctttcccctccgccacaaacttcttgggtcggttaaagtttacttgatattcctcaagtactcactgacctcctgctttgagttgagcagggttccacctaactatgggtagttctttccctccaaactgtgctcaggcctcttaatcagtggacttggtaagactgtcaactgtggcaaggttcatggtcaggagttttcaaggcagagctgaaagccaagtcagacccacctggagaggtttttaaaatgactgactcctccaaccaccattaccctaaacacacacacacgcacacacacacacatgcacacacacagaggtacacacattatctatatatcaactgaaatgtctggtcttacaaacatcttagtgctgacatgccactataggtttagagccactgccatcaaatactctacttttcagttcctgactctgaaggttctatgtaggttccatctaagatggaacttaatacttcagaaacaaaacccctcatttaaaagagctttctctgtttgatattgataccgatactttttaaatgcctttgaatatatcactgacttccatctccaattatttttggcttggttcctggttcatgtgttctgtctcagaaataccaaaaggcattgagctcagttttacactggttgttctcactagagttttcaagtcaggacttggagatcagccaaagtcacggtcccaaagtagaccacaaattgaaggtcatcttttcttaatttcccaagctgggatagtaggagtttaaaatagccactaagacttattaggttctttgaacaacttgtggccagtgggacttgaagttgaaagaaagatctaacatcatagactttcccttgagaagacacagctcaggtatggtttaaaagtatgtgagaatcatatgatagctctactttgaatttgggggggaaatctctatgccattttccataatgactgtactaatttacattctcacaaacagtatacaagaggttttctccatgcccttgtcaatacttgttatcttttgtcttttgatagtagccattctaacaaatgtgaggtgatatctcattttggttttaatttgcatttccctgatgattagtggtgacaaacatttttttcatatacctgttggccatttgtatcttcttttgagaaaagtctgttcagattctcttcccatttttaatcaggttatttcttttcttgctgttgagtttcttatacattttggatattaactgtgcctaagatataaagtttgcaaatattttttcccattctgtatgttttctcttcactctttcaactgtttcctttgctgtgcagaagctttttagttggatacagtcccacttatctagttttgctgttgtttagctttgtgtttttggggtcatatccaaagaaatcattgcccagaccaatgtcaagaagtatttcctttatgttttcttctagtagtttttttttttttttaatagagatgaggtcacactatggtgcccaggatggtcttgaactccctgggatcaagtgatcttcccacctcagcctcccaaagtgctgtaattacaggtgtgagccaccatgccaggcctcttttggcagttttataatttcaggtctatgtttaagtcttcaatccattttaagttgatttttttatatggtgtaagattcagtttcattcttcttcatgtggatatactgttttcccaataccatgtattgaaaagactggggttgtaatccaccactaatcccttgtaaaatccctgcctctctaaaggtatcttcgctcattattcaaacatctcatttgcatgagaactgggatccttttagcttcctgagtcagtacatttggggatgattctctctttatttacagattatagaagcctatacaagtatacaagtgcacaattacatccacacatgcatgcacatacatgcacaagcacatgtgcaacccacattttctctagacacataatcccctaaaacaaattagaaatcaaacatacaactttctaggcttaggggcctcatgggctttatgaagtatcgtttcctcattgctctaaagcactgagggatcaaagtttgatccctggaccagcagcatcagcatcatctggaaatttgttagaaatgctcattcttgggccccacctcatacctcagtcagaaactctggaggtggaaccgagaaacctgggttttaatgagctctctagaagaatctgctgccaacccaatcttgagagctgctggtctaaagaaagcattgcaatatcattttctgaggaatagatagtaaatcctcaaaatgagcctcaattataatggacaattcagaataaatccccttgtatccatcctcccctttgcaccctagacttccactctgctttccccttctaccaaagagtaaatgtacttttgtctctttttaggtctagacaaactgaaaggcaataaatcctatgtgaacatggacctctctccggtggtagagtgcatggaccacgctctaacaagtctcttccctaagactcattatgccgctggaaaagatgccaaaattttctggatacctctgtctcacatgccagcagctttgcaagactttttattgttgaaacagaaagcagagctggctaatcccaaggcagtgtgactcagctaaccacaaatgtctcctccaggctatgaaattggccgatttcaagaacacatctccttttcaaccccattccttatctgctccaacctggactcatttagatcgtgcttatttggattgcaaaagggagtcccaccatcgctggtggtatcccagggtccctgctcaagttttctttgaaaaggagggctggaatggtacatcacataggcaagtcctgccctgtatttaggctttgcctgcttggtgtgatgtaagggaaattgaaagacttgcccattcaaaatgatctttaccgtggcctgccccatgcttatggtccccagcatttacagtaacttgtgaatgttaagtatcatctcttatctaaatattaaaagataagtcaaacatt

SEQ ID NO: 55 - DNA, 2287 bp, Homo sapiens
tatgttttttttgtttttttttttttgagacggagtgtctcactgtcaccaggctggagtgcagtggtgcgatctcggctcactgcaacctccgactccctggttcaagcgattctcctgtctcagcctcccaagtagctgagattataggcacgggccaccacgcccagctaatttttttgtatttttagtagagatggggttttaccatgttgaccaggctggtcttgatctcctggcctcatgatccacccacctcggcctcccaaagtgttgggattacaggcgtgagccaccatgcctggcctatatgttcttttaatgcctttaccattattctgtggagtcttgggaaggagaggaaataaatgcatgtttttatttgccatctttaattggactgcttaatgtaaaactgttcgtgttataaattccccctcatatatttggttttgtgactgcagtagtgtaaattctctgcctagaattttaaagaaagtgattctgtatgtgattagggagtaaggttcagataaccttgagtggtttaaagtttcctactgagtaatctgaacaaggcggatttaagatactgcagacagagtgtgagaataactctctcttcacaacttaagaagcctggttccttatttacaactgggataagataaatggttgaatacctagagaagttccacaaaaagttacacaaaaagtttagttaaatttaagttaaaagttagttaaaatgaaaagttaagtttttattctgctactaaaccatgctcctctgcgtgtctgaaccttcaggttcctctagatttctagcacctgaaagaaaacaaaactgcagcatcagccaggtaggcctctcctaatcttactcattcacagagaatttcccctttgagtcaccatggcattggctggttactcataccacagatccctcaggattggctgggactgcaaataaaatactgtttgcccataatcaagttgataagctacaacataaacacatctaggttcttgttcttagaatacagcatgaagaatttgctttcttctttcttcctaacattttcatgtgagatccagaaaggacacattgtctctggccattcgaagaaagaaagaaagaaaaaaaaaaaaggtatttagagacagagagagaaaaaggctgaaatgggttcgctgggttctaaaaatccgcaaaccaaacaagcccaagttcttcttttgggacttgactcagctgggaagtctactctcctttataaattaaagcttgctaaggatattaccaccatccctacaataggtttcaatgtggaaatgatcgagttggaaaggaatctttcactcacagtctgggatgttggaggacaggaaaaaatgagaactgtttggggctgttactgtgagaacaccgatgggctggtgtatgttgtggacagtacagacaaacagcgactggaagagtctcagagacagtttgagcacattttgaagaatgaacacattaaaaatgtgcctgttgttctattagccaacaaacaagacatgcctggagctctgactgctgaggacatcaccagaatgttcaaagtgaagaagctttgcagtgaccggaactggtatgtgcaaccctgctgtgccctcacaggggaggggctggcccaggggttcaggaaattaactggatttgtgaagagccacatgaaatcaagaggagacactttggcgttcttcaagcagaactgaggctgcgaaaaatccaagtctctacagagacactgatgaagttgaaagggtaattgtttttccatgccaaatgaggaaatcaaattaatgagttgacaaacttttcctgagatgttatttcatctacatttagttaaacaacttagaatgatatctagaaaatatttattttcagccaggaactttagcaaactgtggcaatgatcactgggaatgaaaacgtataatgttctacaatttttgttatcacattggatgactttgaatatagtagtgacacttgggaccaaataaattattttatatgactactagaacaaagttttagtaagctgtctgctaatagagtcagaattcttccagattgtttccagctgtaacaggtattgaatttccaccgtgctcctatgtaacagctgggtggtgtaaaaaatgaacttcaaattatggagtggaaaaagcgtaatgttaatatcttgtaaattcgtattccctattaaataaagctttcttattccct

SEQ ID NO: 56 - DNA, 13145 bp, Homo sapiens
ggagcccaaagagctggagcatcaggggccccagaaataagggaagccaaccaggaaactgaccttttacacaaaatatccaggttttgagaatgctcaggaagaggtgagagctgttctcaaattcagatgggctgccagtggcaagaaggtgatgctaaggggttgcactagggctaatgggtaggtgttgcaaggactcctattttggcggatgtaataagaactggcccccactcctccctctacctaacaagaggtgtccaacagtggcttaagcttcctggtgaaagtgagcccctggttcccgtgtgtatgcagagcccaggattcactcacccatggcttgaacctttaatggatacattcatcagttacctgtcaagtgcgtttcctctgtgccagattgtgtggcgctcagcactgtgaaagtaatgatgactaaacattattcaaataaatacacattcaacaacaaagtgtgaaggcacaaaactagcttgccagagagagagaagcctcactcagacaggggatcaaaggcccctctagagcctcctagatattggagagagccatgagtgatgggcatgcctccagcctgtgagaccgggggagcataccccaggcagagggcacttaggaaaaatagcacggggtgctagcgctgccagggacctcagtacacatggaagaaggcaaggtccagagatccgagtgacttgcccagggacacaaggcaaatcggtggaatcgtcgaggggtggaggatcagccacagccccccgcctcccacgccacctcttggaaaccagatacccgcctcgcggccaagacccaccagctccaagcggcggaggccagaggtagcgaggggtgaggttagaggtgggggcgagcggggactggacacctggggagtggggaaaggggaagggggcggcaccgctgacgtcatttccggggtcggggtatataagcggggcgcgagggcgctgctgctgccaccgctcctgccactgcagtgctcgagccccgtgcaggggagcttgcgggaggatcgaccgacagacggacgcacgccgaggcactgcgcccccagccccgcgccggtgccaccgcagcccgaccccggccgccagtccagccgcccctcgcccggtgcctaggtgcccggccccacaccgccagctgctcggcgcccgggtccgccatgcgctccgccgctgtcctggctcttctgctctgcgccgggcaaggtgagcgagcgcggggagctcgcgggagagggttccgggcgcccctgcccaccttgaggtccgggcaccgcgcggcgccccgcacccctccacacttcccttcgggcgcggcgagttttcagcaccgcggacagcgcctccgcctcccgcctgaccctgcagtgtggcctccgcctgggacccacaagacacttgggcctgactcccaaccccccggggcaactcccccttgtgcccaccccttgtctgggcttggcgcctcggttgcatcagggccagtgccggttgcgcggtggccggccaaggtcactgcggggaggtgggagcatggctgctcgcaaccctccacccctcttcccctttcatctcacgctccccgcctttctgcccttgacttctacttctccatatcatccctcacaatccccttcctccatctcttcccccgccccccccacctctggggtctctctccccttcgtctgtctcccacccgtcccactgtgcagctcttggccttgtttgatggcgctccccgctccaaagcacacccgctccagagcaagagtttccaaagggggagggggaggacctctcagtgcagcctctggggaccaccccactgtgggcagcaaccagggaagggaaacaaaatcagccctagcctctctttttggtgggggcagttttgaggggtggcattgggtgaacgggccccagtgagcccggtcagaaaggactggcctccacttggagcagaggagtgaccccagcactctcttcttcttcccagtcactgcgctccctgtgaacagccctatgaataaaggggataccgaggtaagaaggggtgctggggatgaggggtaggaggctccagtggacacttcacagccagttcttgggcagctgcaggagtaagttcggcataaagccaagagccagcactgcggctgctgagcctggggacagcttgcaaaagaagatatcaaagattgcttgctttccctgctgtcctgctgtggggacttccccagcttcctctgagctgcacatgcagcggaagaggcctgcatcttacctgctgggccgaggtgcctggcttcaggctgtcttgaacactctgaatccagtaggctccccaggggctggtgggggtggcttctctgtagttgtagttgtccacagacctgtaaaaatggcctttgcctgcctggctctggcctccccgctttgctctttctccctgaaaggctctgccagtaacaacccacacccagcaggctctccagccctggctgtcccaaaggaacacaagcaaaacatcttgatcatggctcctgcacccacggtcccaccaataggggctagttgtggaggtcacccaggaaagggccttaggagacactagtaggggtttctctggcagcaagagacacaccacgctgggtgtgtacttggaattcattcatggctgagctggggctgttttttccaggctctagtgctcatccaaatctctgacttgagggtcagagaaatttctactccccaccttcccagaaactattctcttccactagacaccacagttaaaatccaaaccatccaagagattccaacctctgtttgctcaattatatttcctatgttttagttgcagataggacagaatttaaacctctaccactcattctagctgtgtgaccttgggaaaattccttaatttctctgagctccgcctttttctccttttccttgaggggaggtgtaaagagtaggaatcatggatgtgaattgcctagcacataataggtcctcagtaaatgggcacttttattcctagagctgccttcttgatctccccatccctctccagaccctctacccaattcctgcctcccagaaaatgccctctcgaacaggtggttatctgatattcccaatgcaaggtccggggttgcagggagatacagggtacaggctgctgtgctctccttgctagatcccttatgggagacaccctggtcaccatattatacccagcagcctgtggtcaggggcaccagagcagctggctaagacctgaagattctatacgaggttgttgtgactacatgcattatacagcacttgccagtttgccatcttggatccttggaccggttgccttggcatcccgtagacacagcctcccaccccctcactccctgccggtgttgcctgatgcctgtctgacacctcctgctctctactcagctctaggctgtggaagcagggctggagttgtgaacccctccctgggcgtgctgacactccatgcttgaaagagtgtttttccatctgtacctcattaccctgggagagcagttgggaaggtattctcactcccgttttacaaatgaggacactgaggctcagagaggttaagtcacttctccaagatcacacagctaggataccacattacggtgggcaccatcatcaaagatcactcatttatcagatgcctaattatccacagcacctttgcaggcacaggataagactttcagaggcgtggctgtggttgacctgggatatgctcccaggtgtagtcaatgtgtgctcacatgccgcccagggattcacccatcccatgatgaacatggagtgagaatatgaagctgtgactccttgcatacgacaacaccatgggtgtttggagacagtaacctacatcctatttccaaacagggtagagccagggaaggtctttgtctcctctgggcagtccagaaggacttcctggaggacctgacctttgggcatcttcacgatcagagcacttttgtaagacatcattttagtgccctgaggcagttttctcatgtttagagaaatagcacttggggatgagaaggtaccaggtaccattccctacaccccattctcactatgatccaccttggaggggaacctgctggccatgtggttggagtggctgacacatggtaagcactgtgttaagggttttctattatcattgctatcactgtctggctaagaaagcagagctgtgtccctgagccagggatcatggactcccaaagacaaaagcaaataccctctgtcctcactagaaattcaccctagagcctccagggactgagccccatgctcaaaccagccccaacctgcccctgcactgtgttcccaggtgatgaaatgcatcgttgaggtcatctccgacacactttccaagcccagccccatgcctgtcagccaggaatgttttgagacactccgaggaggtatgagctggaggctaggggtgagggctgctgcctgctgggctgggaggctaggacatgggtgtgtggcttttggtggaattaatgatttaactcaacagtcactgactgagtgcccgtcatgtccaggcactgcaccagggtccaaggtgtacagacagttgaaggggttgtagcccaggtgcttacagactggcagaggggatgcatatgaacacagttaactagaactctgggcaaaataaaaccagggctgaaacagcaagcccccagactgtgagctccctatggacaaagattttgtgtgctgtatcccagtgcctagaacagcctctggcctctgcagacaccctctagatgtgtgatgaataaaggaatgttatgggtggacaggagaaggacgaaatctttccaggcaaccagtcaagtttttactaactgctggatagagccagcagcatttcggttgggctttaaaagaaacattggaaaccgatgagtggaaaaatgaagacagggttgtccaggtgtggtagacagtgtgaacacaggcatggagatgggaacctgttgtatttaaagagaccccactcatcctcaggggttgccaccctttggctaaggtctggctgctggggcagtggctgacttctctgatgtagtaggaaactgacacataccttggaaaggaggtaatttcaaaagtgttatctgaagacccaatcttgctgccaccaccctggttttgagtttccagagtaaattccttgtgctcagctgaaaatattgatggtaatctctttctcggctgttctctggaaaccacccatgatgactcttcttcattgcagatgaacggatcctttccattctgagacatcagaatttactgaaggagctccaagacctcgctctccaaggtattttccagccactgcacttgactctgggtaaattccagtaactgagagtcagaaaatctggtggaagattcagcaagttcctctctgggactgtcatttccttttaattataaagcggaaaagcaggatccgccgtgccacctggctcaatctgttattgatattgttaaagaaatcaaggcccagagaggttgagtgacttgtccaaggtcacacagtgaatagagacatgccaggtgcagcttccctaaaacccacggcctctgcagttcagtcattttaggaaatacctttatgaagtagtgagccactcgtcactgatgatattcaagccaagcctggacaggatactggagtggagggttaagctgccatcttcccacagttagcctctatgcccagccccccagctccttccaggcttgatgcaaagcacggccctagccttgcaagtcaggaaacctgagtttggccctgcacctgccccggctgacttcctgtgggaagcggccgtttccaccagggcaggaccactggtggtggtgtgtctctccatgagaacagggcattacagcatgaatccagcatctgcttcccaacgaagcgagagtgtttttcagggctgggcttgtgtctggggtggggtgggggtacgaaggctgctctggcttcaggatgggccccactctgaggcctttgggacagaccaggccatgtgtgagaacagagagggctttggggaggaggcacgtaaacacagccacgtcagtaggattcctgtggccctttccaagctaacacactgttcttcctcccactcatgagccagcctgggcagcaagcacccacctcctactgttgttggagggggcagggagtgctgggcacagctgggactattattacctggatagttatgtcatcatcagtgaccttggactagtgttttgttttgtttttaactaagcattaaatattttattacaattgataactttaaaattaaatattgaatgactaactgattacatttaaataattaaatagactgtcaacagagactattataggagaatgtgtcctgaaacatctctattcacatgcacgtgtgtatcccgtataagcagtatccaatatatgtatatatgactattttccattaacagattcctggatgtatttctgtccatccgtctatccgtccactccctcttgggctcccataacatcttctgtgtgcctctgtcttagcatttaccacacagcaaccctattttctagacaagcacccaactcttggagagcccaagttgcccatggagctaggaaatagccagaaggggactggaacccacgttgcctgagaccagggctgggcatgctccctggcccacagctgcccaggaaagcccattgttggggaagaaatgagctgggctaactgaggggccaacatcaggaataaggcacaggtgtggggacagtcagaggaggcagcggcggcggggggagaggggtctctgggtcatggctgcaggcgccaaccctgggctcagatgtaggcacagggcttggccttctccccgggcctggactcagcgtccaaggttagcagagcttgcctgaatcaagagctgtcaccattactgcctgctgcagggttcctggagctaccagccaggtcctgaggggttccccacccccaactcctgcccagccaggtcctgaggggttccccacccccaactcctgcccagccaggtcctgaggggttccccacccccaactcctgcccctgggatccttgctccatttgagcctttcttgctgtgtggccacagcacgcttgctctggcctcccagggagaagctgagtctggcgaggcagggtggctgcctgagggcccagctgagagaggtgagggacgccaacccttcaccgctccccaagctcacgccccatcagtgtctcattgggcaggccctgaacatgatgtgcccagcttacagatggggaaatggaggtcttcactcttatagacaaatatgccacagctgcacccaatgggacttttccctccttttctcataccaggcgccaaggagagggcacatcagcagaagaaacacagcggttttgaagatgaactctcagaggttcttgagaaccagagcagccaggccgagctgaaaggtctgtcccagccggtctggccggaggtggggaagggagggtggcagtgggaacagtggctatgatggacccagggttccagtgagtcgggagccccacccataatcccttatttccctctctctacaaatggggaaactgctgctcagagagactaggtcccttgcccaaggtgagtggcatgaccaggggtttcgatctggtcctgcctcacaccaaagccctcgctcggtcccgtctgcccagaagaggggctggcactctagggcaggagatctctggcatggcaggtggacagcttcaactctgggtctacccagtggccactgtagcagagcccccacccccagtgcctgtcctcctgggaagtggtggggcctcagaatagccaggatgcaggaggaccacagacagagtaggtgtgaaacgtgaaatgaacccagatcatctttcttgaaaccaaagagcttctaggagtctaagaggtcatgccttaggtcagtgcgacactctgagccatcctcccttcccggggagagccacaaactggccccgtggcgcttctgctctccatgtagaagatgggccggtaaggccggtgtccaggagctggatcctggtgtctcccatctggggctgaaagggaaagcccgcaagtgaagcccaggtgcccccactttggttgaagctttaatgaggcaggcagccatgtgtcagtgcaaagagatcccgagcttgtcatttggaggcttgggttccaggctcagctctgctgcccgcaaactgtgagatggacaggtcatcttacctttctgcagatcattttgggtttctgtgaaataggcataggagcacctttcaccagagtcctggtgaagctcagatggtggaatgtacttgggagcactttgttcagtggttatcattctaatgacgggaggaattttcacttgttcaaaggctgtctttaaggcagccacaataaaataccttttaatgaaaccctaaaatattgcagaattgagccctttcacaggatgctgaagacagagaagccccacatggaggggagaatgaagttgcagtcatggtgcctcttacacagagaggttaagcaacttgcccaagatcacacagctgacattaattttcagttcaggctttatctcctggattaatcttaaggtctggttttttgtttttgttctttgaataataacctgttttaaaagtcaggattaaaaagaaagaaacaaatccagctgtgctcagatcaagcctggacatggacagaggggtaaccctaatcgttgtcctgggctgggctcgctggaagccaagaaacataatgagtaacatctgaaattagcctgtggggaggccccacacgtggcccagtcctcagggcctgacttggctgtgctgtgtctgcagaggcggtggaagagccatcatccaaggatgttatggagaaaagagaggattccaaggaggcagagaaaagtggtgaagccacagacggagccaggccccaggccctcccggagcccatgcaggagtccaaggctgaggggaacaatcaggcccctggggaggaagaggaggaggaggaggaggccaccaacacccaccctccagccagcctccccagccagaaatacccaggcccacaggccgagggggacagtgagggcctctctcagggtctggtggacagagagaagggcctgagtgcagagccagggtggcaggcaaagagagaagaggaggaggaggaggaggaggaggctgaggctggagaggaggctgtccccgaggaagaaggccccactgtagtgctgaacccccacccgagccttggctacaaggagatccggaaaggcgagagtacgtatgatggcgaagacctcaacgaacgtgtctgggagagggggatgggtgggaggagagccttctccataacctcattccaccttcataacaaccctgaaaggtaggtattagctccatttcccaggtggacaaatgaggctcagagaggttaagtaatttgcccaaggtcacacagctaatttgtagcaaaagctgaggttctaccccagatttatctgactccaaaaccatgcatttcccactattccacatagcctccccccaccaaccccagaagctaggggtgggtgatgggtgggctggctttgggaacagagaccatggcaggagcgcacaggctgatctgggaacagtgtcagcttcaactacggtttaggagaggccctggctcccgctgcgggcctgtcagggtctttcctcactctccagctgccgggcttctggggtgaggatgaggggaagaggcaggctccagctaacccacccctctgagccgagagggtcttgcaaagcctggcatcaagaaggtttttcccgctaagcgtcatcactgtggagaggctgggctgtggccgcagcagaggcccccagggagtggcagagactgggaaaatggtggtcccccacccattctcctgctcttgcccaccacctgctccaggtcggtcggaggctctggctgtggatggagctgggaagcctggggctgaggaggctcaggaccccgaagggaagggagaacaggagcactcccagcagaaagaggaggaggaggagatggcagtggtcccgcaaggcctcttccggggtgggaagagcggagagctggagcaggaggaggagcggctctccaaggagtgggaggactccaaacgctggagcaagatggaccagctggccaaggagctgacggctgagaagcggctggaggggcaggaggaggaggaggacaaccgggacagttccatgaagctctccttccgggcccgggcctacggcttcaggggccctgggccgcagctgcgacgaggctggaggccatcctcccgggaggacagccttgaggcgggcctgcccctccaggtccgaggctaccccgaggagaagaaagaggaggagggcagcgcaaaccgcagaccagaggttggtatggggcgggagccagctctgtgccaggccacggagcagcagggggcagccgcacccagacacactgcccctgccccactgaggggacagggcccccccgccgaagtctggggatggagagatgctcagaccgggggctctcagggtgggagaacaccccagctcacagggggcacccagcaaagctggctgggagatgggaggagctcaggtcagcctgtggcagcgggggaggcgctgagtggggacgttgtccagaaggcagtagggtgccctggaaaaaccatgcggtgggtctgaccgtgtcccctcctggcccccaggcagcccaggcacagcctcctcccaggctcaggccctgcctctggcccatgagggtaacggggcagggcaggggcagggccaagggatctcttgcctgtggggagtgggtgggagccacaccggatgtgagctggaagacctgggctctgcctcctcttggctgcgtggacttgggagggtcactcccctccccgagcctcatcagttccatttatgaagtaggggtaaggagtctcctctgcccacgtcattaccatgattggaacacacaaaggctttgaaaaccagggcccctggggaagacaaatggggcgtggggacacagcccacaggagcaggggggagttggggtccctggcagctaggcggctgggatacctggttcaagcctagtgtccaggtaggaacccaggctctgtgggaaggctgacacctgtccgcagccctgaccccaaggctcttctctgcccacctagaagagggtgtggccccttcactgggcccccgaccccctctctgggcctggcagtctgagaggaagaaggctccatgttggcagctgtagcgggagagggcatctgcccacgtgcctgggagcccagggcgaggggctgaggacaaagctggagagaatgggggcccagaggtgccaccagcttcctttctccacaagcagagggagctctggaccgcagggcagagaaactggacccctgaggcatatggagaggatggggtgggggcctcctcaacacagcccaagggtcttcttagaaacccgagcctcgcagagcacctgccccagggcctcctccaagactaaggggctgtagagtctatttccacggcctgcaatgtcggggtccctgggccaggatgccctcggcagcctcaaatctggcagtgaccccgggaaaatgacccctcccaggtcaaaggaggcagccttccctgcgctcctgctctaagtcttgaggttgtgctcttgtgggtgtccaagttctgaggcctgaaagcttctgcagacgggcatagaacagggctcagaggaggggtccctgcttccctaaacttgggtagccagagttcgggatcctctcacaatcaggaccagggatcaaagcccagccctaggcaggctgatgtggggcagctcccccagcatgtagccctgtctcaggccccacattcccctcaggtgggaaggctgcagaagacagacccggaagtcccaggctggcctcaccctgggtcctggcaaccatgggctaggccgagggaagggggctcttcagggcactgtaagctttgttttccatgtgccctaaaagaacagactcccacctgtgcggaaccatttgagaggaagtggggcctggataagaggccaccaagagcagtgtggggacagggcccccggcatcagccaccttcttgtgcataatgatcccgagagcagtacagtaagctcattatcactgtctccatgatggatgagggtacagagagacaaagccacctgtccgaggccacacagctaacccagcgcctttctggcttactgtgccttccatgccactggccaggctggcccgagtgaaccccaatgtctctcctaggaccaggagctggagagcctgtcggccattgaagcagagctggagaaagtggcccaccagctgcaggcactacggcggggctgagacaccggctggcagggctggccccagggcaccctgtggccctggctctgctgtccccttggcaggtcctggccagatggcccggatgctgcttccggtagggaggcagcctccagcctgcccaagcccaggccaccctatcgccccctacgcgccttgtctcctactcctgactcctacctgccctggaacatcctttgcagggcagccccacaactttaaacattgacgattccttctctgaacacaggcagctttctagaagtttcccttcctccatcctatccactgggcacaactgcaataacttctgaccttttggtgaaagctgagaactcctgactgtaacatattctgtatgaactttatctaaagaaaaataaatctgttctgggctctttcctctg

SEQ ID NO: 57 - DNA, 5309 bp, Homo sapiens
gtagctgagactacaggcatgtgccacgacacctggttaattttttttttttgtattcttttgtagagatggggtctcactatgttgcctaggctggtcttgagctcctgggctcaagcaatcctcctgcctctacctcccaaagtgctgggattacaggcatgagcctccacgtctgccctgaaatttcaatatcacagctatactgtatatctatttatgtgctgtatgtatgctgtgctttgtacataaaaaatatgttttattttttgccccgttggggtgagatagagaccgcactgagaatgcacgctttacataattagttcacaacttgcccccggcagcctccaccacgtaaaattagaagaaagcagcccagcagggcctacaaggaatgtgtgaacggatgcacgtaaagtgcttagcaaagcgtggtaaacaagagcccttgttgtcattcttgctttaagcctagtcccagtgatgtctgtaaccctctcttgggccaaggagtcccatggctctggagggctgttcagaggactaagtcattcccagtctggagctctacgggatcagtaggtacctaagggagtgaattgggcttggagggactgtggccagaagacagctctgggcctggtggtgatagaacttctgatttctcaggaaaagccaagaatgtggattttgggttaaatctcctgaattttaagcattggctcaattaaacaacaataaggcaatgtgaaccgaacaaaagggatgaaaccaagatttactgactttcccagagtcacgggcacggctgggattccaacaaggactcccaaaccagtgctctttccacttaacctaacgcacacccttcatctcgccgcccctccccacttccccgtctttgggagttcttcgatgcctcttcccccctccccccaggattccctccccataggccacccgccttccagcagggcgtggtctctacagaggaggtcaggtctcccaggcttcctcagcgtcgacgccggggagcgccctggggttgggagcgcccggggcccgcgaaggaggaggtggctcaggtgtcagggcgcaccgtgggaaccggccccgggggaggcgtggaaacgcggggcctgggactcgaccagcctctcccgtgcggatcgcaaaatctcggagctgaaacagcccgttgttcgcagcctccctctgacccgccaccctgcacattgttttccattcgcccgggtcgcgggtgggaggagaggcacgccggggttctggagcttggccgcgcgccaggcttgtggccttcgtccccctggggccactggggcggccacgcctctccggcgggaggagagaacgcgtgggtccgggtggctgctccggcccttccgcctccagctcggccatggggtcgcgcagctcccacgccgcggtcattcccgacggggacagtattcggcgagagaccggctgtgagtgcgcccgcgtcggcggctgcggaggggacggggcgaacccaggcgtctggggctagggaaggggttgggttgaaggatggacgaacttacaagtctggggtccggggctccccggagctggaagaccaaggcccctgtgcctgggatcgctgggttaggggcgggttaacctaggggtcccagcctccaagtctggggaggatccgggttcacggggtcggagtccagaggaatccaggcacccaggtgtcctccagcccggctcgaagctgaaggcagagctgacggcggttggaagggatggctttggttctttggttttcgggaggttgcgagccgcccgggtcttgaacctggatcttcgcggggtcgtgtcactctccctccgccccggccagctcaacccctgattccccgggatgatcgccccttccagccagcccccgctgttctggcccatcttcctggcctgttggggcgggtttctggagctggccctgcagagtcacacacccccaccccactctccttcccgcagtctcccaagccagcctgctccgcctgcaccaccggttccgggcactggacaggaataagaagggctacctgaggtgagggggagccggcctcataacttctggcctctgtctctctgactccatgtccctctttgaccctccgtctggcatctctgccttaccctctttgaaatttggctttgcagccgcatggatctccagcagataggggcgctcgccgtgaaccccctgggagaccgaattatagaaagcttcttccccgatgggtgaggcttgctgggcgtggggaggtgaaggcgggaaaaccggtgtgtgagtgggtgggaggggaggttagagacggaggcaaagtgatggccaaggtgaccaccacctctttccattctgtcccgtctccccaggagccagcgagtggatttcccaggctttgtcagggtcttggctcattttcgccctgtagaagatgaggacacagaaacccaagaccccaagaaacctgaacctctcaacagcagaaggaacaaacttcactgtgagtttgtgaggacctgcacaagtgagaatgcagatgtacccacaccagggacaggctccagggatctcccactcccttcctgagggcattgacaacctcccccctcctccaaggtggggggaaggaaggtggctgctggaagagagccagggaagacctaccttcctttccccctcccaccctctccccagatgcatttcagctctatgacctggatcgcgatgggaagatctccaggcatgagatgctgcaggttggcagaaagcgagagcaagagatgtgatgtgtgaaggatgggatggttaaatgcaatggtgtgagagatggggtgggatgattggggaactggggcgcagataattggggtattggttgggaaatgggaatgggtgcagttagagtgtgggtttgttgggagtcggagtggggagcagttgactatgaggttgggaatagatcagtgattctcaactgggggtgattttgctccctgagtgaatatctggcaatatctggagatgctttttgttgtcacaatgggggagagagtgtgctactggcatctagtgggtagaggtcaggaatgtggctatatatcatgcaatacccaggagagcctcttccaacaaggagttacctggctccaaatgtcaacagtgccaagattgagaaactctggaacagatgtgatggaatgaggatggaattagaaacccttagtggctaaggtggagaatggtgtggaggatggatggaggttgggtgataaagttgggtaatgagtttgagcatattttgagggtagtgcaggatggtgagggagagataggagattggttgttgaagcagtagggaaaattattgggggatatggtgaaaaatggatgaaggatggattataaaattagcaataacttttgggatgaggtgggcaaggtttaggagatggggagttgcagccttcgtgccccctccttatggctgcctcttcactcatctctcaggttctccgtctgatggttggggtacaggtgacagaagagcagctggagaacatcgctgaccgcacggtgcaggaggctgatgaagatggggatggggctgtgtccttcgtggagttcaccaaggtcagagtgcccttggggattggggagttgagatcaggagttctggggcagacagacttgggaaacgttcaacggaggagggcggaaagataggggttgcctgggaatgatggggtctctggaatgggtagaaccctgggggaggaggttgggagcatggagagctgagagtcaagcctcttgcctgccatttgtttttccctcagtccttagagaagatggacgttgagcaaaaaatgagcatccggatcctgaagtgactccgtttgtgccttgggcttgctcctgcaaccagtatctccttggaattcatccaaagcccccatggacgcatggacgcagggcgacaataaactgtattttcgtttctaactctatttagggccaagagaagaaagctggaaggatgtgtactaaagtctagctcagcagtccccaacctttttggcatcagggacagtttttccacggatgggtgacaggggatggttttgggatgattcaagtgcattacatttattgtgcactttatttctattatgattacattgtaatatataatgaaataattatacaactcaccataatgtagaatcagcaggagccctgagcttgttttcctgcaattagacggtcccatatgggagtgatgggagacagtgacagatcatcaggcattagattctcataaggagtgcacaatctagatcctttggtgtgcagttcacagtaggatttgggctcctatgataatctaatgccactgctgatctgacaggaggcagagctcaggcggtaatgcaagcaatggggagtggctgtaaatatagatgaagcttcagctcgcctgccgctcaccttgtgctgtgcagcccggttcctaacagaccacagaccccacaccaggtctatctcatttggtctcagagctgtgaatcagccagcaatattttagttgcaaatcactgaaaacccaactcaaagtgacttaagtcagaaagaaattttatgaattcaggtaattaaaaagtccagaagtatctgcctttaggcacagctggatccaagggcacaaatgatgtcatcaggctccagttattctccatctcccagctcagctttttctgtctgtaagcctgattttcaggaaggctctttcctagtgatggagatgaccaccatcagctccaggcttctatcctgctaacccagtaacccagtgggaagagatttacttattccaataattccaagtggagagtgtcattgacccgtttggggtctcatctctacttctaggggaatgaaacactctgagtggccaggcctgtgtcatgtgctaattcctagagccagggaaataaggtctgaggattcaggatggggtgaaaggtggttgcttaaaggaaaatgaaatacaattagcagaataaggggaaacgagtggtctgctctgctcgggcaaaacaagagatgcccattactgtgagggacccttgaagtctggactcttaaatgggtttttgctgatttcctgggtgcatgctaggatgatggggcttgatgcagtagggaagagacgatgtaaaaataataaacaatatataccttc

SEQ ID NO: 58 - DNA, 79977 bp, Homo sapiens
accactgcactccagcctgggcaacagagtgagactctgtcaaaaaaaaaagaaagaaagaaagaagaaagagagaggtagggagggagggaggtggagagagagagagagaaagaaaggaaagagaaagaaagaaaagaaaagaaaaatacaaaagattcctaagaccaaaaattttgagaatgactgcattaagacaatctatggagaaatatacaggaaactaagtgttaaggatattggcaagaaagtggctgaaatgatagtcctgaaaccttgacttgatgagaagagaaaagaaaaggaagggaagattcgaggaaatgcgcaaggcccgccagtgccctgaggctagagcacaggtgtagtgggcactccagagggggccagagttcccaatctcggggtgggctgtttgaatttctaatgcaaagataggacctatcggggatgactgagatctgggaggtctccaccttggtggaggtggaagaggcggagggaagaacgttcctgggaaaagtggctgcatatgtccccctaaagtcaccaacttgcccagaggacactgtgtctgcaggggtgtggatgtgatgggggcgcgcctgtactggtgagcgcgatgcttcgcctaggtgaacgggacaggtacacgcgtggggtgggatggagtgttcatatatgtggcttgtgatatgtactgaggggacgtggggtacactcggatgaggggtctgtggacatattcgtggcgcatgtgggtatcgctggtgtcccgaggtggggagggagaatgcggagcgcgtgcgtgcggggggcgtccagtgtccctgaacctggcgtgtgggggctggagcttattgggaggcgagggaggtggccaggggagccgggaccgtgcgtgtggccaggccggtagcgcccagtaagctccacccgcgggcgctccccgtgcttccccgcccctgaacctgctccctcccagtcggtctcgccgcgctcgccgggtgtcccagtgtcaccaacactcggccgccgccgccagcttggcgcgcaccgccgcctccgccaccgccgacagcgcgcatcctccgtgtccccgctccgccgcccgagcaggtatgacggcgaaccctggctcgcacccggtctcccgcgcgctgcccggagtccctgcgcgcgcgccttctcctgcccaaccccggcccgcgagctcctgtcccggcctcagtttcccacgggagggcgcttgggtgcctgtctgaggcgcctgggacccggcctggggactgaacgggttgggggcggaggggagagctggaggctgggaaaagcccccagggtgcagaaggcagacggggccagggtccccggcgtgtctgggacctcagagacggcggcaaagtcctggcatagagtgggcggggcaagaagttgttcaagaggtgacaacaatgaaactcgagagcgctttctacgtgctgggcacagctcagcagagcgccttgctcaaacgacctaacttcgctcacagggcatccctgtggggtggttctcttgctgtccccattttgcagaggtgcaaactgagggtcagagggtggggaagcttccctacgtcccaggaacaagttgctgagctcagatttgaacccaggcagtccgaccctggagcctacctcgtgggctgtcagtggcgtccggggaacgtgggtttcatttggggtgatgtggtggaggaggccagatccgaacgccctgcagttgtctgcgctgaggattctcaagtgctaagttgatgtctggacaatgtcatatgacttaggtgtgctgtggagggaaagggtctgggatatagtacagggacattctcactctagcgtggagggggaaaatgaggcacagagtttagggaggaagcagcagagacctccagtccacaaaaggcacatcttcccactcacctccaccagggagtaggggcagaacaaccaagactggctttggtccctggcagcccagctctcacaaagccgggtggatgggtctgaaagctcccagagacctgagcacccctgtctcagatcccagcatccgtgagtgacccaacctgcctacccattgagctgtgtaattccatgcagaacacagggatccattcttcttcctctgtaatcttccacccctgccctcccagctccccaaaggtaaacaccttcataatttggagtgtttccttctagaccctttcccccacctacacagtcatatatacagagccatagaaaatatgtaaaatacttagtaatgtagtaatgttgtaggtggatatttaatagaaatgatgcaacccttgggaggctgaggagggcggatcacttgaggtcaggagtttgagaccagcccagcctacatggtgaaaccccatttctacaaaaaaaaaaaaaaaaattagccgggcatagtggtatgtgcctgtaatcccagctactcaggaggctgacgcaggtggatcgcttgaacccaggaggtggaggttgcagtgagctgagatggcaccattgcactctagcctgagtgaaagagcaagactctgtttcagaaaaatagaactagaagtagaaatggtacaacccacctatgtcattctgcaacttgagccctctcatcaccagttatccatgctgctgcatataaacccagcttatttatttaaactgctgcatggattcccgccgtggataatgcctaccgatgggaatttaggtgacaaaaattttcaggttggtttttatttcagcatcttctataaattgttatctctgggttaagttcaatttatttttctttatcctaaactaacttcacaggatctgaatttaggggatgaggtcctctcttttccactgctcacatacggacccatgaatgcatgcacacacacacatgcacacatgtgtgtacatatgcatgttcacacacaagcacacacgggcacacatacatgagacatacacacaagcaagtgtacatgcatgcatacacacacacaggtgtgtgcacacacctctattctgtctatgaccaaggacaaacaccacactttctctagctgcagtctctgcaggtccctaaggctgagactcagccaggccactagttctgcctggccatgccccaatgggcagaggttccatcggggccacctccaggggttctctctagatgccctccaaagccaaactcagcctccaatagcagacagaaggagctgagaaccacgaaccacggactggcagattggactgtccagggtcctgtttgtgtaccacaaactgtaggtccaggctgtggcctaaagagagtgtgtttgctatagactgacaggacccttaaaagtttggtggaacccatgatctgggttgatgaaaagctagaatcagagacactacattataatcccagcttcaccccttcctagttcaggcaattcccttcccctccctgagccgtagttttcacatctgtaaaatgggcatgataataatggcaccctccccaaactgttaggtggattagtggggtgatgtaaataaaatgcttagggactcatcagcatcagtaagcaggaagtcttttcctgaacaggggagacctggagatggcccttgggtggtggggggacgcaggggtgatgcctagagccactgtttgtgacttcatccacaccccaagtacagaccagagggtcctttgcactgagccctgagccaaagaagagatttccgcttgttgagagccaagcccagcttactgtggagtccagaagtgtcatgttacttacaaaaggcctaaggtgtgcctggtcctgggttaagacacagaaatgaagtgagctgaggtgctcccctttggaatacaagagatagcaaaagtcacaaagaaggcctgtggacttttaaatttttagattattcccaagattttaaaaatcagttcatataagactccatatttctggatcctcttgagatatcagtaaagctggcaatggccaggcatggtggttcacacctgtaatcccagcactttgggagaccaaggagggtgggttgtttgagcttaggagatcgagaccagcgagttgcttgagcttaggagatcaatatcagtctgagcaacatggcaaaaacccatctctaccaaatatatatattatatatatatatatatatatatatatatatatatatatatattatatatatatatatatatataacctgggtgtggtggcatgtacctacagtcccagctacaggggaagctgaggtgagaggctcccctgagcccaggaggttgagactacagtgagctgtgatcacacagttgtactccagcttgggcaacagagtgagaccctgcctcaaaaaaggaaaagaaagaaagaaaagaaaagctggcaactctgggccagacactcagctgcccccttacatggagcaggcaccctgcagggcatgacagtccctacctggcccacccctcattcataaagagcagctaatataaaaggtaacaccacggactccacagccaatctctatctcccagctatgcagtggattaattacaagtttcaggccaggcgcagtggctcacgcctgtaatcccaacactttgggaggctgaggcgggtggatcacctgagttcaggcgttcgagaccagcctggccaacggggtgaagctccatctctagtaaaaatacagaaattagctgggcatggtggtgggtgcctgtagtcccagctacttgggaagctgaagtgggagaatcgcttgaacccagaaggtggagattgcgatgagccgagattgcatcgttgcactctagcctgggagacaagagtgaaactctgtcaaaaaaaaaaaaaaacctatgtttcaagcaaattgtttagcattttttgtgactccatttccttatgggtaaaacaggcataataaatagcacttgcctcaaacggttatgttgggcattaaatgagtcaacacacatgaaccccttagtacagtgcctgactcaagtaaacactgtctaaccattgctgatgctgatgctgataatggtggtgttatcagcacctgcctggcccctgtaacagtggattatactccaattatactccttataaaatgtggtaggaacataagtaagggagggagaaggaaggaaagtaactctttgagccccttcttcaagtaagacgctgcaataccttttctggccaaggacaagaagggaacatttaaaggaaaggttcaaagagaagggctttttaaggtgggttttaaaggatgcataggagttcttctggagcagtggagtgagaaaagcattccacacagtggaaacagtctttacaaaagcctagaggcatgaccaaaggaagtatgtttaagaagtgatgtagtctgttgtcactttgtagtagggtgagtaggaggaaagataggaagatgtaactggagattgagaaaaggaacttgaggctgtgatggcgcgtgaggcaggaatagagatgagcatttcttgagtaactagtatgtgcaggttctcttgtaatcatcacccctgtagtcgtcataatgccctgggagtcacgttttgtgatctctgttctacagatgagttagactgaggctcaagaagagtaaaccacttgcccaaaatcttgcagtgggtcagtggtacagctggagttggacaccaaatctgtctgattcaaagcatgtgagcccttgctgagcctcagttttctcactgtaaagtggaactagtactaaaaaaacccactctacaggtgtgctgggagggttcgaagacagagtgaatgcactgcacagttcctagcatagaatctagcacacagcaactgctgccgttattttgactggaatgaagcctgtgctccttttttttttttttttttttggtggttgtggggtggtgtggggaacggagtttcattcttgtcacccaggctggagtgcaatggtgtgatctcggctcactgcaacctccacttcccgggttcaagtgatgctcctgcctcagcctcccaagtagctgggattacaagagtccgccaccatgcccagctaatttttgtatttttagtaaagatgaggtttcaccatgttggccaagctggtctcgaactcctgacctcaggtgatctgcccacctcggactcccaaagtgctgggattacaggcatgagccgctgcgcttggctgcctgtgctcctttatgccccttgacctaactcacatggtagactagtcttagatgggggaacccagggagtgaatgacctaagccagtgggtctcaaagtgtagtccccccaccagcagcataatcatcacctgagcttgttggaaatgccaggcgcagtggccatcgcctgtaatcccaactgcttgcaaggctgaggcaggaggaccacttgagcccaggagttcaagtccagcccaagcaacatagcaagaccctacaaaaaaattcaaaaattagccgggtgtagtggcacatgcccgtagtcccagctacttgggaggctgaggtgagaggattgcttgagcccaggagattgaggctgcagtgagctatgatcatctgattgcaccccagcctgggcaacagagagagaccttttctcaaaaaataatgaattttggtgtggtggcgcatgcctgtagtcccagctactcacaaggctgaagtggaaggattgcttgagcccaggagtttgaagctgaagtgagctgtgatcatcaggctacactccagcctgggtgacagagcaagactctgtctctaaaaaagtaacaagaaagaaagacatgcagagtacaagccgggtgcagtggctcccacctggaatcccagcactcagagaggctgaggtgagaggatcaattgaggccaggagttcaagactagactgaacaacatagcaagactccatctctgtacaaaatttaaaaattatccaggcatggtggtgcacacctgtagtcatagctactctggaggctgaggcagaagggttgcttgagctcaggagtttgaggctgcagtgagccatgatcatgccattgtactccagcctaggtgatagaataaggccctgtctctaaaaaacagaaatgcaggttctcacactcatcccagacttcccacatcagagactctcagaatgagccttgcaatctgtaatttattttattttatttcatcttatcttatcttatttgtttatttattttgagacagagtctgactgtcacccagactggagtgcagtggcacgaacttggctcactgcaacctccacctcgggttcaagcgattctcctgcctcagcttcccaagtagctgggattacaggtgcctgcccccacacccacctaattcttgtattttttgtagagatggggtttcaccacgttggccaggtggctgcgtcggcctcccaaagtgctgggattacaggtgtaaatcaccatgcctggccacgatctgtattttaataagctctcttagtgattctgagggacagtcaagtgtgagaatcactggcttagtgtaaaacttcaaatgagatctcctccagccgtctgtgtctgacttgcactagaagggagggtggatggtgcagagttctgtcctcagcaaagacataatctggagggtatatcataagataaaggcatgtccctctcggtcctggagcttggaagaaaccaattttttttcagatagaaaagttgctaagggagctggtggagttcctagaactattattcttccaaatttgctcaccatcctatacttacagcttccagtctgcccccacctgagggcctggggcaaactcgacttttagaggagttgctttctagtgaagactgcccctgacagctgaagacctgctcccaccccactataactgtattagttagggttctctagagggacagaactcataggatggatggatagatgatagatagataaatgatgatagatagatagatagatagatagatagacagatagatagctaaagaggagtttattaaatattaactcacatgatcacaaggtcccacaataggctgtttgcaagctgaggagcaaggaagccagtccgagccccaaaacagaagaacttggagtccgatgtttgaaagcgggaagggtccagcatgggagaaagatgtagcctaggaggctaggccagtctaggcttttcacatttttctacctgctttatatactagctgcattggcagctgattagctggtgcccactcagattaagagtgggtctgcctttcccagcccactgactcaagtgttaatctcctttggcaacaccctcacagacacacccgggatcgatactttgcatccttcaatccaatcaagttgacactcagtattaagcatcacagccaccttataaagagcctgttcctagaagctcctctgtgcctgtgggccttctctcttggcccccgtgagagcatgtgtcaaggcacaagtcctaggcagtggggaatgatctcagctctacaagaggactattaaggaggccccaggtcaagctcaggttggggacagtcatatcctgcagataacttcaaatcaagaagcacgcccctccacacatcctctttgaagcactgattaagagtcagaaggacaaggcaccgtggctcacacatgtaattccagcactcaggaaggctgaggcgagaggattgcttgaggccaggagcttgagaccagcctgggcagcatagtgagaccctgtctctattttaaaaataaaaataataaaaggccttcaagattgctgggtctgactacataaaagttagtatgttctgcatgaccaaaaaaaaaaaaaaaaaaaaaaacccacataaactcaggcattccaagctagttaaaatatttgccactgttatgaccaataattattttatggatagggttcttgcaggctgagcacagtgactcatgcctgtaatccaagcactttggaaggccaaggtgggaggattgcttgcttgaggccaggagtttgagaccagcctgggcaatatagtgagaccccacctctataataaaagaatgattagccaggcataatggcacaagtcccagctacttgggatgctgaggcaggaagatggcttgtgcctgggagttggaggctacagaaagctatgattgcaccactgcactccaacttgggcaacacagcgagaccctgtctcaggagaaaaagaaatgtgttcttgcaaatcaaagaccaaatacccatccaaaaagttaaagagcaaaggctataatttggttgatcacaagaaaagaagtgtacattgaattcacacagatgaaaagattctcaactgcactccaaagaaagaaacccacaaatgattattttccacctgtcaggttgttgagtaacactcagtgttggtgaagatgcaggaaaaccaggactctcaaactcagctggtgagggtacaaattggtgcaagttcttggcctaactcacaccatggcccagcctcggatgagggagtccagggagtgaatggcctaggccagtggtcagggtgcaaatcggtgcaagctcttggcctaactttgagggcggttcggcaaacatgtcaatgctgaagatgcacataccctatgaatctgccatttcacccgcaggaattgacccagtggttatctctgcattgggcacaacttgttagaacaaggatattcggcactgtgagaacaagcaattggaactgggagccactggtggccccttggcaaatgtggccctttcctttcagaccttcaggaccaatgtaggccacctcgttcccctccacatgctagggagctcattccttagccaagatctggaaggaggactaagatctggaaagtcttctgtagcctctctcaagagttactcctgattggactcatttgaggaccttaagcaggggctgggttgcaccctcccaaaactagctttgtctcacccaccggctgattcttgaaattcctaggtgggtgtctcacctacgtctatgtgtggaggttgttgattctctaactgagctcaagatttgaatcctgattggaaaacactaccaccatcccaccttacccctaccccaggagggattacctttgtctttctcaaggactaagtttgcaccccagcaagaaggagttggagagaggctttggcaggttgggttagggagcgagaccatgaagaggcttggggtctgaggctgtggacttcaaggcagctttcaaggattgttttagagattggtggggaggggaaatgtgaaaagtttagaaacatgtctgatacatgcctggctcattaatggggccaggaggggagtgttggagaggaaaggagatagggaagagggggagatttaggaagacagagaaagccccaagagatggccatgggcctgtacagggcagagacccctgcctccagcacccaacacccaccctccctccctggttgcatttgggggtgcggtgggggagcagaggctgatgtagggagggggaggccttcattaccccactacattggaggcagagctttgcctgccctaggagaagggaccaggggagttctggtttaccccaggctgtctggggagccgattcctgtccttaaaacattttctttcctttctttcatttttgtagacagggtctcactatattgcccaggctggtctcaaactcctgggctcaaggaatcctcccacctcgagctcacaaagtgttgggattataggcatgagctacctcgcctggctccttaaagcattaagggcaagatttgggtgcagaagtctcccagtctccttagctgtaccaggacaggctgtttgtttaacagttaagagtttgggagtcaggcagactggagttggagctcagttgcaggacaggtggacccccaccagtccatgggataacttggtggggggaatttgaggggaccgtgaggcattagcaagccaagtgcacagcatgctgacccccaggcactggacccaccctggctattgctctgataacctccaaatggctgctatgctggtcctgccctgcttggagaagggatgagggtagggccatgatgggagaactctgggctgagaagccagaaacagctttatctgcagaattcagggaaaattgaaatctcagaatcagggccttgggtgagtggagagagggcaaatgtctgagtggatgacaatctggttggttacaagtcgccggctgttggaagaggagcctagctgggcctcacctcccccgatcccttggcaccagatgatagagagtggcgccatcctggccacaggatggtgagcccactgggcagattcccctccccaaccctcacagaaagcagaacctggtgaagagctgtggtggaggggaaggaggctgcacattttcctacatttgggtgggaaggcagaagatactttctttcccaatacaaagcagttctctttgcaattcattcattcattcaaaaagtatttagggagtgtttcctgagtgctataacactagttcacaggaactgaaacacttagaggaaaggttttatgtgttttgtttactgctattgtccaaattcccagtagatgctcagtgaacgtttattgaatgaataaatgaatgaatgatggatggatggatggatgcatatcagcattgggctagacactgaaaatacagtggtgacccagccacatctctcatcctccagtaaattccatggacccccattctctggtcccctccccatcttcacccctaatcttgaactaccagtagggccccacaaatggtggctgggcctgaaatgggcagggctgtattcttgttggatcttatgatccagctggctaaaaaccctatcctgaagacccctctacaaaggatctcattcacttgaggaggtgtggtcaccttgtctgggaaccccgttgttttgtttgccttacgtacaaggactgaactggactcagtttctttttcaacacatgctatcgtttgccaaatcaactctgatagggcccaaatggctctctcccctacagtataataataaaaataagcaccgatttttgtgtgtggtttgtttgtttgttttgaaatggagtctcgctctttcaccaggctggagtgcagtggcacgatctcggctcactgcaaccactgcctcttgggttcaagccattctcctgccccagcctcccaagtagctggtactataggcacgcgccaccacgcccagctaatttttgtatttttagtagagacagggtttctccatgttggccaggatggccttgatctcttgacctcgtgatctgcccaccttggcctcccaaagtactgggattacagacatgagccatgcacccggccagcagcattttttaagtatgactacatgccaggcatgtgcattctttcattgaattctttcagcaaccatatgggggtaggtacagttttttaattattaatattatttttacattttccttgtttgttgagatagggtctcactctgttgcccaggctggaatgcagtggctcaatcacagctcactgcagcctcaacatcccaggctgaagcgatcctcccacctcagcctctccagtagctgggactgcaggtgcacaccactacggccagctaacttttttattttatttgttttggtagagacagggtttggccatgttgcccaggctggtcttgaactcctgggctcactcaatcttctcaccttggcctcccaaagtgctgggattacaggcgtgaactgccacgcccggccaggtacaattattatcccccttttacacacagagaaactgagctctctcactgcaggatttcaatgtatctttacaacaatccagtgaaacaggtaatgtaattgtctgcatttcacagaaaagaaaataggctcagagagcttaagtaacttgcccaaggtcacacagagctagcaaatggtgtgtctgggattcaaacccaagcagtttgactgtagatcccactctgttcaccccagcttgcctctcctcagcttcttggtgtcgtctgagaggtgagtgtggaggaggaggggaatttttttctctgtgacatggctctcgaagcctttggttcacccacagccaagtgtaaggtttcggcttttcacaatgccaggaaccaccctgggtcactgtgagggtgaagattgtaatctcccccaacaaagagggtactcagccccttgccttcagggcgccacattcccagccttcaattttccctggaggcctggcttcctactgccagatggcctttgtaggggctgaggggaccatggaccctgggcctccctcccaaggttttggatccaaggccatctactatgccagcccaactctggcacaaggtggggaacgcgtggcccagaccagggcctggaaaaacaaagctggatttcagaggttggcaggaaatggagacagagcaggaaacagaaggggctaagagaaaaacatgccaccggctgggtgcggtggctcaagcctgtaatcccagcactttgggaggccaaggcgggcggatcacctgaggttgggagtttgaggccagcctgaccaacatggagaaatccccgtttctactaaaaatgtaaaattagctaggtgtgatggtgcatgcctgtagtcccagctgctcaggaggctgaggcaggagaatcgcttgaacctgggaggcagaggttgcagtgagccaagatcgcaccattgcactccagcctgagcaacaagagcgaaagtctgtctcaaaaaaaaaaaagtcaccattctttccctttcttgtctctgattcatgccttccacctggtgtttggcaaataacatgtttatttaataaactgcgatgccatgaaacccattctggaggccaagggcacagggagcccagctgacccagcatgtataagcacttactatagaacaggcatgggagcctagtgcagtggctcacgcctgtaatccctgcactttggcaggccaaggtgggaggattgcttgagcccaggagtttgagaccagcctgcctgggcaacatagtgagactctctctataaattctttttcttaattagccacatgttgtggcaactgtagtctcagctacttggaaggctgaggtgggaggatcacttgagcccaggagttcaagtctgcagtgagccgtgatcgtgccaccgcactccagccttggtgacagagtgagaccctgtctcttaaacgaagtacaggcatagggagcaatgttttgcctgagtcctctcatttaatctgcacataataaccctatcaagtaggtacatccttaccatcaccatcatcatcaccattaccatcctcatagtcaccatcaccaccattcccctcatcacctctcaccatcaccatcctcaccatcatcgccatcatcatcatcaccaccatcatccccatcatcaccatcaccatcgccaccatcaccatcaccatcctcaccatcaccaccatcaggatcaccatcaccaccatcatcacaaccattatcaccatcaccaccatcactatcctcaccaccatcaccatcatcaccatcaccaccatcatcatcatcaccaccatcatccccatcatcaccatcaccatcctcaccatcaccaccatcaggatcaccatcaccaccatcatcacaaccattatcaccatcttcaccatcaccaccatcaccatcctcaccaccatcaccatcatcaccatcatgatcaccatcaccaccatcgccgtcaccatctcctccatcatcaccatcaccatcctcaccatcatcaccatcatcatcatcaccaccatcaccatcaccatctccttcatcatcaccatcatcatcatcaccatcaccaccatcaccctgaccatcacctccatcatcaccatcaccatcctcaccatcaccaccatcaggatcaccatcaccaccatcatcacaaccattatcaccatcctcaccatcaccaccatcaccatcttcaccaccatcaccatcatcaccatcatgatcaccatcaccctcaccatctcctctgtcatcaccatcaccatcctcaccatcatcaccatcaccatcatcatcaacaccatcaccatcaccaccatcaccctcaccatctcctctgtcatcactgtcaccatcctcaccatcatcaccatcaccatcatcaacaccatcactatcaccaccatcaccctcaccatctcctccatcatcaccatcatcatcctcagcaccatcaccattatcatcaccatcatcagcatcatgaccaccatcaccctcaccatcacctccattatcaccatcaccatcaccattctcaccatcatcaccatcaccaccagagcaacattatggtcacccacatggtttcccagacccaagaagcagcccacagatggggtaacagacccaaaggacatgatgacacgtcatctcctagaaagatggctaagaatttgggctctaaagcctgaaagacctaaatttgattcctagctctgccacttttgagctgtgtgacttcaggcaattgacctaacatctctgaaactcagcggccttgtctgtaaaatggtgatgatcacagttcctcctcacagggctgtggtaagaggcacatgagctaatgcctgtgaggccctggcacagggcctggctgaaatcataaaagggaaaaacaaacactctgcaaaggcggcagcagttaagggaatcactcagggtgtctggttggtagttcccagcagctcaatctctggattgcaagaagtaggtgttgcccagcgtgagaacgggcactggagagcagtgtggggacatgactggagagaccactcaagggcctttttttcttctcaaggagccagggtatggagggatgggaggggagcttttgtgtggaacagggtcgagagttcagagctgatgctgccgccaatccggtctgagagagagcagggagcaggatccttttccaggctgcacggaggagctctcagggaaaactccttcctgctcctgtcccaaagggttccccagagcggctggcacacacctccaccatgcatgatggcatttccttgtgggctcatctccctttttgatgatttgcttctaaatagcagtaaaggtgagcaccgaagggcaatgctgtgccagggaatcctgagtgtcttgcctccagcctctagggctgccacaaatgcctgtggggtatgtgtgctgccaactccagggatgtcattgtcaatcacacagactacacacatgatgaaggatgcttcttggagttgtatagggcacagtctgcacaaccacacagggctgccctgccagcctccttcttcctgcagaaggtacagaactgttttgagtgcctcagctccagctgcagctcaaggcagagaaaggttgagtgtaaatgccaatcaagaggcaaacggcccaggtttgctgcccaaggcttgttctggagaagattgtgtctgggcattgtggtgactggtgatggtggtggattattgattgtccttaatatagattatcaggaggcaatatagcaaagtggttatgagagcagactctggagcaaacagacacggtttcaattttgctctgctacttactctcactgtgtgatttgggcaaatcacctgacctctctgtgcttccatctcctcgtctaaaaaacaggtgtatactaatatgcggccaggcacagtggctcatgcctgtaatcctagcactttgggaggccgaggctgatggatcacttgaggtcaggagtttgagaccagcctggccaacatagtgaaaccccatctctactaaaactacaaaaattagccggacgtggtggcggacgcctgtaatcccagctactcaggaggctgagacaggagaattgcttgaacccgggaggcagaagttgcagtgagccgagattgcgccaaggcactccagccagggcaatagactgagacttcgtctaaagaaaaaaataaaataaaataaagactataataatatgcatgagtgtattctagctctccctgtctttcagagtggctgtaagaaggagatgagatcatgtgagtaaagctaagcacagtgcctgctgcacagtaaaagatcactaagggccaacgaaattgccagccagaaaggtggggcgcagagtcacccataggaaggcagctccctgaaatcctgccagcatcatggaggatttggggcccaacctgaagtctttggcctagggccagatcaagctggtacttgattgggccttgtcaacataaccttttcatagtcaagtgctactaaggtttctgagattgtgcaggggtgattctgtgtgcaaacaccaggaaggaggaggagtcctgcaatctggttttttgttttttgggggttttgtttgttttgttttttttttttttgagacagagcctcactctgtgcccaggctggagtgcagtggcgcgatctcagcttactgcaacctccacctcctgggttcaagtgattctcctgcctcagcctcctgcgtagctgggactacaggcctgtgccaccatatccagctaattttttgtatttttagtggagacagggtttcaccgtgttagccaggatggtctcagtcttaatctcctgacctcgtgatccacctgcctcggcctcccaaagcgctgggagtacaggtgtgagccactgcgcccagcccaatctgggcttccttgccctcaattaattcctccagcctggcagtctgcatactatggcccaaaggccggtgtttgatccaccagctgttttttgtgcagcttgtgagttaagaatggtttacatggttgaaaaaaaaaaatcacatttcatgacacatggaaatcaaatgaaattcaaaattcagtgttcataagtgaagtgtggttgaaacatagcccgcccagtcatttacatgttatctacggctgcttttgcactatgatggcagcattgagtggccacaacatagactgtatggcacggaaagcctaaaatactgctgcctggccctttcccgaaaaagtttgctgactcttgctctagctttgtggctcccaaactctgctgcacatattatcaaattatctaggaaatgttttattttttgttttttttttgacacagggtcttgctctgtcgcccaggctggagtgcagtggcgcaatcttggctcactgcaacctccgcttcctgggttcagacaattctcctgcctcagccttctgagtagctgagataacaggtgcacgccaccacgtccgactaatttttgtatttttttgtagtgacgggtgtctcaaattcctgggctcaagtgatcctctcacctcggcctcccaaagtgctcagattacaggcgtgagccaccttgcccggccacgtctcaaatgttaacatgcgcatgagtcactaggggtcttgttaaaatgcagattctgattcagtaggtcaagtgggacccagcttttgcgtctctaacaagctgatgatgccagtgctgctggttctgatgccctacttggaagagtaaggtggcgggctggtggttctcaaactttagcatggccagagcctcctggaaggctgttaaaacccagattgctagttaaaacccagaggcctcgggggaagactgaggatttccctttctaacaagctctcgggtgatgctgtttcagccaatctggggaccagacttggagaaccactgccctcagctctgcattgactctccccaagggttggggggccccgcagtccacacaaggtgggatttttactgtgtctgaggccagactccttgacacccagttctcactgagggaattaggtctcagttggcttcttcagtcaactgtctctgaccagactcaaggggtttcctcaagttcaaacccatgacttacagacatgattggagttgtgagacagcaaaagttctcgtccatgtgttgcaaacctcttccccattccagggggttctgatccatgcagtttacagccgaggccccctctgaggagctctcacattagacaccaccgtgggcctctatacaaacaaatttgagccccaggtatgaagtcgtgggtaggccctggccttcagcttcaggcctggagccccagggatgggaggggaaggccacacccccacagagagctgtggctgctgcagcctcagggacggggcagggccctctcttgggtcaggctgggcccagagccatctcctcaactgccttgaacaagaatgaccacctaagccccagccggtttcccagagtccttgaacttgagagtggtggtggccggatctagatgagtgagcttaaggagatcagagattatgaattgctgaattctcttcctggactttattttattttatttttttgagacagagtctcgctctgtcgcccagactggagtgcagtggtatgatagccgactgcaacctccgtctcctgggttcaagtgattattctgcctcagcctcctaagtagctgggactacaggggtgtgccaccatggccagctaatttttgaatttttagtacagactgggtttcaccatgttggccaggctgatctcgaactcttaccctcaagtgatccacctgcctcagcctcccgaagtgctgtgattacaggcatgagccacaacgcctggcctccttcctggactctcaacagcatcatctgcttgcctctggctggggctccctgttcctctgaaggccccgcctgtgagtgggggtgtgagcagggctggtgtctgctgtccatcccaggcagggccatcaagtcccataggacaagacagcacacagagcctggaccctgggaaaggcaggggtattaggaggcttggacaggccttcaggcaaacccttgctctctgctctccagcagagtgaccttgggcagctgtctatgctgcagaggcaatgaccccccggagcattgactcaaggattaaatgagatgatggcttaaagtgccatgacagttcctggcacgttaggtactccgcggacggtggctgctatcatcagcgtaataatagatattggacagacgcagtgcctaacacttgtaatcccagcgctttgggagtccgaagcaagagaatcgcttgagtccaggagtttgagatcaccctagacaacatggcaaaaccctgcctctacagaaaaaatacaataattagctgggcatggtggtgtgcacctatagtcccagctactcaggaagctaaggtggaaggatcgcttgagcccgggaggcaaacgttgcagtgagctaagatagcaccactgtactctggcctgggtgacagagtgagaccctgtctcaaataataataatagatattaattatgatgatttagttatgtaaactgccccgacacaaactctctcccattcccttggagccttccagatacaacagtttttgtttgtttgtttgttttatgcctgaaaagaacctatttggctgcaactgtattcattcccgtattaagcccacatttaagtgcctacagtgccagccattgatctaggtcagcactatccaacatacatacaacacaagccacagatcggaatggcataagcaatttaaaatttttttcattttctcttttgagacaaggtctcactctatcacctaggctagagtgcagtgacatgatcacgggtcactgcagcctcgacctcccgggttccagcgatccttccacctcagctcccgagtagctgggactataggtgcacaccaccatgcttggctaatttttttttttaatttatatgttttgtagggacagggtcttgctatgttgcccagactaatcttgaattcctggcctcaagtgatcctcctgcctgggcctcccaaagtgctggcattacaggcgtgagccactatgcccagtccagcaatgtaaaattgtcatagccacattttaaaaagtaaaaataaacagatcaaactaattttattaatatatttcattgaacccatatatccaaaatattacttcaacatataatcaatattaaagatgatttgtgagtttttaaatgctcaatatgtcttttaaaatacttaattgtggaaaatacatgtgtatagcaaaatttacactgtgatcatttttacgtgtgcagttcagtggtcttaactccatccacattattggtcctcagaaaatattctgagggctgggcacggtggctcacgcctgtaatctgtaacccagcactttgggaggccgaggtgggcagatcacctgaggtcagggtttcgagaccagcctggccaacatggtgaaatcccatctctactaaaaatacaaaaaaaaaaaaaattagctcggcatcaccatgggcgcatgcctgtaatcccagctacttgggaggctgagacagaagaaccacttgaacctgggaggcagaggttgcagtgagctgagatcacagcactgcactccagcctgggtgacaggagtgaaactccatctcaataaaaaaaaaaaaactggggctacggaggagggaggatgacctccattcacagaggacttcttggaggaggtggcactggagctgcacctagaaaaaggtagaggatttgtgggtagaggtaaaggttttgcactccaggactgaataacagcatgagtgaaagtgtggtggtgggaattcccagggtacccaagggctccagcatgtggttgcatgggtatatgcaaataagaagcctctcataggcactgatctctctccatgccagacactgtgctaggtgcttcatatttacaatttaatcttcacatcaactcaatgaactcagtactattttcccctcattttacagatggggaaaccagggcacagagagggtgagtaaattccacaaggtcacacagtgagtaagtgacccaactggggtttgaacccaacttcttaaccactaccccattgtaaaggaaagtgcaaggaattaaaggagacatctaggctgggaccaggttgcaaggtgtcttagaagccagctaagggttgaggggcctttattctatagacaccagtagcccttgaaagtttctgacaggagcatgacatagacagctaagcctcagggaagtgcaggccaaagactgaatctttcatttaccaagctgggaaattccccttccagcatcagtcctttctaaggcaattaagtatctaaactcagcaaccacctacacatttcatccttctttctccctaatgaattacagtagccaaccttcattcaacaggatgctgagagctttatatgcattttaaccctcactgaaaaccaaacaaaaacgcaaggagggaggtactattgctggcctcatttgcaaatgagacaactgaggctcagagaggtgatgcgattttgccaagatcacacagccacccagccagtaagagatgggatgaagatgccacccaagtctgtctaactcaaaagctcactttttttttttttttttgagacagggtcttgctctgttgtccagggtggagtgcagcggtacagtcatagatcactgcagcctggaactcctgggatccagcgaacctctcacctcagcctcccaagtagctgggaccacaggcatgcaccacttcacccaactaatttcttttgttttttgttgttgttgcttttagagatggtggtctcactatattgcccaggctggtctggaactcctggcttcaagcaatcctcccacatcagcctctcaaagtgctggaattacaggcctgagccactggcccctggcacatttttaataataataggatcattcctgtttctcaaagtgaaacagagaaaaagaaactatagcttgtcctcctacataagcctccaaacattatcaggttgaccttatttttctgactctattctggaataccgcattttattcccaatggaacaaccacctcccttctccacctctacccatcctaccccaccccacacacacacgcccctggcatctttcaaggcttggcagaaactaccctctccaagttgcctccagcattggcagggagggagcagatgaaactgaccacactcttccctgctggctgtcaacacacaccacccatcctgggcaagtggccacttccatttctggggatgggcttaggtgctcaccattggcacccccccaagtcctctttgtccattgggacacaatgacatggctcctggcatggggcctggtgggcagggtgttttcctgtgtaattgtactcatacagggtaaagcccggtgcagctgagtgctctggcaataaggaaagcaaacacagcaataagactctgtcaacaagggtatgggagaaaggagccatccaggaaatgcaagctctggtgcagccacctcctctgaaatccctctttggttcactccatccccagcaggacaggtccagaaattatgaaaagagttgtcaggctgctagagacccaaggcagatttttctagttgattgaacgctctcccttttggttgcttttatgtatttttcttttttctttttcttttttttgagtctggagtctcactttgtcgccctggctggagtacggtggtgcgatctcagctcattgcaacctccgcctcccaggttcaagtgactctcctgcctcagcctcccgagtttttgggattaccttcctgcaccaccatgcccagctaatttttgcattttcagtagagacgggatttcaccatgttggccaggctggtctcaaacctttgacctcaagtgatctgctcacttcagcctcccaaagtgctgggattacaggtatgagccaccgtgcccagcctcttttttgaatttttttttaaactataaaagtaatacaattttggaaaacaggtacaaatatcagaatgcaagttgaaatgcgcatccgatcttaacttcttatacaaacccctgttctgccaaatagtagaaacttaattccaacccatccagcatctccccagatccttacaccagggttgtacctaaattcaaggaaggaggctggacatggaggctcacatctgtaatctcaacactttgagaggtcgaggcggaaggatttctttagaccatgagtttgagaccagcctgggcaacatagtgagaccctgtctctaataaataaataaataaataaataaataaataaatataaataaaagccacacagctgtagtctcagctacttagctactcgggagactgaggtgggaatatctcttgagccagggagtttgaggctgcagtgagctatgattgcaccactgcactccagcctgggcaacagagcaagaccttgtctctaaaataaacaaaacaaaaaaattcttggaagcttaacttttttttttaagtctgtatttcctgcttccctacaactatctttgcctaacaatagattttttcatatacttagaatcctggtttttttcaagcagcattctattataagcttttttccattttgctattaaaaattatcttctcatttattacttttatgatgcaagcaatatatgttcattgtaggaaagttacaaagcacagataaactaaaacaatttcttaaaaataactcaagatcctgctacccagagataatcattataaacgttctggttaatgccatctgtgttatttttcctatgcacatagatgcatataaacccacatggtttttttgttttttgttttgtttctttgtttgttttgagacagagtctcactctgtcacccaggctggagtgctgtggtgtgatttcggctcactgcaaactctgcctcccagggtcaagcaattctcctgccttagcctcccgagtagctgggattataggtgtgcgccaccatgcccagctaattttttttgtatttttagtagagacagggtttcatcatgttggccagcctggtttcaaactcctggcctcaagtgatccacctgcctcagcctcccaaagtgctaggattacaggtgtgagccaccacactcagtcattattttttatttttacaaatttatggggaacaaatgcagttttgctacatggatatactgcctagtggtgacgtctgggttttcagtgtaacagtgtacagcgtacccattaggtaattcctcattcctaacccctctcctactctctcaagtctccagtgattattatgttcttttattgctattgcccaggctggagtgcagtggtgcaatcatagctcaccacagcctcaaactcccagactcaagcaatcttcccgcctcagccttccaagaagctgggactacaggcatgcatcactatgctcagctaacgtttttattttttgtagaggtgggatctcgctatattgccctggatggtctcaaactcctggcctcaagtgatcctcccaccttgacctctcaaagtgctgggattacagacaggagccaccatgcctggcctaacatagtttttttaaaaaaacaaaaataattggctgggaatggtggctcacgcctgtaatcccagcactttgggaggccaagacaggcagatcacctgaggccaggagttcaagatcagcctggccaacatggtgaaacctccatctctactaagaatacaaaaattagccaggcatggtggtgcacgcctgtaatcccagctactcaggaggctgaagcagagagaatcacttgaacccaggaggtggaggttgcagtgagccaagattgcgccattgcactccagcctgggaggcagagcaagactccatctcaaaaatgataataataataataataactaaccatttttcttaatggctccccaatacctcattgtgtgcctgtatcgtagtttgtggaacccttctgctcttgcatgtttaaggtttcttgccatgagtgtctgtatccatacagagaagctgggcagagaggatttagccatcgcaaaatgtggtcacctctcaaaccaaaatgtggtgcttggctagcaggtgaacaagaaaatgacaaaccaggagcccttctggcctcatgacaagatgggtcctccaaaggccagatgtacacttgtttttccttgaaaaggacattcacaaagaaaagaataaacaggaaggttttcctcacagctatgaccacatcttctgtcttagagtttggggtcttccggatcagttggcaagacatgtgtcaggctgctgggatggaggcctatatcatcctagagccagcagtggagaaacccacagaacaagtcttgtaaggaagccgccaagcatggcagctggggccgaggggtcagtagggccagttgtctttaagtcacaagtgggaaggtgttttatctaatctggtgagtttacaagacaagaaaggatctttgctgaatctgtcaccccacgcagagtggcatgtgcagatggcttttagatagtgcacagacaattgcttttcatctcattagtaattatttatgttgaggggtattagaaaacatatataattagtagcatccaacctgtgattttgtggacattcttgcttaggacaaaactaaagtagatatttaagtaaaaaacaagagtgagtcaacttaaagaaagatattaagtaaatgatagtataattggttcccagggacagcccagatcatgatgggcacgaagtccatccttgtacatctcaaagtcagcccttgtgcattaagtacttagtccctgagaatagaaagacagccagcaatctttcactccaatctttggtctgtctttgctacaagaggcctctgttttcagagacagcttctcagagcttcttaacaagcatgagctggactcaagaacccaggaggtactggaaacaggcagtcagcacagatgcaacatctgagttcctaaaattcggaagtgggtcaggtcagtttcaaacatggaagtcctgtcctgcaacaatttggttaaatgcctctgaatcgtgggtggtggtttcgccacccatgctataccttgagcgtttatttttgaagtgagtttttgtttgtttgttttttgagacagggtctcgctctgtcacccaggctggagggcagtggcatgatcatggctcactgcagccttgaactcctggactcaagtgatcctccgacctcagcctcctgagttgttgggactacaggcacgcaccaccatacccagttcattttttaagattttttttgtagagagacggtcacgctgtcttgcccaggctggtcttgaactcctgggctcaagcgatcttccaacctcggcctcccaaagtgctgggattacaggcatgagccaccatgcctagcttgtttattattatcattattattattattagagacagggtctcgctctgtcccccaggctggagtgcaatggtgcaatcatggctcactgcagcctcatcggtttgggctcaagggatcctctcacctcagcctcctgagtagctgggactataggtgtgtgccaccaaacatggctaatttttgtatttttttgtttcaccaacatggtttcactgtattgcccagactggtctcaaactcctgggcccaagcgatcctcccacctcggcctcccaaagtgcttggattacagttgggaaccactgtatccagcctgtttattttaaacgctagttttccttttgtatttagaagacaataatttttctacttgcctaatgaagtgaaccacagctaataagagctgatgcacccatagtgctgtgaactacacattgttttaagcaccctcggaggtaggtgtaatactgccctctccatgcagttgaggagacagagacacagagataccatgtagcttgtgcagggttacatggcacagctgagcattcacacccaaagcttggctccagcaaccaagccctgaccaactccccagtaaggggaatcatggtaaagcccttccttcaaactgtatctttattgcatctttttttccatactgggggtcatgcacactcacattctaaccaggcgatagaaggctttcttcttttgaaaatatgccagcctgggcaacatggtgagactctgtctctacaaaatattttaaaaattagttgggtgtggtggcatgtgcctgtggtctcagctacatgggagactgaggcgggagaatcacttgagcccaggcagttggaggctgcggtgaattgcgattgcaccactgcactccagcctgtgtcacagagtgagaccctgtctcaaaaaaaaaaaaagaaaaaaagagagcgaaagaaagaaaagaaaatatggcccagctcagcaaaacattgttgactgtggctccaggcagaagcccatgttttgcagctacccatgtgtcgcctttgagggccttaggaaaagtcacttctttgtgtggctgtagtgcccagggaccccgactcggcaggtggagcatgggctggacttccagctcttgtccggcatcctccaacctggatgggcccaacgtgaacaatccccttggtcccttgatggttaggaagaaaagcaggcacaagcagctgttctgaggctatagcggttttgcttggagcattggcccacgtgtgaggttgggattgacaaaagcaggctgagagagatgagggccttggaaggaacaggaaagaggccagacaggattctgaggggcatttcccccagcgccttgctttcggatcctgcagcctgttctctgtgcagtgcctgaggggcagggatgtgtgctgtactgagctctgaggaatgagatctcttgtctttttgttttttgggtggttttagaccagggtcctgctctggtgcccgggctggagtgcagtggcgcgatcatagttcactgcagcctccaacccctgggcttaagtgatcctccctcctcagcctcctgaacagttgggactagagtcatgtgccaccacacctggctaatttgtaaattttttctagaaatggggtcttgctatgttgcccaggttcttgaactcctggcctcaagcgatcctcctgctgcagcctcccaagtggcaggcatgagccaccatgcccggccgagatctcttaagggcagtcgaggcttccctggagctagctgcaggagatggagataacccgggttatggcttcacatctggagaccagacaaggttttccaaggaccctggcacatgctccctgaaaggtgtggccagcgttctttatcaccagccagcagctttcatctgagctcttatctgatacttgccatgattcatcttccatctcaggaccagctagatgggcacagccgagctgcattgagcccacaggagggcagggctgtgttgaagagggtggcaggtctctgccccacacaacttgctcaccctccccactggctcctgtcagaatcactcccttctttctcagcgctcctgggtggtgtgtagcacttgcaagtttggccttaagtactcccttcttttcccaacagcccagatgacaaagttcaaggggccagggagcttttcctagtcactttttttttttttttttgagacagagtctcactttgtcatccaggctggagtgcagtggtgcaatctctactcactacaacctctgcctcctgggttcaagtgattctcctgcgtcagcctcccaaatagctgctattacaagtacccaccaccaggtccagctaatttttgtattttttttagtagatccgccatgttggccaggctggtctcgaactcttgacctcaggtgatccacctgccttgggctcccagagtgctgggattacaagcttgagccaccacgcccggcctcctggtcacttttataagtacactaatcccactcatgatacatgattcaacacctcccaaaggccagcctcatttcaacatatgaattcattttaaaatatgaatttggtggggggacacattcattcagatcacagcaccagcacagctcagaattagcacaggagggggagcatctattccaggtctgagttctgtctcaacaggggcctctttgtaggatcaacactggccatataaaggggtgggaggaacttacaccaccatgaagtgtgagctaaggacagggcattataaggaaacccacagggctgttttgtgtgggggtgggtttttgcttgtttgtttgtttgtttgtttgtgataaggtgtgctgagctctgaggaatgggatctcttgtctttttgttttttgggttgtttttagagacagggtcctgctctattgcccaggctagattgcagtggtgcaatcacaactcactgcagcctcaacctcctgggctcaaatgattctcccacttcagcctcccaagcagctgggaccacaggcacatgccatcatgcccagctcttttttttttttcttttttgagatggagtctcgctctgttgcccaggctggagtgcagtggtgtgatctcgactcactgaaacctctgcctcccgagttcaagcgattctcctgcctcagcctcccgagtagctgggattacaggcgcccaccaccatgcccagctaattttttgtatatttagtagagacgaggtttcaccatgttgatcaggctggtcttgaactcctgacctcaggtaatccacccacctcggcctcccaaagtgctgggattacaggagtaaagcacagcacccggcctcgttttttattttttgtagagacgggatctcactatgtcgccaggctgatctcgtactcctaagctcaagtgatcctcctgctttggcttcccaaggtgctggaattacaggcatgagccaccatgcctggtcagagatgttttttatcccctaggctccctgtaatcccacatataggcattgccagggccagggcacctgctgacatggtgaggattccatcctagtggagtgaccccagcctcacgggtcttccttcaaaggagccaagtgtagaaaagtggccttgttggccaggcacagtggctcatgcccgtaatcccagcactttgggaggccgaggcagtggattacgaggtcaggagttcaagaccagtctggtcaagatggtgaaaccccacctctactaaaaatacaaaaacttagctggacgcggcggcaggcgcctgtaatcccagcttactcgggaggttgaggcaggagaatcgcttgaacctggggggcagaggttgcagtgagccaaaatcgccccattgcactccagcctgggcgacagagtgagactccaaaaaaataaaaaagaagaagaagaaagggaggaaggaaggaagggagggagggagggagggagggagggaggaaggaaggaaagaaggaaggaaggaaggaaggaaggaaggaaggaaggaaggaaggaaggaaggaaggaaggaagaaagaaaaaaggccttattgctgaagcatagatggccaccagggccaggcaggctaggtttaggtgcagctgtttgcagttgttgtctgggaaaaccagctgccagccattgaggaattcgggacaactagagaccttggggagtatgggatttccctgccagggagtgactcagtcccacgagaagcagagtctagagacctcttctctgcttggccatttctctgtgaatgacagttccaaccacccatggtaaacacccagggccattttgaataattctacaccttccataaaatgttaataccaagaataataatttttaaaaataacaatagctgccatttatgaacacttactttgcgacgggcactgtgcaaactgcttcccatgccttatcttattgaatcctgacaacaacctagaaggcacaggtactattattcccatttgcagatgataaaattaaggctcatggctggatgcaatggctcgcacttgtaatcccagcactttgggaggccaaggtggggggattgcttgagcccaggagtttgagaccagcctgggcaatacagcaagaccccatctctaatttaaaaattaaattaagttaaaatttaaaaataaagactcagagagaccaacctatttacgtcatggattgagccccttccttaaggagatggcagaaccagaccctaactggggcctaactcccaaaccctaccctgtctgcccttgaatgggaatgttagtcacatccaggtccttaacgcccagatgtgctgtgcttgcctgcgatgtggatgggaattactcatcaccatgtaaggttgctccctgccccatagaatgagagggtgactctgccattgccacaccatggaatgaaaccgtgggacagccaccaacatgcccccaacagggtggacagccacattccccagacaccacccaacacgtggggcagcgaccccagagaacatctccacgtggtgtgggagtgtggctaccgcctcaacactgccttacagtgaacctcccatgacccaccccggagaactcagagttgacatcagcatgacattgctgtaaattcttagcatttcagggctcgaatgagtgataaagtgtttctaaaccagtgctttccagcctttttcgagtcatggactatatacatgcatactgtatgcacaggattcacactacagtaaagagacaaggtggcatgtgaccaatggcagtggagggcaggcagtgggggacaggggtgctccagccgcccacaggtctagaacatcaacacttcagctcacctgaaaccctgaggcacacccgtctggactgccctagtcctgccttaacctgcagcagctgttcttccttgctttgcttcctcagctcttgtggtaaagctgtttgcaccccattcacccctctgcaaccttctcattctaagtggtcaagctgtttcccatttgagaatattacagtgttgcaatcaacatccttaaactgtgcacacgtgtgtgcatgcaccaatgcaccaaagcacacttactacatgaagtggaactgtggggtcatgggctgtcacattttaaatgtagtagggactgccagattgctgtccaaatgactgcaccaatttcaaccccatcagcacataaacgtgtttttttccccagagctcggcccatacttagtattatggaacagtttaatctttgcaaatctaatcactgctatacaaattttttggctctaactctaatcagtccacattttaaattttaattgctcttttcaatattttttttctctttcctgtggacatgtaagctacacgaaggcagagattcattgcctgactgttttgttcactgatgaatgtccagcacctagaacagtgcagagtacacaatggatgattaatcaatatttgctgactgaatagattaaacattgatatgctgcaaaattcaaaaggtgcaaaaggagtaaataatttttttatgtctccttttctgcctgttcccccagccactcagttcctttcttgagggcaactcatattaccactttcttgtgtgacctggtagaaggactgcacagatacaaggaaatacctctatgttgcctaagctggcctcatacttgtgggctcaaagatcctcctgcctcagcctcccaaagtgctgggattataggagtgagccaccgtgccagcctgtattttctttttttttttttttagatggagtttctctctgtcgcccaggccggagggcaggcttggctcactgcaacctccgcatcccaggttcaagcgattctcctgcctcagcctcccaatagctgggattacaggtgtgtgccaccatgcccagctaatatttgtatttttagtagagacagggttttgccattttggccagactagtcttgaactcctgacctcaggtaatccacctgcctcagcctcccaaagtgctgggattataggtgtgagccactgtgcccggcctctattttttttttttaacataaatgcatgtgtgcttcatatgctgttctaccctttctttgctctcacttaactgtatatattgacaacattcactgtctctgatcagctcaaataagacctgtatcttagagggctgtggaggaagccactttccctatcgtctccattagtcatgctgtgtttggctttctgggagcacccctagatgtcagggaaccacagccttgggcaaaagaggttcataggtgcacacagaggatgcgggcagctgcatggccccacttcagatttccccaacacccaccagaacaggtgcaagatgtcaggtgccccgtctgagctagtaggtgagaggtggccggaagccaggcaatctggtttctattttcagacctgccctttgactcaccatgactgtgggtaagtccctctgagtccctctgtgctctaaattcgctgtgtaatgggcataattatgcccaccccaacatacttaaaaggacggcatgaagccacaccaggaaatgccttggaagagagcatatgtccttggaccagtacatgcttcagcccgtgaaagacaattaacagggcatttcccaaagggtggtaagcaagacgatttttttttttttttttttgagacggagtctcgctctgtcgccaggctggagtgcaggggcacgatctcggctcactgcagccttcccctcccgggttcaagcaattctcctgcctcagcctcctgagtagctgagaccacagatgcgtgccaccatgcccagctaatttgtgtatttttagtagagacggggtttcaccatgttggccaggatggtctcgatttcttgacctcatgatctgcccacctcggcctcccaaagtgctgggattacagacttgagccaccaagcctggccaagatgatttttttttcaatgattctcagaggaacctttttctgaatagttaagaaagtatgttcatgtgtattaggaaaaaatggctcagcacatcaaacctgttatttcacaggtgtaatattgctttgtattcatagtagtgcctaggaggaagttgagtttattttagccaaaaataaaaaaatgagatgatgtggcattatctagtaagtaaataatgatacaagtgctacacagatttagcaaaaattgcaaaagtggtatacaaatgatcaatgctaaggaaagcattgaattagcaggtagttagagggaaataacaaaatcaagcttataaatatttatatgaaatactcatttgaaatatttctttttactatttatttattaattttttagacagtgtcttgctgtgtcacccaggctaggcttgcaatgatacaatcatagctaattgcaacctccaactcctgggctcaagcaatcctcccacctcagcctccccggtagctgagaccacaggcacatgccaccacatttggctaattttgtaagttttttgtagaggtgaggctttcaatatgttacctgggctggtttcaaactcctggactccagtgatcctcctgcttcagtctcccaaagcactgggattacaggcatgagctaccaggagtggccaggtttctttctctttctttcttttttttttttttttgagatggagtttcactcttgtcgtccaggctggagtgcagtggtatgatctcggctcactgcaacctccacctccctaccaggttcaagcaattctcctgcctcagcctcccaagtagctggaattataggcacctgtcaccatgcccggctaatttttgtatttttagtagagacagggtttcaccatgttgaccaggctggtctcgaattcctgacctcaggtgatccactcacctcggcctcccaaagtgctgtgattacaggcttgagccaccgtgcttggccccaggtttcttcttatttagtgcaaatatatatgacatagtaaatcagagatcagcaaacttctttaaagtaccagatggttaatatttaaacatttaaaacatataggccaggcacagtggctcatacctgtaatcccagcactttgggaagccaaagcaggaggatcacttgaacccaggagttcaagaccagctgggcaacatggcaaaaccccatttctaccaaaaaaaaataataataacaaaaattagccgggtggcacgcacctgtagtcccagctacttaggacactgaggtgggaggatcgctggagtccagaaggttgaggctgcagtgagctgagattgtgccactgcacttcaacctgtatgacagagtgagactccgtgtcaaaaaaaccacaacaacaaaaaagaaaggctcatttaatacatttcctgcaccaaagctggtagcaaccatttttctaagaagccctggttcttttagtcaaaaatggtatttagagaccaaaatcttggtgctgggaatgcacataatatttgaatttataaatagaaattgtgtccaaggtatgccctggcttctctagagatcctgacagcttccctaaaactcttcttcactttttctggcctggacactaaacctcagctgtggctgttacacctggccaggtgcttgagaataaagagtcagtcatgtcctctggttgcccttgcagaggcagaaacatgcaagatttttcaataaccagagtcaaatccactttcaggttaaccttcaattaactttaaaaatccagctaccagaaaccatattccccagtaatcttggataattgaggttttgctgcgaaaataagtacaggggattttaatgaaagcatctgacctgcaatttacaggagtcacaaagtcagatgtccacatgagccagagcagctaatgaaaatgagtaaagagggctgggtataagacagcatggaatgggaagaattggggtgagctgggaacacactacccatccaaggagagcagctgctagtcaaatctagcagaacatggtcatgcggggacaaccgtcacatctttctgacttttcaaaggatgaagaaaatccacgttttaaaaaaatgtgaaatctcatcattttgaaatggcaatggattaaagtcttttgttagaactttattgagacataatttacatataatagaatgcatccatttgaagcatattgtttgatgagttttcacaagtgtatgcatttaatgaaccaccatcccattcaagatctagaatattctcatcgtctccaaaaggctccctgtacaacttttagtcaatccactactcacccaaggcccagatacttactgatctgctttctgtcacaatagattaattcatattttctaggggttcatataatggaattctatagtatgtattcttacgtgtttagctttttactcggcttaatattttttatatacgtccatgttttatgtatcaatagttggttcctttttattgttgaatggaatcctattatggatatgccgtaatttatttatttcttcccctgttggtggacgtgtggattgcttctaggtgggggctattatgaataagtgaacatatatgtacaagtctgtgtgtgaaagtatgtttttctcctggataagtaaaagtggaattgctgggtcatatgataactgttcatttaactttttttttttaaatatagagacagggtcttactatgttaccaaggctggcctcaaactcctgggctcaagcaatcctcctggcttggcctcccaaagtgctgggattacaggcgtgaaccactgcacctggcatccttaacttatttttattattattattattattttgagatggagtctcactctgtcacccaggctggagtgcaatggcacgatctcgactcactgcaacctctacctcctgggctcaagcgattctcctgtctcagcctcccaagtagctgggattacaggcgtgtggcaccactcccagctaatttttttgtatttttagtagagacagggtttcaccatgttggccacggagtctcaaactcctgacctcaagtgatccacccaccttgacctcccaaagtattgggattacaggtgtgagccaccgcgcctggcaactttacaagaaactatatcaaactaccttccaaagtgactgtaccattttgcattccaaccagctgtgtaggagaattccggttgctacacatcctcaccaatactagatactatcagtccttctaatgggtgtgaagtgatagctcattgtgggtggttttgatctgcatttctccagtgactaatgatggtgagcatttttttgcatgcttatgggccattcatatttcctcttttatggtgtctattcaaatcattggcccattttttgttgaactgtttgtcttattatttagttgtaagagttctttatatattccgcatagaaattctttgtcagacatatgtattccaagtattttctcccaggagcttgctctctcattttctcaaccatgtcttttgaaaagcagaagattttaattctaataaggtacaatttataagtttcttatgattcatgattttagtgtcctatctgaagatctttgcatatcctaaggttacacagattttcttctatgctttcttctgggtgttttatagttttattaggtctatgaaccatttgaagttagtttttgcatatagtgtggggtaggagttaagattcccttttaaaaaaatatggacaactacttgtttcagcatttgttgttgaaaaaaattacacttttttatttttttacgttttaatctttcttttaaatagagacaggttgtcactgtgttgcccaggctggtctcaaactcctgggctcaagtgatcccagtactttattggcccaaggaactggaattacaggtgtgagccaccatgcctggccaagactacactctcttcattgaactaccttggcaaatttgtaggtctatcagagctccttaatccaatgatcggtagatctatcattacatcaataccacactgtcctgataaatgcaacttacagtaagtgttgatatcacatagaaatgtctttcaacttgtttttatttttcataagttttttaaaatgttgctttgaagtgtgtgtgtgtgtgtgtgcatgtgtacacatgcatgtgtgtctgattttgttttgtttttgctgttttagttcttttgcttttccatacatattttagaatcagtttgtcaatttctacaaaaattctgctaggattttggttgaaattgagtagactctagagattacgtgtgagttgactctagaggttaattgacatcttaacaatattgagtcttctaatctatgagcatggtatagatctccatttatttaagctttcttttcatttaaatgctaaaacatcagacaaggtgccaagacaattaaatgggagaaagaatagtctgggtgctgggacaagtggataggtacatgaaaaacaatgaagttggattcctatctcacactatatatgtaaattaattcaaaatgaatcaaagacttaaatataagagctggaactataaagtccttagagtaaagcatagaaacagatcttcaggaccttggattaggcaatagagtcttagatatgaaaccaaagcacacacgcaaaaaagaaatatagagaaatttggcatcatcaaacttaaaaacttttgttcttcaaaggacaccatcaagaaagtaaaaagacaacccacagagaaggaaagacaatgtttgcaagtcctgtctgttaagggacttgtgtatagaatatataaataactcttgcaactcagtaataaaaagataaatagcccagttaaaaaatgatgaaggatctgaatagacatttctccaaagaagatatactggccatataatggatctaatggccaatatataagcctatgagaagaagttcaacatcatagctatcaggaaaacgcaaattgaaaccaacgtaagatatcacttcacaccccattaaggtagctgtaataactttttaaaatggataataagttttggagaggatgtggagagattagaactctcacacaccgggtgaaattgttaagtagtgcagccattttggaaaacagtcttgcagttcctcaaaaggttaaacatagaattaccatcagactcagatcaggagttcgagaccactcctggatatataaccaagagaaatgaaacctatttctacacaaaacttatacaagatcattcatagcagtattatcataacagccaaaaagtaaaaacaacccaactgtccatcaactgatgaatggataaataaaatgtagtctcaacataatatgggatattatttagcaatagaaagaaatgaagcactaatacatgctgcaacgtacctttaaaacacactaagtgaaagaagccagtcagaaaagaccacacattgtgcaattccgttttttgtttgttgagacagagtttcactcttgacacccaggctggagtgccgtggcacaatctctgctcactgcaaactctgcctcccaggctcaagcaagtctcctgcctcagtctcctgagtagcagggattacaggcacgtgccaccacacccggctaattttgtatttttactagagacagggctgtaccatattggctaggctggccttgaactcttgacctcaagtgatccacccacctcaccctcccaaattgctggaattataggcatgagccactgtgcccagcctgcaattctgtttctattaggggtgtccaatcttttggcttccctggaccacattggaagaagaattatcttgggccacttataaaatggactaacactaacaatagctgatgagctaagaaaaaaaaaaatctcctagtgttttaagaaagtttatgaatttgtgttgggccacattcaaagccatcctgggctgcctgtggcctgcaggccgcaggatggaaaagcttgatttatatgaaacatccaaaacaggcaaatctagagagacagagaatagataagtggtttctgatggggaggaggagggtggagagaggaatgagaaataacttctaatgggcatggagttttctttaggggaaataaagatgttttaaaattgattgtgatgatagttgaacaatgtgaatatactgaaatccagtgaattctacactttaaatggaacacacaacaaaaaatgctaaaacaaatagttgtccatattttttaaagggaatcttagctcctaccccacactatatgcaaaaactaacttcaaatggttcatagacctaataaaactataaaacactcagaagaaagcatagaagaaaacctgtctcgtaagagaactgaaacagggctgggcatggtggctcatgcctgtaatcccagcgctttgggaggccaaggagggcagatcaccaggtcaggagatcgagaccagcctgaccaacatggataaaccccgtcactattaataatacaaaattagccgggcgtggtggtgcatgcctgtaatcctagctactctggaggctgaggcaagagaattgcttgaacctgggaggtggaggttgcagtgagctgaggtcacgcgatcgcactccagcctgggcaacaagagcaaaagtttgccaaaaataaaaaaaggaaaagaaagaaaggaaggaaggaaggaaggaaggaaggaaggaaaaggaaggaaggaaggaagaaagagggagggagggagggaaggaaggaaggaaaaaagaaagaaagaaaaagagaaagaaagaaagaaagaaagaaagaaagaaagaaagaaagaaagaaagaaagaaagaaagaaagaaaaaaagaaaggaaggaaggaagaaaaaaaaaagccgaaacacttttccacatttattgtttttgcatttgctaacaggaacatttaccatgagttcagggccaatgtatagtcagcaatctgtgactctgaagcatgacaattggtgtctctttctgtgtgcacacatggacttagtctctactttacttgtttggattgggttaagctgtacactgattcaatcccttctccataaactgtgtatacattccaaacacagaccatctatcaccgtgggggtgaaatctgaccagaacatcataaagttgtttgcagcacttactgagtttgatctggctaatgacccaaggggccagactagttagatgctcagccaatactcaacacacttctgttatttgcctaccattgtaacaacttttgctacctgtagtactgttgtttacttaaacatttttctttaaatcaattcccctttttttacttaagcacgtttatgaacataaagcaaaagtcagtatctcttgccataagtagaaggtggctcttaaaagtaagcccagtgaaaacagaatgttacccattctaactagatactgttgcctgagcctgaggcctcattgttaaacccggagattagaagggttggagaggtgttaaggagctgttggtaccaagctgagactttctccttgactaaatcagaataattacatgagaatagaaaagggtagacattctagaggccctttatatcttctacaactacctattggaacctaatgtgatgttcacctatgtggctttggggtgctagactatataaggcagacgaagccttggttcttcccatatgcttgagtcatggcaaacatttaatactttgatgttgctcttgtagttgctattataataactgttattactttattatttcagagcagggaatagaccttctggggaaagttgggagtggggttactctatgaacatcctcttacagccatgatggcttgggcaggcacatagagtttaattcctatcagagaatggagttggaggtggggtgcagtggctcacacctgtagtccaagcactttgggaagccaatgcgggtggatcgcttgatcccaggagttcgagacaagcctgggcaacatggcaaaaccttatctctactgaaaatacaaaaattagctgggcatggtggcatgcgcctgtagtcccagctactcaagtggctaaggtgggaggatcacctgagcccgggaggtggaggttgcagtgagtcaagatcgtgccactgcaccccagcctgggcaacagagcgagagcctgtcgagagagaggagagagaaagagagagagagagagagagagaacagagttggagaagaaagcacttcatgctttggccaagactccttctggggaaggaaggtgagaaatgttactgtgtcagataattggatcaggagtgaatatgcttgggcaggtttaacatctctgtttagacgtgaaggtctgaccttatacatctggatattctgtggggtgtcaggcactgtgctgggctttgtcagggatacagagctgctgccctcaaggggcttgcgatctcccgggagaagccacaggcacaagaaactagaacacaggataaaacaagggtcaatttattttactattaagcttcttatgggtgcaaatggcaggcatccaatttggatatgcataaataagaaagaaaatgtattgtttccatatctgatgaggccaggaatgaatggcttcaggcatggctggatccaggtgttcaaatggcaaagtcagaaatttctctccatctcgtgcctcttctttcctctgtattggctttattctcaggaagacttcccgtttgggctgccaaataccaccagcttagtaggcttagttaaaagtgaggtctctccttcagttattccaatataaacgaatagaattgagtcctaatgttccactttgagtcacatgcacatctcccagagctaagaggagagatcagcctggcaactcacaccaactgagatgaaagggacagcgggatatcttcacctgaaacctcagtgcaagggggagagtatgctgggcacagaggaaccacactgcccagcatggtgcccccagaagggaaaggctctcagagggggtgagggtccagcctgaagtcaggagagcttcatggaggaagtggcctttggtctggaccttaaagatcaaatacaactggagctccaggaatagagctgggatgctcctgccgcaggttcctgctctgtgtccagagagaagggagggggaagcaggaatgtccttagaaaccctcatgtgccataacaagtacctggtggtcttcacaagaacctgccctctcatgcatatgggaaacagagtctcagaaaactctggcattcctcatccatgacccatactctccaacctcatgctccggacacaacctcaccccattctaatttgtatccatggaacacccttttttccttttctttttttttttttttttttttttttttttgagacggagtctcactctgtcgtccaggctggagtgcagtggggcgatctcagctcagtgcaatctcggctcactgcaacctccacctcccaggctaaagcagttctcctgcctcagcctcccaggtagctgggattacaagggcccgccaccagctaatttttgtatttttagtagagacagggtttcactatgttggccaggctagtctcaaactcctgacctcaggtgatcctcctgcctcagcctcccaaagtgctgggattacaggcatgagccaccgcacctggctggaatgcccttttcaaatcccagctttgatggcatcacaccctcatgcctccaaaggttccagttctcttgggattgaaaccctaatctttaacacagtccacaagcccttgcgtggcctggccctgctcacccttgcaggctccctccccacccctgcaggctccctccccacccctgcaggctccctccccacttcagccttcccccttcccctcccctctcctatcctttaacctcagctcctccatcacttctccaaggactctcagacctggccaggcctccgttttctaataaaaatcgctgacacttaggtgccaggcatgaatctaccctctccatattttcatgcagccagcctccacgacagctttatcaggtggaagctgtaattatccccattttatggatgaggaaactgaaggactgagaaggagatttgctcaaagtcacaagctaggaagcagcagggctgagagtcaaagccagaaatttcccaggagttcgaggctgcagtgagccatgatcatgccactgcactccagcctgggtgatagagtgagaccctgtctcaaacaaacaaacaaaaagccagaaaatttggttacagaatccttattctaaaccaccagcctttaatgcctctagcatctcagggcatggggtcccaatctttcctgtcatgtttcatagctctgcttttttgatggattcttcgcttaacatctgtcttacccaccgacagctagtgacaatggaaactggcatactgaggacctggcctgtgctaggctcagtccatagcactttttgtgcatcgccgaatttcctcctctcagcaatcctgtaagttagatgtaattgttacagtaagtcttcacttaacattgttgatatgttcttggaaactgcaactctaggctaaacgatgtctaatgaaatcaatttcaccataggctaattgatatcaacaagagttaagctcctatggcctatttctggtcacaaaaaaagtcaccaaatttctaagtaaagaccaaaatgcttctaatattaaacattgaaataaatatgagctatacatacatttaagaaagattaagaccaggtgcggtggttcatgcctgtaatgccagcactttgggatgctgaggtgggtggatcacttgagctcaggagtttgagaccagcctgggcaacacggtgaaaccccgtctccactaaaaatacaaaaattcactgatatggtggtgtgcatgcctataatcccagctacttaggaggctgaggtgggaggatctcttgagcctgggaggtagagattgcagtgagccatgactgcgccactgcgctctaggctgggtaagagagtgagaccctatctgaaaaaagaaaaagaaaaagaaagattaataaaaacaagtaagatcattatttacccacttattcagttcaaggtcacagtggccagagcctatctctgcagctgaggccacaggcgggaacccaccctacacaggacacattccattgcagagcactcacacacagtcacactcactcacctgggaccatgcagacacatcatggggaggacatgtaaactccatatagacagtggccctggctgggaatctactttcttttctcatcaatgttacaatgaaacattgaacaaaacgacgtcgtttgaggacttgctataccacattttatgcacagagaacctgagttgagagtttaagtcacttgttcactaggttatgaattcccaaagggcaaaaaaccttgtccattttgctcattgagtccagaaggaccatttgagtgcctggcatatagtaggcattcaataaatgcattttggttgattagatggatggatggattgatgacagatagccaaaggaaggaagaaaagaaggaaaaaagggagggagggaggggggagggtaaagagggaggaagaacggggacgtaccgccgcccagttcctggacgtgactgggacatcctcgcaggcaaggctggtgtcccagctgatgtgcgtccccatgcctctctgcaggtgccactatgcacgtgaagaagtacctgctgaagggcctgcatcggctgcagaagggccccggctacacgtacaaggagctgctggtgtggtactgcgacaacaccaacacccacggccccaagcgcatcatctgtgaggggcccaagaagaaagccatgtggttcctgctcaccctgctcttcgccgccctcgtctgctggcagtggggcatcttcatcaggacctacttgagctgggaggtcagcgtctccctctccgtaggcttcaagaccatggacttccctgccgtcaccatctgcaatgctagccccttcaagtaggtggccccggagtgcacagctggcctcagcagacaggcggttctctttctctcttttcttcccttctacctttcctttccttcctttccttccttctcctttctctccttctctttatttctcccctttcttccttcctttctccctttattacttttccttccttcttcttccctttcttttttcttttctttctttccttccttctttctctttctcctcctctctgtctttccatttgccttcatccttttgcagcaactaagattcaaacttcataaacttttggccaggtgcagtggcctgtaataacagcactttgagaggcaaagacagaaggatcccttgaggccaggagttggagaacagcctgggcaacatagcaagatcccacttctaaaaaaagtaaataattttttttaattagccagacgtggtggcacatgtctgtggtctgagctgcataggaagcagaggtgggagaactgcttgagcccaggagctcgaggctgcagtgggctgagatggcgccacttgagtttcaagtcaaggctaagaaaaaataattaattaaaaataaaaacaagaagatgccactgcattccagcctgggtaacagatgctatctcttaaaaataaaaaaatcataagtttcctaggcttagagagaaccttgggcaccctctgtcttcaggcaggccagtgcctatttatcgattccacgcgtgtttacggagcacctactatgtgccaggcactgtcctaggcaacacaaatacaacagttaacaaaacagagtccctgtcctcttcacagcctgccagagcaaacatgccccacaaagttgtccccacaaatatcgaattcatcatcattatgatgataaaaaataaaacaactcagccgggcaccatggctcatacctgtaatcccagcattttgagaggctgaggtgggcagattactcgaggtcaggagtttgagaccagtctggccaacatggtgaaacctcaactctactaaaaatacaggcaatgcctgtaatctcagctacttaggaggctgaggcacgagaattgcttgaccccgagaggcagaggttatagtgagctgagattgcatcactgcactccagcctgggcaacagaacaagatcctgtctcaaaaattaaaaaataaataaataaaaccactcttcaacaaatgcttatgatatgctaggcactgtgttcagtgttctttggataattggtgtcattctaatccacacaaccaccctaggattgggaactcctgtcgcagccccagtttacaggtgaggagatggaggttcagagaagtaagtgagcttgcctggagatgcacagtggaagactgtgggatttgaatctaggcctgatgtgatcccagaactgctactttttaaccattcttccggattgcccgttctccattctccgcttgatagcaagacctgtgaaggggacacaagaggagacccaacctagtcagggttatggagagacagggagtcagtccaaaaacaaaaaataaaaaaaagtgccctaaggaatgagtagaagttggccagatatggtgaagagagtgcccccagtcttggatacagcaggtgcagctggtgagatgcttggtgcattcaaggaactgaaagaagggctgagtcacagaaaacatttttatccaaaagagagtcctgaccgggcacagtggctcacgcctgtaatctcagcattttgagaggccaaagcgagtggattacttgaggtcaggagttcgagaccagcctgcccaacatggtgaaaccccatctctactaaaaatacaaaaattagccgggtgtgctggcacatgcctgtaaacccagctactcaggaggctgaggcaggaaaatcacttgaactcaggaggtggaggttgcagtgagccgagatctcgccactgcactccagcctgggtgacagagcaagaccttgtctcaattaaaaaaaagaaaagaaagaaagcaaaagaaagtcctgactgggcacgggcacagtggctcaggcttgaaatcagagcatgttgggaggccgaggcttaaggatcacttgaagccaggagttcaaggtcagcatggccaacatggtgagacagcatctctgtttttaaaagtcctagaagggaattctcacatagtgattactttcccaattatcagaaagtcccttctttctattaatagggttcttcctgccttggtgggttcttagagctgctcaagagaatctttaataataataggaacgacagcactccttctgggcactgatccatgcattttataagcagcacctcattgaatcttcccaacgattctctgggttacttatttttatccccctgttttgtagatgagagaacagagcctcagggaggttaagttgcccaagatattaagtggcatgccaggattcaaacctggagcccatacagtgacccatcaagcttcccagaagctgtgaacatctaggctgtaataacaccaccacctgcacagacgccacccttccccatcctcctgttcctgtgtacacagatttaatggtcagggaactggcatcgaaggccaacgttagctctggctgctgtacacctttgtaccaggaccttggcctctgtccagcatttaatgctcctgcaggaagttctccagccagagttggcatttgtggcctcaattaccccactttgaggcagggtcttgggtaaattggacatgaagtgactggggtgcagggcccggccccgcagagatacttcttgatagatccatctctcactggccaccatgtccaacatgggagcgccacagggctgagggaagacattggagccagcctcacagtcccattcattttctctctcttgaaactggctcctgttcccaaagttgctcccccctgggagggagatctcagaacccccataaacatacccactggagcccaccaaacccagattctaaactcacctctgccctttatcagtggagtgagcttgcaaaatcacaccaactcctggagcctcagtttcctgagctatatatggggacggtaacagacttgtggcaaacaagacctggaaagcacctagcacctggcacatggtaagctatcaataaccatgagccattacaattcttcctcactcgaatgtgaatttcataaggaaagagaccaggtccctcttgtttgctactgtatcgtctgtgccttgcacagtgcctggcacatagtaggtgctcattaaaagttggtgaatgaatgagtgcatgggtggtggaaagatggatgcatgggtgggtggacggagaggtgggtgcttaggtggggtgttcttcttatacatagtggcagccatgctggagtagcagtgtgatatggttggctcagtgtcaccacccaaatatcatattgaattgtaacccccatgtgtcgagggagggacctggtgtgggtgattagatcatacgggcggctttccgcatgctgtgttcgtgatagtgagtgagttctcacaagatctgatggttttaaagtggcagtctcccctgtgcactctctttctctctctctcctgctgccatgtaagacatgccttgcttcccccttcaccttccgccatgattgtaagtttcctgagacctctctccagccatgtagaactgtgagtcaattatacctcttctgtttataaattacccagtctcaggtagtatctttatagcagtgtgaaaacagactactatggagtgggtcccagatttcatttgctctgctttacagatatgcattccttccccctaaccagccctctccccatccaggtattccaaaatcaagcatttgctgaaggacctggatgagctgatggaagctgtcctggagagaatcctggctcctgagctaagccatgccaatgccaccaggaacctgaacttctccatctggaaccacacacccctggtccttattgatgaacggaacccccaccaccccatggtccttgatctctttggagacaaccacaatggcttaacaagcagctcagcatcagaaaagatctgtaatgcccacgggtgcaaaatggccatgagactagtaagtggtccctgggcacatatcaagcaatgggccccacccagtgaggctgatgggtgtttcttttctgtagtaatttgagtctcgctgggggaaagacaagatggaagccagagcctgttttgcttgtttgcagagattttttaaaaatagaaatttttggcatgttagtcaagactcctttggtataagtgatccagctcacactagcttaagcaaaacaggcgattcattggctcacatgactaagaaatccagaggtatactgcattcaggcaaggctggatccaggtattctaatgaggtcatcaggaatctttctccgtcttggttcaacttttctctcaggcgacttcactctcaggcaagatctctccatgtggagggatcccctcagtgcccttgcttagcagtggtcccagaaaaagagctctttccctatagtcccagcaaaggtcctaagaagactcattagatcacatgctcacccctaaaccaatcactgtgggctacagcaggggctctcatgattggccagtcctgggccatgtgccctggagttgggagtgatgtcagcctctgtgagaccacatggactgagcaagggggaaggtggttccctgagggaggaactaagtcttgttatcaaaagataggggcataaatattgggcaggtgaaaagccacagctgtgcagtacagtcacatgccaagaaacaactgccctgcactgggaggctggtatgccattagttcttaagcctagaagtggggagaaggtcccctgcccgtgtctcaggatctcctgggagctctgtcacaatacacatccctaggccccactcctggagaatctgagtgagcagttctgggcccaggcccaggaatctgtattgacaacaggctccctggtgattctgataatcaatcttggatggggatccaggaggggaccatacactccccagatggggagccactgccttgctgctcacactcatggcgttatgacttccacaactgctttatccccacctctccacacaaactagccgacgtcatatgggggatctgctgtggtcacaccttccttaacctcctgggcctcaatttcctcatgatgatggggataacaatgatacttacctcctagctttgctgtgaagcttcaatgggattatagatgtaagacactgggaacaaagcccggaacagggtaaggattaagggctgccattacttccccaaggggaggcagggaggcccccaggagtgggctggccgggcgtgttgggaagggtggtgtaagaatgccaggggaagcttctctatccggcttcccgggttccagcagggagaaccagcagcagcctcgtggccaaggccagagtcccagggccaagtctgtcacgtgtctgtgcgatgacttggatgtcatgagaagccggatgtgaccagatggaagggtgctctgcaccctgtggtgggctcagtgtgactgggtctgtgtctttcccaggacagataagaggcagcatttcctgtgtgttgagtttcttcttggtcttcatggcctccaggggagctgcatctggaagtctctggcagaggctggaaaaggaatcagaactgtgtgtgtgcgtgcgtgtgtgtgtgagcataagtgttgcggccacttgtgtgaatctatgtatatggggttcggggctaggatggatgtgtgttacaatgacatgaggctgtggaggtcagagagagggcatcttctgtgcatgcctctgcacacatgaccgtgtgtgtgtttttgcccatgcataatggtacaagtaggggtgaggctggtggctgtaaactgagccactgagtcaccctcccttgaacgaggggaccagcctctgtgcatgcccatgagttggtcactggctgtgggtcacttccaagaggttgctgaggggtctcctaacctcccaggcctcaccctcagcagctgggggtgggtgcaccagcctgatgaggggatcttgtggtcagcacacagctgtgtatgaggcagtagcccttgagcatgtgtgagcatgagtgtgaacgtttcccaccaccaagttgcagccagaaaggtggctggcaaagcacagctcttgccctgctagggccctcgagcagtggctggggtcctgctagcagctcccacgccacccacaaaaacccctcttggcctccacagtgtagcctcaacaggacccagtgtaccttccggaacttcaccagtgctacccaggcattgacagagtggtacatcctgcaggccaccaacatctttgcacaggtgccacagcaggagctagtagagatgagctaccccggcgagcagatgatcctggcctgcctattcggagctgagccctgcaactaccggtgagagccaccccaagcccacccggccaggccctggcaccgagagacagtggcatgttacggttgggagcacagcctgccagggttccaatcctgcccagccacttaccggctatctgcagcacagttttctgtgcctcggtgtcttttaggtcctgtttcctggaggcagagcctgaggcagggatgtattgaagagctcgcgaagcattgagagaactgtgttaggaaaagtctgcagggaaagtgggataaggaaggaggatttggaacatgtaggaaaaggagaaaatagaaaaagaaaaaggaaaggctgggcgtggtgggtgggtggcttacccctgtagtcccagcactttgtgaggtggagacgggaggatcgcttgagaccaggagttcaagaccagcctgggtaatatagtgagactccagctctagaaaatagtaaaataaattaaattttaaaaggaaggaggaaaaagttaaacaaggatgtggtcttaggtaaagtctaggctcagcttgatctgtgggaggatctggagcataaactgaaccagagtggtcctcccttgaaggaggggaccagcctttctgcgtgccccgtgagctggtcactggctgtgggtcattcccaacaggttgatgaggtgtctcctaacctcccagacctcacttctagcagctgggggtgggtgcaccagcccgatgaggggatcagggtgggcacccaggcatctgttgcctcggttttctcatctctgaagcaagaacaataatcgtagcttcttcatagggtcattgagaagagtaaatgagtaagttcatggcagcacctagaacaaggctatgaggctgggcgtggtggctcatgcctggaatcccagcactttgggaggctaaggcaggaggatcgcttgaggccaggagttcaagaccagcctgagcaacatagcgagacctcatctctacaaaaaatcaaaaaccagccagatatagtcatgctcacctgtaatcccaactactcaggaggctgaggagggaggatcacttgagtccaggaggtcgaagctacagtgagccatgatcacgtcactgcactccagtctgggtgacagaatgagaccctgtctcttaaaaaaaaaaaacaaaaaacaaaaaaacacgaggttataaaagtgtttcctgtaaatattctttttccctaacaacctttaatatgagagactggcagaatgagggtaatggtaaccctggaggtctaggtcttcttgcaattgacccacagattcccacctccttggcctcccagctcctggcaaaccaaccctgggcctaagcatcaggtgttgtcccagtctctaggacaaccagaaacggggggaatctccattctatcccctcctaacagcctccagagagctcagctggcagaagcacgtgggaaggaggcctgaggatgggcaggaacactgctgaggcctcagagccccttgtcggcctcctgacccagcctccaggtgtggggtatgccacacccacctcggccccaccccaggtttcagccagtcctgtttctgagattcgatggtatcctccttgatctggggcctccaatgctcacacttcaggcctctgtggaaaggagcttttagctgaatcttaatgctatgggcacgtgacaggcttccaagctcacctccgagggactggggttgcaggcagctctctgaactcagaaccttccagaacctctaatgagaattcttcagaaagctctggggcctctgtcccctcaaaatgcacaggtgcaaccggacatgtggctcacgcctgtaagcccaacactttgggaggccaaggcgggtggatcacctgaggtcaggagttcgagactagcctggccaacatggcgaaaccttgtctctactaaaaatacaaaaattaaccgggagtggtggtgcacatctataatcccagctacttgggaggctgaggaaggagaatcgcttgaaccccaggggcggaggttgtagtgagcagagatcgcgccactacacttcagcctgggcagcagagtgagactctgtattaaaaaggaaaaaacaaatgcacaggcacacatgggcagggttcttgcacacaatgtcaaataattcaaggccactaagcaggacagagcagcacatatgtcccattgtacagattagcaaaaggtggttcccataggtggaagatttgactgatggcgccctgctgatgggataccctcttccttgagggccaccccatggctagctggtcacagtctgtgtttcagcctcactgtcttggccagggtcctttgctcagggcacacccgccaaccacacctgccataaggctagggataccaaacagactactgtaatgtccacaagcacattcatctcacccgctcagctgaaagagagctgtaacactgcaacttcaagtgcatggcccatctgctcagtgagaacacgcccaggagcgagagtggggcaggaaagtgaacctgctgtcaactccctacccatccaacgggatcccagtgttcaagggcctgtgttccactcacagcccagccccgaaagctgtgccggccacctcatgggtagctgggctgggctgggtatagctggcctgttgtcaacatagcaccctccaaaaggagccccatttgagtcatatgggctgagggtgagggacgggtggtcccccaagggaagctaaagaactgttagcagaaacagggaaaatagctggctgatgggccactaaaacccccaaatattggccacataacttctgccatgtgcgaggggtagggggtaagtgtaatgaaagggtcaaggcttggggtctggggttagaccacctagactcaaatcctggctccatcttacaagctgtgtgaccttgaacaagtttcttagccttgctgtgcctcagtttccctcctctgtaaaataggggagagaacaatacctaccctacatggttactttgaatattaagtgaattaatatgcatgagtaactgaccctactactgggcttaataaataatagttataactattacttttataatagttttataacccacattttaggctgggctcagtggctcatgcctataatcccagcactttgggaggccgaagctggcagatcgcttgagaccaggggttcgagaccagcctggacaacaaggcaaaaccccatctctactaaatatacaaaaattagccaggtgtggtggcgcatgcctgtaatcccggctactcaggtgaccgaggcacgagaatcacttgaacccggaaggcagaggttgcagtgagccgaggttgtgccactgcactcccgcctgggcgacagggggagactctcttaaaaaacagcaacaaaaacaaaaaccccaatttgacaaggaatgcaaattcaataattatgccaacatttactgggcctttctcgtccctgtaggtgtcaggcactattctaagcactttgtgtgttaaaattgctttcactctggcaacaaagtcatgagaaaggagctgttattttccccttattttatttttttaagagacagggtatcactctgttgcccaggctggtctcaaactcctggcctcgagtgatcctcccacctcagcctcccaaagtgctggaattacaggcatgagccaccgcgcccagccttccccatcattttatagttgctgtaacctgcccagagaggttaagtaacatctctgaagtcacacagttggtgagtggcagagctagcagtctgggccaggcccaccccgcatcactctattgcctcatcagaaagggtgatcgtcatcttccctccctacccacctctcccaagcctatttccccagccctcggcaggtcccagtgaaaggtaccatccaggcaccttagcatagagatctcagccaactgctctctgagctcttcctcactcccacagttgactggtcatctgccttcctgagtcagccttggacacagctgtgggaatgtgcctctctgctctcccggtgctgggccacagacactgtggcccctgcttcctccctctctctctgactccatcctgtccccctcctaacatgacaaacactctagaagcagcagctgcagaattaggaaaatgtgagccgcatgtggaccccaacaccaaactgcctggacttgaatgtcagctcagtatgtgactgggcatgctacttagcctttctgtgcctcagtttcctcacctggaaagtggggacagtgaaataaccacatagcattattgggggattaaatgagaacatatgcaaagtacctggtgcaatgcctggcacatagtaaacattataggagcatttttttaaaaaggcttttgggccgggcatggtggctcacgcctataatcccagcactttgggaagccgaggcaggcagatcacctgaggtcaggagtttgagaccagcctggcaaacatagtgaaaccccatctctactaaaaatacaaaaattagctgggtgcagtggctcacgcctataatcccagctactcgggaggctgaggtaggaggctgaacccaggaggcagaggttgcagtgagctgagatcatgccactgcactccagcctgggagagagagcgagactccatctcaaaaaaataaataaataaataaataaataaacaaataaataaataaataaaaaggcttttggccaggtgcagtggctcacttaatcccagcactttgggaggccaaggagggagaatcgcttgaggccaggagtttaagaccaacctgagcaacatagtgagaccccccatctctacaaaaaacaattttaaaataacaaaattagcccggcgtggtggtacacacctgtagactcagctactctggaggctgagggggaaggatcacttgagcctcggagtttgaggctgcagtgaaccaagatcacaccactgcattccagcattccagcctgggtgacagagtgagagtaaaatatagagagagagactttgttgttggtggtggtggtggttttttttttttttttttttttgagacggagttttgttcttgcccccaggctggaatacaatggcataatctccactcactgcaacctctgcctcccgggttcaagtgattatcgtgtctcagccccccgagtagctgggatgacaggcatgcaccaccacacctggctaatttttggtttttggtttttggtttttggttttgttttgttttgtttttttgagacagagtctcactctgtcgcccaggctggagtacagtggcactatctcggctcaccacaagctccgcctcccgggttcataccattctcctgcctcagcctcccgagtagctgggactacaggcagccgccaccacaaccggctaattttttgtatttttagtagagacagggtttcactgtgttagccaggatggtcttgatctcctgacctcatgatccacccgcctcagccttccaaagtgctgggattacaggcatgagccactgtgcccagcgtaaattttgtatttttagtagagacagggtttcaccatgtttgccaggctggtctcaaacttctgacctcaggttatctgctgccatagcctcccaaagtgctgggattacaggcatgagccactgcgcctggcctagagagactttttatcgaggaatagttttagatttacagaaaaaccacagcctccaactcctggactcaagtgatcctccctcctcagcctccaaaagtactaggattacagatgtgagccactgtgctggcctttgctctgtactttggaaaggagtcactaaattcagactacgctcaggggaaggggaagggagtggccagtgggaaaggagcattgagctccacccctcctagagagaagaatatatattatttggaattcttctgtaaaggaagatttgtctcatctcctccatttatttatttattccatcatttattgacacagtatggactcctgtagatttaggttgtaatccaattccttgttatctattctcttgcttaaattcttctagctttggccactctgtcagttagcacctgtgtgcctttgatatgtcctcacctgggtgggttttttaacttttgcctactttctggcactacaggatgcccccgccctagaatcagccatttctctaaagagctctgtttggttttttggttgttttgtttgtttgtttgtttttgtttttgttttttttgagatgggatctcactctgttgtccatactggagtgcagtgacacaatcgcgtgcccgattaatttttttattttgtagagatggggtctccctatgttgcccaagctggtctcaaactcctggctcaagcaatcttcccacttcagccccctaaagtgctgggattacaggagagagccaacaagacttgcccaagctctggttttttaaattgaagaatggtatttagaaaccaagatctgggccaagcatggtggcttatgtatgtaatcccagcactttgggaggccgaggtggaaggattgcctaagcccaggagtttgacaccggtctggccaacatggcaaaaccccatctctactaaaaatacaaaaattagccgggtgtgttggcatgcacctgtaatcccagctactagggaggctgaggcaggagagtcacttgaacctgggaggcagaggttgtatagagccaagatcatgccactgcactccagcctgagcaatctcaaaaaaaaaaaaaataaagttaaataaaatttaaaaataaagaaaccaagatctgggcatatataagcattattattactatggttgttgttgtttcagggattatccaactagtttctgccctggaaagtctttcctgacctctgaccacacaacagtggttatactgcttcctgctaggatgctctatttcccagtcttttctggaggctcactggtctctgtctgcatgcctggctcccagcccagcagagatttctgtagggaaacacctggctctggaatcagaggcagccagtcctgggagcagcctctctgggtgaagagtattatcaacaagcaaatagttggcacgcacgtggagaccaagagcatggcgcgggcaggaggggacctggccacaccccatgcagcctcctgctcctgggctgcatctgaccaagacagttccttgggaacactgtgtccccatgccctggggcgaggtctctccttcaagagcagggcctggattgagctggtttgctctgctctgttcttttcctgtggccacagccctgatcccacagtttatagactccatggtgcccgcccagagctatttcttccctctggggctttgcctgtgttgtgtccctgcctggtgagccctttctcctccctaccctgtagacttagccatcgcttacttgttcataaagtctcagctcaggcctcccctcctccaggaaaccttccctgactcgctccccactctccactgggacttgggtgtcacttctccatacttatctctgtcgatgctcttatcgcctattgtaatttattcatcaaatatttactgagtgtctgtgtgctctgtaccagaccctgggcatggagctgtgaacagtagcagccaagattttttgagtattacagtatgctaggcatccaccccttgccgcagtcatgtaggtagtattatctggtgttacaaatggggaaagtgaggcacgaagacgtgatgtaaccatcccaaagctcaccagctgctaagggacacagccagaattgaaatcaagcaggctggctctgtggcctgtgctcttgacctctgagctcttctccttccagacagacaaggtcatgctccctccccgggcttatgttctaagcaggagacagctaagtgagcaattaaatcaagaagataatttcaggccaggcacagtggtggatgcctataatcccagcatttagggaggctgaggccagaagatcacttgaggccaggagttcaagaccagcctgggcaacatagcaagaccccatctccacaaaaaattttacaaattagctgggtgtggtggcacatgcctgtagtcccagctactcaggaggctgaggcaggagaatatcttaaggccaggagtttgaggctgcagtaagctatgatcacgccattgcactccagcctgggcaacagagtgacaccctgtctctaccaaaaaaaaaaaggaagctgatttcagattctgatgtatctgataaagaagataatcaactggttgaagggccaggtgcagtgactcaccctgtaatcctagcactttgggaggccaaggcaggtggatcacctgaggtcaggagttcaagaccagcctgactaacatggtgaaaccctgtctctactaataatacaaaaattagccaggcgtggtggcgcatacctgtaatcccagctactcaggaggctgaggcaggagaatcacttgaacggggaggcagaggctgtagtgagctgagatcatgccactacactccagcctgggcaacaagagtgaaactccatctcaaaataaataaataaataaatataaataaactggtggaaaagatctagagtaactaggtagaaaattctattactattagtaataaagtactattaactaatagttctagtccatcactttgcataggggttcagggaggcctcagagcagataaaagctgaaggatggggagaagccagtatctgaagagctggttagagaatattccaggcacaaaggacaacagaggcaaaagccttgagcttggaaacatctagagtgtcgctggagtgtagggaatgagacatagaaggccagcatagggactttgcactttattctgtgagtgacaagaagcctttggagggttctcagaaagggagtaccgtgctctgactcacaaatttaaacaatcaccctgactgctgtgcagaaggaagactttaaggatgaacagaggcagaggctccagcaagaatccagacatgagatgctggtgacttgggccagggtgggagcgtctgaggtggagacaggtggacagactaaagtcacatcttggagcctggcgtggtggctcacacatgtaatctcagcactttgggaggctgaggtgggagatcacctgaggtcaggagttcaagaccagcctggccaacatagtgaaacaccatctctactaaaaatacaaaaattaggccaggcatggtggctcacgcctgtaatcctagcactttgggaggctgaggtgggtggattgcctgaggtcaggagttcgagaccagcctggccaacatggtgaaaccccatatctactgaaaatacaaaaattagctggttgtggtggcaggcacctataatcccagctactcgggaggctgaggcaggagaatcgcttgaacacagagggcagaggttgcagtgagctgagatggcaccacttcactccagcctggggtgaaagagcaaaactccatctcaaaaacaaaaaaaaaaatagttgggcgtgatggtgcctgcctgtaatcccagctactcaggaggctgaggcaggagaattgcttgaatccaggaggcagaggttacagtgaaccaatatcacgccattgcactccagcctgggcaacagagcaagactttgtcaagaaagagagaaagagagaaaaagagagaaagagagaaaaagggaggaagggaggaaaagaaaagagagaaagagagaaagggaagaagggaggaaggaaggaaaaggaaagaaaagagagaaagaaagagaaagaaaggaaggaagaaagaaagaaagagaaggagaaagagaaagaaaagagagaaagaaaaagaagaaaagaaagaaaaagaaagaaagaaaagaaaaagagagaaagagagaaggaaagagaaagaaggaaagagaaagaaagaaagaaagaaagaaagaaagagaaagaaagaaagaaagaaagaaagaaagaaaaaagaaagaagtcacatcttggaaggagaggggggttgataggattccactctctgtcctctgccacactggaagctgcaaaaggcagccctgtcttgttttgctcagtgtccctagcctagcacccacctcaacaaacatttattgggtggaaaaatgtggtttcttcctgcttccccttgcaccgttgaggaaacccaagctcagaggttgagtaagcagctcaaatctgttgacagtggcagagcttgggtcggcccccatatcccatttcacagcctgtcctggacccaagtcattctgcaagtcaactagctgagacaaaagatacaggaaatggctttcttatctgaaaacacgggaaaataacacctgcccttgtggggttattttgagaattaaatgagatcacgaatacagaaagattcagcacaggcctggcccataaaagtcactcagtgaatgtttgctgtggagcataaggcttcaaagacaatactgcatggcaggtgacgttttatgtgtgtgcattatttgatgtacttactctcattccttcctgtttttatttttaattttttacaaattattattgtttttttgatacagagtctcactctgttgcccaggcaggagtacagtggtgcaatcacagctcactacagcctcaacctccccaggctcaggtgatcaatccacatcagcctcccaagtagctgggactacagacactcaccactactcctggctttttattttattttattttttattttttgtagagatagggtctcaattcgttggccaggctgatctcaaactcctgggctcagttgggtgcagtggctcacgcctgtaatcgcagcactttgggaagccaaggtgtggggatcacccgaggtcaagagttcaagagcagcctggccaacatgatgaaaccccatctgcactaaaaatacacaaattagccgggtgtggtggcgggtgcctgtaatcccagctactcaggaggctgaggcaggagaatcgctgagattctcctcagcctggagtgagatcacaccactgtactccagcctgagcaacatagtgagactctgtctcaaaaacaaacaaacaaacaaaactcctgggctcaagtgatcctcccactttggcctcccaaagtgctggaattacaggcataagccaccgctcccaacctcctcttatttttaataaataaaaaaagaacaacatagaaacatcaagagatattttttaaagctgcttactttggagacttgagaacatgcacttcgactgaacagagtttgatgaactccagcacaccagtcatcagaagaggcaaggaggaattctcccctgagccttctggtgggcccaggagttcctcggcttgtgtctgaaggcccctgcctcagtcttcaatgagcttctcctctgtatctgtctctcttctgtgtcttctaaggatgcttgtcatttgatttcgggcccacctggataatccaagatgacctcatctcgagatccttagcacatctgcaaggaccctttctccaaataaggtcacactcataggttccggggctgaggacatggatgtgcctcttttgaggtgtatacgagacagatgaaaacatctgagaaagttctttttcatttttgttgttgttgtttgttgttgttttagagacagggtctcactctgtcacccaggctggagtgcagtggcacaatcatagctcaagcagcctcgaactcctgggctcaagcgttcctcccacctcagcctcccaagtaactgggactgcaggcatgcaccaccacacctggctaatttttgtattttttgtagagatgagggtctcaccatgttgcccaacctggtctcaaactcctggcctcaagcggtcctcccgcctcagccttccaaagtgctaggattacaggcgtgagccaccacgcccggccagaaagttctttttcataactcatggccaaaccagagagcctgagccccaactccagagaaactctcttcccctgctttcccaagggagcctgggaatctcccctctggtttggaccagaggatggacagaatgacctgttgctcgcctctccctttcggagcccctccaaggaggaaatgaaaggtggacggcagacagtcgggggaggcattgcctgtggtggaacctgccctgcagctgatgctgtttcttttaggaacttcacgtccatcttctaccctcactatggcaactgttacatcttcaactggggcatgacagagaaggcacttccttcggccaaccctggaactgaattcggtgagttttggtttatcgtggggccagagccatgaggctttaaccacccccacaatgtgggactgaaagaccatcagctgttgcagggtgggactgaggggggaccaaggcatcaagaggagtggctgctaccgaggctctactgtgtgccaggggaggccaggccaggcgcttcctcagccattcccgcccacaatgttcagaatccgtggggtagcaactggtgttcccattttactgatgagcaaagtgaggacttggaagcagcacagcttcgtggtcaagagctcaagcttcagccaggcgtggtggctcatgcctgtaatcccaacactttgggaggccgaggcaggaggattgttcaagcccaagagttcgagaccagcctgggcaacaaggtgaaaccccatctcttaaaaaaaaaatacaaaaattagcgaggcatgatggcacgtacctgtagtcccagctactcaggaggctgaggcaggaagatcgcttgagctgggaaggtcaaggcagcagtgagccatgatcacaccactgcagctccaccatttacttgggtggtgttcctgagctccagagcaaccttctcaaagccttagtttccccaatcatagattagtatatagtagcagagcagagcatttagtatagtaaatcgtatctaccgtgtgagccatgatgatgagtaaatagtataagccttgtgagtcattacgatgtaatgtggtaaatcgtttcacctgcctaggaagtagggaatgctccatatatgctgagtattctgagcagtttttaaacaacttgtccaggatcatgcagttaatacatggaccaaaagacattgcatgttcttacctgtaagtgggagctaaatgatgtgcacacgtggatatagagtgtggaaggagagacatcagagacttagagggtgggagggtaggaggcaggtgagggacaagaaattaatgagtacagtatatatgattccagtgaaggttacactaaaagcctagacttcaccactgtataataattccatgtaacaaaactgcgcttgaaccccttacatttatacaaattagaaaaagaaaagaaatacataacagtctcttagtctctctgcctctctggtgtacagtttgtttgtttgttttcttgagacagggtctcactctgtcacccaaactggagtgcagtggcacggtcatggctcactgcagcctcaacctcctgggctcaggtgatcctcccacctcagcctcctgaggagctaggattgcaggtggctaattttttgtagagataaggtttcatcctgttgcccaggttggtcttgacctcctgggctcaagcaatctgccctccttggcctctcaaagtactgggattacagatgtgatccactgcgcccagctgtacagttcttaaagaaagacagagacacacagagagaagctgaaggagtccatggaagtgaggaagtggggcatggtggatgacggatccccctccctcggggctcatgtgttgcactgacccctagagaggggctggtggactcaggctggctgtggttttgcggcttgtgagccgggcacaggtgggagtggatccctcctcccatctctaggttctgacctctgcaaccaccaagaggcaggctctcattcagcgaccatcggggccgctggccaagagggcaggtgagctgagtgcctttcacttagcccccatgctgctgagagcactgccacagaggtgccagtcaacttactcccagaggcagatggttatagtcagggagccagctgctgtatcagaagcccagcaaaagcacttcctcactggaagacctcagacaagtcccttcacttctctgtgcctcagtttctccatctgtaaaatggggacaatactagtacctccatcatgcagcccttgtgagcatccgaggagctcatgtttattttattttatttttggagatggagtctcactctcgctcaggctggagtgcagtggcgcaatcttggctcactgcaacctccgcctcctgggttcaagcgattctcctgcctcagcttcccaagtagctgggactacaggcatgcgccacaatgcccaactaatttttgtatttttttttctctattttgatatggagttttgctctgtcgtcctggctgcagtgcagtggcgcaatctcggctcactacaacctctgtctcccaggttcaagcaattctcctgcctcagcctcccgagtagttgggattacaggtggccgccaccatgcctggctaatttttgtatttttagtagagacgaggtttcaccatgttagccaggttggtcttgaactcctgacctcaagtgatctgcccgcttcagcctcccaaagtgctgagattacaggtgtgagccactgtgcccggccaaggagctcatgtttaatgaggcccttagcacatcaccccgcaggtagcaagtgctcaactagcccttattgtcctaaccagagggactcaactccacgtagctcaggaccgtggtgcgtgggagactgggtccagtcccttcccttgagaacagtcaagaggggaaggaagacagacaataaaagagcaatcacacaaatgaggcaggtactcagaaggaaagttccggggctaggaaagtgtacaaccaagaccctgacacctcgtctgagccatcagagaacgtttctggaggaagtgatgctggttgagatctgagggaagagcatgtgtttctaggggaagggaaggggcagagacagcattccagagctagggaatagcactccagattgaggaacagcattccaggtgagagaacagaattccagagcaaggaacagcactccaggtgagggaacagcactccagagtgaggaacagcattccagagtgagggaacagcatttgcaaaggcatagcaggaggaaggcgtgcagaagctcggaggcattgaacggggacagcgagggcacctgtggtgtgaggtggggtggcatgggtgggccgtggccatgctatgcctccttgatctacctcctgatcagaaaagagatcacgggaggcaagagacacctagggaggaggctacgtaagagcctgccttagagatgatgggggctttgcagaaggcaagcagtatttgaggactgagtttttgcaaagtggagccagcctccttggcggtccctggaggtcccctggccggagggagcttggagaagtgggtagtggggtctcctttctgcctcaggagaaagttcaggcagccctcaccccaccctccccacaggcctgaagttgatcctggacataggccaggaagactacgtccccttccttgcgtccacggccggggtcaggctgatgcttcacgagcagaggtcataccccttcatcagagatgagggcatctacgccatgtcggggacagagacgtccatcggggtactcgtggtatggccggagcccaagggcagtcctagagggtctgagggtgggagcccacctgtccagggccaactgcccttggcctgggaggaggggatctgggccccccagccctggccttccttccttttggctggaatccccccagggtggcccaagctttaggggaaggtgagccctctggcgccccctctggcgccccccctggcacctgcaggggtccacagccctctgtccccaaatgcttgatagaagggaggtgcagaaagggcttcctggggtgaccagtgtccccctcaagcaacccctctaaacacaggacaagcttcagcgcatgggggagccctacagcccgtgcaccgtgaatggttctgaggtccccgtccaaaacttctacagtgactacaacacgacctactccatccaggtgggaaggtggtgcacgcctcatgccccggggcccctgtccgggtttatggggccaaggcctcagtactccgggagagctggccccagcaagtctggctctgctgggcctttgtaggttgccacggggcaccccgggcctgtgggaccagtcactttcctgggctctctcaccagggcctagggttggccacttctcatccccacattggcaggtgtacccctggggaagcccaggggattatggggatcttactctggggtttcccaagatgaaaacaaaaaatagcagctaacaccatcaagcttccattgtgtgtgaaatgctgtgcgaagggctggaacacattccatcgtcatttaatctttcaactgcctcctgccatgaatctacaatatagtaatgacagcagcatttattgataaactaataatagcagggttaccatgtgttaggcagtcactgttgtaagtaatttacatgtatattacatcatttaactttcacaacaaccctaagatgtagatactattatcattcccattctgggaatgaggaaattgggattgacagaccccagttcaaatgcatcatcaatttacctgagaagtccctttttttttttttttgagatggagtctcactctgtcacccaggctggagtgcggtggcgtgatattggctcactgcaacctccgcctcccaggttcaagcaattctctgcctcagcctcccgtgtagctgggactacaggtgcccaccgctacaccggctaatttttttgtatttttagtagagacggggtttcaccaagttggccaggctggtcttgaactcctgacctcgtgatccaccgcctcggcctcccaaagtgctgggataacaggcatgagccaccgcacccggactttattattatttttttaaaagagattgctgggcatggtggctcacgcctgtaatcccagcactttgggagtgcgaagcgggtacatcacttgaggtcagaagttcaagaccagcctggccaacatggtgaaaccccgtctctactaaaaatacaaaaaaaaaaaattagccaggcgtcgtggcacacgcctgtagtcccagctgtgcagggggctgaggcaagagaattgcttgaacccgggaggcggaggttgcagtgagctgatatcacgccactgcactccagcctgagtgacagagtgagactcttgtctcaaaaaagtaaaataataaaataaaaaagagagacagggtcttgctctgttacccaggctgaagtgctgtggtgccatcatagttcactgcagcctcgaactcttggattcaagcaatccgcctgcctcagcctccctagtagccaggaccacaggcatgagccactgtccctggctaatttcttaatttttaaaattttttgcagagacagagtcttgctatgttgcccaggttggtcttgaactcctgggctcaagcaatcctcccactctggcctcccaaagtgctgggattataggcatgagccactgcgcccactggaagtccctctttgcatctgccttcaatcccccttgctgtagctggaggcttccttctcatcctgatctccagagttaacccagacctgccactagtcctggcccccttggagagggcagactgaatccttgcaaaggtgacaaaaatgaccactcgctgatacttcctctccagcccagtctgccttgccatatcagtgcactgagtcataacaagagggcagcccagtgcctgcctcagtgtctgggtgcccgagcatggcatggtttgccctttccccgtaggaaatgaccctcctggtgcccacctgcccacccattgcctggctggtttggccacctcgcgtctggagggacttctgcccattatggagaactctagccgtcatctgagcctctggagggacagacagacagacaggacagtacagggaggtgggaaacacggagaagaaggtaccagccccagaaacctcattccaggaaaactgcatctctcgtttcttccggtgtggtagccacccaggccagaaaacagccaagagccaggccctgatcgggagctctgcccatccccatggacaccccaaccaggagcaggcttgagcccaccccagcctccatcacagggcctggaaggactcccactttccagatgagacagagaggtctacaagaatataagacgccttggtggggcgtggtggtgcatgcctatagtcccagctattcagaggctgaggcgggaggatcacttgagcccaagagtttgaggatgcagagagttatgagcgtgccactgcaccccagcctgggcaacagagtgagaccctgtctcaggaaaaaaaaaaaaaaaaaaaaagaggccgggcgcgatggctcacacctgtaatcccagcactttgggaggtcaaggtgggtggatcacttgaggtcaggagttcgagaccagcctggccaacatagtgaaacctggtctctactaaaaatacaaaaatcagccgggggtggtggtgcatgcctgtaatcccagctactcaggaggctaaggcaggagaatcacttgaacccaggaggttgaggttgcagtgagccgagatcatgccactgcactacagcctgagcaacagagcaagactccatctcaaaaaaaaaaaaaaaaaaaaaaaaagaatgtaaaacacttgcccgaaaccgagctctggctcctcctggccatgccgtttaatctgccttccagccctgatttcctgccctcagagagccacagactcgttaggggtaatagaaaggcaggacatagggacctgagacggagcccgggctgcaggaggaacagaagaggactcaggagcgcaggtgtggaggggcggggccgagtggagagaggtagggaggagctggccagggctgtgtccaggagcccggggtagtcaggacctaggaaactggataggcaatgaaacaccaagaaccactgcctccatccgtgcagcgcttcctgagcacctgatgtggccctgaatcctccctcccaacctcaggagacaggtgtcctcagcaccctgtttcacctatgagtaaaccaagccccagagggtcatgactcgccctaggacacatagctggtctctgagtggactgaaaccaggtcagaatgacctgaaagcccagtatgttggggccgagtgagtggagactcatcacgtccagcctcctggaggctgcctgggagccctcctcttcctcgccccaccaggagacattctgcagaccagtgggccactcacttcctctgtcatcagctgtgcattaagacgcccagagatcatccttctcctggctttccctgggcaattccctctgggaggaaggagcacagagccagcctgcctagcttcctcggtggcctgtcagggtgcatctgtgtcaggtgcttggacggaggctggcatcctcataatgagagctctctgagcattggctttattattaggggcaagccgctcttccccatgttgaagggtgaggaccccagctctgaatggtgggacctgggatactgcggtctggcctgggtccctctgtggggtccagagacctgctgggaagcccaaaagcgtccaggactgtggggtctgtagctgcagccagtcatctcaccacagcttctcagccctggagcacctccaccagctcacctacctcccttaacttgggcatcacttctctggacacccctggtgctggaatggggacatcactgaccatgcctgtgttctctccttatgaaccccctaccctccccaggcctgtcttcgctcctgcttccaagaccacatgatccgtaactgcaactgtggccactacctgtacccactgccccgtggggagaaatactgcaacaaccgggacttcccagactggggtgagcgggggcacgggggatcggcactccagccatctggggccacagaggctctgaccatagaggaggaggcagagctcagtgccctcagcagagtccagagatgtgcccagggtggctcctccacagtctgaggtccctcctatgatcccctcccaggcctcctttctgcaggagcccagccttctctctgctcctcaatttcatgaagcatgggcttgaaacacataggcatagaatgcacgtgtccttgtgggcctgtgtctgtgtgccacacaaatgctcacacatgtgcaaccctgggcatgtggctgctggcgagtgtgtgcctgcactcatgtttccaagtgcacaagtgcaaaggcatttccatgcttgcgtccaaatgcacaggagctgttcgtgactgcagtgggttgctgtatgtagtttatgcacaggcacaaatcacttccagggtctgcatttgtgcactctggcttttgtgcacgtgtgtgtgtgtgtgtgtgtgtgtgtgtgcacgtgcatgtatgtataaggccacgtgtccatcttcagcatgtgtgttcatgtctatgtgggctcattgggtctctctgcaaggcgctgggtggaaggggagtgtgaggaagccattagcatgatggtagcctccaaggactcgaaacctggagtcacagcaggaagaagagccctgctgggctcacaaccaattggagctggggcctgggagccctggcggtctggagtccaaccaccgaagaattttgtcagcagggtgcagtggctcgtgcctgtaatcccaacactttgggaggccgcggtgagcagatcacttgatgccaggagttcgagaccagcctggccaacatggcaaaaccccgtctataaaaaaaaaaaaaaaagaaagaaagaaaaaaaaaagtaaaagagagagagaataaaaagaatgctgtcagccggagactcaccacttacaaccaacacaaactaaatgggaaaacgttattccttccagtcacccaccctttgttcatgaccccataaccctgtccaccaggcagggatggggatggccggcaaagggaaagctgctgggacccccctgagctgggccccaggccaggctggggtgaaatggctggaggtcgggggctgggtggggagcggtgatttttcatgacacctcctcctgccacctaaccacagggccaggagagcagaggggccagccagaggctcagcagggaacaggggcacctaaaaagcccccttaaacctcttggccgcctttctgtctcctgcgcagcccattgctactcagatctacagatgagcgtggcgcagagagagacctgcattggcatgtgcaaggagtcctgcaagtgagtgcgggtgggcgggcacagcagcgggcaggcatggaggggcatcactggcagggaccacaacaggcctggccttctctttcagtgacacccagtacaagatgaccatctccatggctgactggccttctgaggcctccgaggtgagacagttgggggccaagctcctggctcccacctttggctggggacaagtctgggcataagatgtgggctatttggaaatttgaagggggtgcctttttccctccctccttccttccttctctgtttccctccttccttccttctttctctgctttattccttccttccttcctcctctcttttcccttcctccctcccttctcccttccttccttccttctttcttccttccttcattccttctcccttccttcctccctcccttcttctttccttccttcctttctccctcccttctcatttccttccttctttcctttcctccttccttctccctccctccccacttctgtttccttctttctttccttccttcctcctttcttcctccctcccttccttctttccttccttccttctttccttccaccaatattctcccaggcactgtgctgtgtacacagcacagaattagacagacataatccttttaataggagagggccaagatcacaagcagaaataaaatcgtttcaaagtgtgattatggctgtgaaataaataaacaggttatgggagagagtaactgcgggaaactactttatttttgtatttttactttattttttatttttggagacaggggcttcctctgtcgcccaggctggagtgcagtggtacgatcacagctcactgaagcctcgaactcctgggcttaagtgatgctcctgcctcagctgtgatcctcagctgggaccacaggcacatgccaccaggcctggctaattgttaaactttttgtagagatggagtctcgctatgttgcccaggctggtcttgaactcctggccttaagcgatcctcccacctcagcctcccaaaatgctgggattacaggcatgagccaccatgcccagcttctgggaaagcatgttagaccgagtggtcagggaaggcctctctgaaaaggtgacattggagctgacacctggaggcagaggctgagccatcatgggcagagctggggaggattccgggcagagggagcaggaagtgtgaggaccagaggtgggagagagccgggcagggtggccaggcccgccgaggaagagtctggaggcccgagtccttcctcccctagaacagcagccacagcttccactacgaccttcctcctgctcctcatccaaattgtgattcccccgggggcctcaggaagggacagggctgtggtctacctcccccagggaacagagccatgactgggagggatgctgcagatggcaacttttgcaaccaccttcttgggttccaggactggattttccacgtcttgtctcaggagcgggaccaaagcaccaatatcaccctgagcaggtgagcctgagcctgggcggggctggggaagacagggaaggggtccagaaactcggggcaggagtttggacacaggacagctcctcagacacattctcacatgggtcagaccgaggagcaagtcttgaggaggaggcactaggagtgagagagaggaaaggcagccaaggggactctgagtctaccacctgctaaggagaagcctgtgcttccctctgtcactgtgcatccaaccagccatccattcatcctccatcatccacccacgcgcccagccatcctccactcattcatcctccattctcccacccagccatcctccacccattcatccctccatcatccacccacacacccagccatcctccactcattcatcctccattctcccacccacgcagccagccatcctccacccattcatccctccatcatccacctctccattctcccacccacgcacccagccatcctccgtttattcatggatctctccatccattcaacacaaacactagttgagcacaagaaagacacacagtccaagctagcaggagtctagggggcaaacatatgtaaaaagggctcaaggagaggagggtctgtacaagccccctactctaggagtacagcagggaaggagcctcagtctgcctgagagataagggaggtctgcgtagggaggtggctttgagtgaactctccaaggaggagtaagtgctgttcagataagaagaggtaccaatgtccaggcagaagacaaagctggaaagcctggaggcacgagacagcacagcctgaggacgatcaggtgggaggggatgcccacacagccacccttctctgtcccaggtgcagtgaaggcgctcaaggctcagtgaagagctctgtgcggagtcactccgtatagcccaggccaccctgatggcacaaagtggggagctcagagcagatctttggggctgtcccaggccagagtgtcctgtagggaactggtagtcaggggatggagaaagggggccataggatgggtgctgggcagagatgcccagaagggccgggaagggctgcacttgcagttctcgtttggacctccccactcacgggggcacgcatgagagaagctcaggacagaggagggctggggcggccatccctggctgccttcctgtgtgcatgtgtgcacgggtgtgtgggtacatgtgtgtgcatacatgtgggtgtgtgcacgtgcatgtgtgtgcatgtgtctatgtgcgtgtgtgtgtgtctgtctgtttggaagggggatacattagtcccggcccttctcgctgcctcctgcaggaagggaattgtcaagctcaacatctacttccaagaatttaactatcgcaccattgaagaatcagcagccaataacgtgagtttaggagtctcccaataccccagccctgccctgccctgacccctgcaccctgagggtgggggaagggttctgagccctatgaaggaattaggaagatccctaagacagtcccaagttattcccctgggccaagatggtcaccccctcccgttcccacccaagaatcacctcccaggaagctgtgaggctgggctagaggcaagaatgtgtggcctgagctcaccccagctccctgttccccacagatcgtctggctgctctcgaatctgggtggccagtttggcttctggatggggggctctgtgctgtgcctcatcgagtttggggagatcatcatcgactttgtgtggatcaccatcatcaagctggtggccttggccaagagcctacggcagcggcgagcccaagccagctacgctggcccaccgcccaccgtggccgagctggtggaggcccacaccaactttggcttccagcctgacacggccccccgcagccccaacactgggccctaccccagtgagcaggccctgcccatcccaggcaccccgccccccaactatgactccctgcgtctgcagccgctggacgtcatcgagtctgacagtgagggtgatgccatctaaccctgcccctgcccaccccgggcggctgaaactcactgagcagccaagactgttgcccgaggcctcactgtatggtgccctctccaaagggtcgggagggtagctctccaggccagagcttgtgtccttcaacagagaggccagcggcaactggtccgttactggccaagggctctgtagaatcacggtgctggtacaggatgcaggaataaattgtatcttcacctggttcctaccctcgtccctacctgtcctgatcctggtcctgaagacccctcggaacaccctctcctggtggcaggccacttccctcccagtgccagtctccatccaccccagagaggaacaggcgggtgggccatgtggttttctccttcctggccttggctggcctctggggcaggggtggtggagagatggaagggcatcaggtgtagggaccctgccaagtggcacctgatttactctagaaaataaaagtagaaaatactgag

SEQ ID NO: 59 - DNA, 16030 bp, Homo sapiens; identical to SEQ ID NO: 32

SEQ ID NO: 60 - DNA, 2267 bp, Homo sapiens
ttccatattcctattactctatgttacacgggtctgtgtttggccctgtttaatcactttctgtctttgaaccctcacagcaaccctaaagggacatgagtccttttcacgaacccgtattcctaatctggacaatgacgaggagttcaagccactagcccagggtcagggagctgggaagtggcactgcttggtgtgaatcctgtcagcttccctaggtagagaggtcagtgatgaagcttctctatggcctaggtatgtttatctcttcactgcttgaaatctttcaacaaaaccaagcattacagtcagtcctggaagcaaaacagagacatagagggatatgaataagtatactttgatgggagggaggcagggtcctgtgtcttccgtgttgctgtgcacaggagaaacgtggccgaagaactgaggtggggacggggacaggaacaggcaatgccagagatctgaaggtcgcatcctcggcatgtcccttgcacactactccctcgctgtgctctctgctcccaccaatccagacaattgaacaagagactggggttgcactgggactccaggaaagccttagctgttgacagggggtgggcaggccccggggtgtggggcgcaggtcaggatctcggggcacgcggaacgccaaagggcgggagtagcaggtaatctcagggaactgggcaggcccggcagggtgaaacaagcagctcacccgggtgcacagcccctcccgcgggagccgctgcgaaagggccgtccccgcggtgtgcaccgacctgcgctcagggtactttgcgcccgacccgtctgctgcgcacagcccagcccaggaccgcgggcggctcggactcagtgggtcgggtgcaagggtggggcagggtctctgcacccggctccctcccctgactagaaaaggagctgccaactgttgcgctccaccacgccctccacgtgttccactgcctcttctcttctcgcttgggaactccagtctcacctcggcttgcaatggaccccaactgctcctgcgaggctggtaaggaacgcccgggttctgtgccttaggatgccaaattcccagacaccatagagagtgtccctgggtttgaggaggtcatattttgcgatctgagctgaagaggacttctttacttcctccgctgctttcctcttggccaagctcctgagagcatgtccctcttccctgtgcctctatgtcagagttgagggtcctaaggctcaaggctgtcctgctccacatcaccccgttggtcacgaggctgctggctgagccccaattctctaaccaggctctgagcagccggattggatgggaggcattggataggtggggacattgcctcttcagggttcagcacagaaagtcgaagtcgcagtcttcccgggctgtgcctggagcctgggacttacctttggaatacaaacggagggtgcttggttttcccagcatgaatggagaggagatgggtcttctcttcttctgctgagtgggaaaggagctctgacggctggccctgaacagagaagggggaagtggacactcattgacccactgctgtaacttctgcatctcactcacaacacactggctttttctattccttgcaggtggctcctgcgcctgcgccggctcctgcaagtgcaaaaagtgcaaatgcacctcctgcaagaagagtgagtgcggggccatctccaggaatctggggctgtggctaaggttgggagggaacccaaggctggccctgagtgcctgcttcctttgtccccctaggccgtcactgcctttccagtcttctgctctgtccagggctcctgtggggctgggcagtctctcataggaagactcaccccaatatccaccagtcgtctcctgaaaaagctgtgccatcctgaactaaggatcctctggggctggagtctgagcttgagccaggcctgctgttgggagagggagctccctggtcaagtctgctgtgacttctctctccctttttccccaggctgctgctcctgttgccccctgggctgtgccaagtgtgcccagggctgcatctgcaaaggggcgtcagagaagtgcagctgctgtgcctgatgtcgggacagccctgctgtcagatgaaaacagaatgacacgtaaaatccaggattttttttttctacaactccgactcatttgctacattcctttttttctgtgaaatatgtgaataataattaaacacttagacttg

SEQ ID NO: 61 - DNA, 2402 bp, Homo sapiens
ctcagagctcagtagaaggaacactggctttggaatgtggaggtctggttttgctcaaagtgtgcagtatgtgaaggagaacaatttactgaccattactctgccttactgattcaaattctgaggtttattgaataatttcttagattgccttccagctctaaatttctcagcaccaaaatgaagtccatttcaatctctctctctctctttccctcccgtacatatacacacactcatacatatatatggtcacaatagaaaggcaggtagatcagaagtctcagttgctgagaaagagggagggagggtgagccagaggtaccttctcccccattgtagagaaaagtgaagttcttttagagccccgttacatcttcaaggctttttatgagataatggaggaaataaagagggctcagtccttctactgtccatatttcattctcaaatctgttattagaggaatgattctgatctccacctaccatacacatgccctgttgcttgttgggccttcctaaaatgttagagtatgatgacagatggagttgtctgggtacatttgtgtgcatttaagggtgatagtgtatttgctctttaagagctgagtgtttgagcctctgtttgtgtgtaattgagtgtgcatgtgtgggagtgaaattgtggaatgtgtatgctcatagcactgagtgaaaataaaagattgtataaatcgtggggcatgtggaattgtgtgtgcctgtgcgtgtgcagtatttttttttttttaagtaagccactttagatcttgtcacctcccctgtcttctgtgattgattttgcgaggctaatggtgcgtaaaagggctggtgagatctgggggcgcctcctagcctgacgtcagagagagagtttaaaacagagggagacggttgagagcacacaagccgctttaggagcgaggttcggagccatcgctgctgcctgctgatccgcgcctagagtttgaccagccactctccagctcggctttcgcggcgccgagatgctgtcctgccgcctccagtgcgcgctggctgcgctgtccatcgtcctggccctgggctgtgtcaccggcgctccctcggaccccagactccgtcagtttctgcagaagtccctggctgctgccgcggggaagcaggtaaggagactccctcgacgtctcccggattctccagccctccctaagccttgctcctgccccattggtttggacgtaagggatgctcagtccttctaaagagttttggtgcttttctgggtccctcagctcccgaagctcttgagaaaactatcaaaggctagaatccccttctaactctttttttcccccatgataagcgcagtcggtcacagttcaggtgagttcttacttggcattcaagaaaattacaaaatctgggtagttgtctgggcacgaagcgacaatggcgtctatccctggtgctgaccctgggaagcgctgacccaggtgctgaaacgcagacctctgaagctgctacctcttagcgtacctcacttccaaacgtcgggactagggcaaaggggcaatctaaagaccgaacgccgtatgtttgagattgtgagaagtctcgttcccctacagtttacttggtaaaaatggtaaaacaattctactttgtagctcgtgatgtgaaaattgaattaaactgttggcacacactttatcttaccagaacggtctttatgtgtgtgtgtgtgtgtgtgtgtgtgtttgtgcgtgtgtgtgtgtgtgtgtgtgtgttaagtctacagggacagaaaggttgcagaaacatttgagctcttaaagcctttttgtgtaacttggtaattatagcaactatccttatttttatatccttgattgattttaaatgtgacaaaaaatgcgcagctgtaaaaactggattttgtgtgtgaccaaatctgttctttaatttaggcttttcaaattttttccattgtcctccccacttctctttctctctttttctatcccttctgccctatacaggaactggccaagtacttcttggcagagctgctgtctgaacccaaccagacggagaatgatgccctggaacctgaagatctgtcccaggctgctgagcaggatgaaatgaggcttgagctgcagagatctgctaactcaaacccggctatggcaccccgagaacgcaaagctggctgcaagaatttcttctggaagactttcacatcctgttagctttcttaactagtattgtccatatcagacctctgatccctcgcccccacaccccatctctcttccctaatcctccaagtcttcagcgagacccttgcattagaaactgaaaactgtaaatacaaaataaaattatggtgaaattatg

SEQ ID NO: 62 - DNA, 23490 bp, Homo sapiens
cggctctccgtccacgcggcgtcctccctgcagcccgctagggccgctcgcccgtcgccgcctgcggaacgcggaggggcagcacggccacgcccggccactcgaacctgctccccggcgccgcgtgaccgtgtcaggtccccgtcggcctcgccgtgccgaccccgggcgcctccacagtggctcggaggccgctgctgcccggatgcccgggttccacgaggctctcccagcccgacaagcccgccgatcccacgggcacgggcggaggagagggaaccgccgcgcccgccccgcgcgccgtcgccgaccccggtgggtcgcgcttccccgcgcacgccgcgctctggcgcggggagaggcccctcggggtccgcccgggtcagcgtcccgcgggggtggcggccgttcgctcagcctcctctcgacttccctttcctgtcagggctgctggggctgacaggctcccgggcaaccacgccggggaacccctcacgcccgccgatcgctgcggggctcagcagccgccccgtgcgctgagtcccctgtcatgagtgactccattgcgaggcgtttcgggccacgaagcaggaccgggggccgcactccgggtccccgccctgccctcgccgacctcccgcgcgtggaagggggacggcggcggcggagctccccgccacggagaaccccgaaatggtcatttcgaacgagaggagtgtggcctggggtgtctggtttaacagccccccgcgccgaaaggctgttcgccgaggaggggccgccggggagggagcccgagcgcggcggggcgagaccggtccccgcccggcgttgcccggcccgagggacggcggcgcccccaggaccctccccagcgcggccccagctcgctccgggaccgcggggccaggccgggcgggagcgcggggacgtacacggcggccccgcccgcgcgctcctcctccctcccggcccgccctgcgccggcggcggcggccccagtctccgcgctgctgaggcgcgcccggccgctcccacggcctcccctccgccctgcggtcccgccgcctccggggcctcctgggaccctggccctcgccgggcaggacgccgccagcgctgaaggcgcagcccggaggccgcgcgggtgagtcggtgcgcagccccagcggctccagaggagcgggtgcggggagggcgagcggaccaagtcggccgcgttcccaccttgcgcgcagccgggagaccagcaggcccagcctctagggaggagggcaggggagctgggggccgccccccgcattctcgcaggcacctgtccctaggccggggtccgctggctcgaagcactgacccgccccggacctagggggacggaggcagcggtgacatttgcccaggaagggcggcagtgggtaaactccactccagggcacgggtctgggcgcaggttgaggcctggggttgaatctgcttctgctagaggccagtgttctcagggaggcccataacccgactgggtctcagttccccctggtatgaaacagcaacagggcaagaggaggaaaccatgccacgctgcaaagctctgagcacgaagccgagaagaatctcggctcccggcctcgggggctgcacttcgggccaggcctgcactcccaggataagaggatggcctcctgccccaggggtggcatgggggcgcgcaaaaagcaaaggtgaccctgccagggagcacccagcgctccggttggtggtcatggggtctttgcgtgggactcacagtgtggccgggaaagttctgtaatgaggacatttctcatcattccttcttctcaaaagtcattcgtcagccccagacacctttgcctcggaaaactgagaactactttcaaaatcgtcaacacccccatctcctgctacagagcggagtccccactttgcagaggcgcactgcaaggtcgcgggtggttaaatggtgcgccctccttgatgaagatgccttgttctctttcactctctatgtgtgtttaatgttgtgtgttgcgttctctgtgaagcgaaggataaacacgggccctttcaggcaaccgaaggaagaaggcggccagcatcagatcttcccgtgcttcaaggtggagcaccctgcagggcttactgcagcgctcagggtcaaagtgaggatgcagtgcggcaccaaaaggcaaatggactctggagagccactctcaccttgtacccctggagtagaccccgaggactggaggactggaacaagatcttagtcctgagggcgggagaagcagcctttggtggttgcacaggggcccggcttttcccgaagtcttaaagcctgctccaaatgccagattcagacaaaggggccgaaccttgggcccgccgccttctcccataagcggcaacccagcagctttgccaggaagtttacatgtgaaggtacggacctttcttggaatgagccacacctgatggccctgccactccggacggcgctcgttcacggctgtccctggagcagacacggttctgcgcacacacctgggcgccggagaaacagggcacccaaagcgggcccaggccctcggactcagcgagctggacacgtgtccccatcacccgcggctggcgggagcagtgtttctactcccttccctcccctcctcccgccccgcagatgtgctgtctttcccggcctccccccgcgcccagcacagtggtttctgcttggctgttcccctgtctctgagatggtctctccctgctgcttgccctacacattctcccacacaggcgcgcgggatgcccctgtcggcgtggttgtcaatgcctgctcccctgccccccagtccaatctccacgactctgggccctgtcgcttcatcctaaagccttccgctcacgagccctcccgacgaccgacccccaggaggctactggagatgcaggatttggacccgtgctggacccgcacccggacagatccctctgaatgaatgaatgaattaatgagcaggctgcatcctgattaggttaaggtgggtggttgccatgcttggcgttggctctgtcccctgggataaaaggcgagaggcagccacatggacagctcctccagtggggtctcagactggagagacgccagcgggcgggggtcgttccctggagctcccgcatttgttatggtcgatgccccactacgttgtcaccttctccggaggacctcctgctctgtccttgacagatgggccccagtgggcccacccaggctggagatgaatctcaaagggactccatgcctgggagacctcagccaagcagggcagagaaataatcagacaacagtcagcgcatggcgcctgcagagttttgcacagggtccttcagaaggagggttagggaagacttcttgggggttagggcagttaagcaagatggataaagaaagcaaccacttatgtctgcatattttcttcatttcatcttcacaacagccctgagataggtacttgttttaaagctgaggtataaattggggttcagagagattgagtgctttcaccatgaacaagtgacagagagcaacgacttgaaccgggttacctgatgccaccgctggtcttaacctccatgttattagcgtattgggtaagtgaaaccgtgtgagccaagaagctggggtgagaaacagcacggaatagaggagagggctgcagaaaggcgtgatgtttctggagcaccgaattctactcacgaacacaggagtggaggcgggaaggggacactggaagctatggagggccttgtcagccacagtaaggaatgtggacctggtcctcagggtggtgaggggatggccccccatccagaggtttctcacaggggagtgattcggcctgtctctgccgcagtcagaaggaaggatgcagtgagagagggaaagtggagaggcggatggcggtgcagtctactccaggtcatgcttcttaccatctccctcattattcatccacagaaaatgattgctgttatatgacacactggttaacaaaggagggggctgtttgcaaacagaaacaaccaacccagggcctccagccatccaaagattctgcacagccagccacccctaaggctaagaaatcccaggtacatgcacaccagtcacagcatacctggactcagacaatgacagtggagaatgaggaacaagagctgggttcaaggaataattagcaagcaacgttggcattacgtagtgcagggacaaaggaggagggagatagcccgtgggattctggactaaattgggcaaatggtatgacatggttaggcttttgtgtccccgccccaatctcatcttgaattgtaatccccaagtgttgagggaaagacccggtgggagaggatcggatcatggggtggtttcccccacgctgttcttcggatagttagggagttctcatgagatctgatggttccataagcgtccgtcatttcctccactcacactctctcttgccaccttgtgaagaggtgcctgcttccccttccgctatgactgtaagtttcctgaaacttccccagcaatgtagaactgtgagtcaatgaaacctcttttatttagaaattgcccagtcttgggcagttctttatagcagtgtgagaatagattaacacagtaaattggtaccaggagtgtgggacactaatacatggtagtttcctcattgctgtagggagcatggggacagggctcattccagggaaggtgatgagttcttttgggctgccctgtgtttgaagcaggtacagaagcctaacgggcagtggagcagggcagtggagtcaaacagaccgggtccatcttccagctccaccaacttagtagttccgttaccttttgcaaaaagcctgttcatttgtgtgtaagacagggataagaataggttcatagaggctgaggtgggaggattgctagagcctgggaggcagaggttgcaatgagctgagatcatgccactgcgctccagcctgggtgacagagtgagaccctgtcttaaaaaacaaaaaaaaggatagggttatagacttcccataattaaataagataaggtacaaagcctggaaggtaatatgtatctaataaatggcagtgctagactgggcacggtggcacacgcctgtaatcccagcactttgggaggccgaggcaggtgggtcatgaggtaggagtttgagaccagcctggccaagatggtgaaaccccatctctactaaaaatacaaaaattagccaggcgtggtgatgcgtgcctgtagtcccagctacttaggaggctgaggcagaagaatcgcttgaacctgggagacaaaggttgcagtgagccaagatcgtgccactgcacctagcctaggcgacaagcaagactccatctcaaaaaaattaaaaaaaaatggtagtgctaggccgggcacggtggctcatgcctgtaatcccagcactttgggaggccgaggtgggcggatcacgaggtcaggagatcgagaccatcctggctaacatggtgaaacctcgtctctactaaaaatgcaaaaaattagccggcctggtggcagtcgcctgtagtcccagctacttgggaggctgaggtaggagaatggcgtgaacccgggaggtggagcttgcagtgagctgagattgcaccactgcactccagcctgggcgacagagtgagactccgtctcaaaataaataaataaataaataaaaataaaaataaaagcaaacaaataaaaaaaggtagtgctattattattgttatactattccttattattatcagtaaatccgaagctcagaaaagaagcaatttcagaaggcatcaagtagaaatggaaaccatgagaataaatgagatgatccaaaagagtgtatatggaggacattgaagaccaggaacattgacatttaaggggtggacagaggaagagaagcctaagaacaaatggcctgaggaggaggaaagctgtgagagcccgtggaagccacgtgtagcagccacacagctagctgatcctctgcctccttcctccttcctaacagaacctgttgttagggtaagctcccacagtgccagctccaacccaggaggtgagtcttcatcagtaatctcatttcccttgccagtgactggtttgggaaggtgtatttgatgcagttctgttcaacagcacttgatagaaagtctgctggtgaacttctggaaaagatttccttgatcttaaagagaaatgcaggtgcaaatcaaaaccacaatgagataccacttcacacccactgagatggatggaacccaaaagtcagataacaagtgttggttagaaccgtcatacatttctggtgggaatgtaaaatgatacagccactttggaaaacaacctggaagtttccccaaatgattaaacataaagttaccataggatgcagggactttacgtatataccaagagaaatgaagacatatgtccacgaataaacttgtacacaaaagtttatagtagcactgtttacaatagccaaaacatggaaacaactcagaggttcatcaatggatgaatgggcacacaaaatatggtatatccacacaatgggatatcacttggccataaaaagtaaggacgtagtgatacctgctacaacacggacgaaccacgaaaacattctgctaagtgaaagaagccagccacaaaggcctccagagactgaagggggcctgcccctccacacctgtgggtatttctcgcaaggtggagacgagagactgagaaaagaaataagacacagaggtaaagcatagaggaagaaaagtgggcccaggggaccggcactcagcaagtgaggacctgcaccggcactggtttctgaattccctcagtatttattgatcattatctctactatctcagtgagggggatgtggcaggactatagggtaatggtggagagagggtcaacaggaaaacatgtgaacaaaagactctgtgtcataaataagtttaaggaaaggtgctatgcctgaatgtgcacgtaggctagatttatgtttaactttacataaacatctcagtgcagtaaagatcagtattgccgtgcagtaaagatcagtattgccaccagcatgtctcacctccagccatagggcggttttctcctatctcagtaaatagaatgtacgatcaggttttacaccaagacattccattcccaggggatcatgagacagatgctttcctcttaactgcaaagaggccttcctctttcagtaatcctcctcagcacagaccttttatgggtgtccggctgggggactataatgtaaggtctttcccttccaacgaggccacatctcaggctgtctcagtgtggggaagcctggacaacacccaggctttcttgggcagaggtccccatggctttccacagtgcattgtgtccctgggtactcaagactggagaatggcgatgacctttaccaagcatactgccttcaaacacattgttaacaaagcacatcctgcacagccctaaatccattaaccttgagtcaatacagcgcatgtttctgtgagcacagggttggggctagggttacagattaatagcatttcaaagcagaagaatttttcttagtacagatcaaaatggagtttcttatgtcttcctttttctacatagacacagtaacagtctgatctctctttcttttccccatacagaccttacgatttcattcatatggaagttcaggatagggaattctatagagacagaaagaagattagtggtttccagagtctggggtggtggacaaggatgggaggtgataactaaatgatatggggttcttcttgagtgatgaaaatttgtaaaactgactgtggtgatggttgcacctgtctacgaatataccaaaaaccattgaattgtacactttaaaattatacggtatattaattatatttcaataaacctgttttaaaaagagatagcctcaaaaatacagacacttctcagtttgtcatgtctggacgagatggctggaactgaggattatgtccacacaaagagaaaggcagcatcaaggctgacctgagaagcggcaagggaccctggcagtaccaagtctggttgtttttttatgtgacatgatcaattgtttcctgctttttcttttaagagatgggggtctcgctgtgttgccaggctgaccttgaactcctggggtcaagcaatcctcctgcctctgcctcccaaggagctgggactacaggggtgcaccaccacacctggcaacatgatgaattgttgaagcagcttgcattgtttttgctgttgttgtttgcaaacaactaaatgttttatgcaaaaaggagttaatatagggaattagctgcttacaaaacctttggaagggttgggtgatcaagctctaggctgaatccccaggaatgactcctagaacactgcaaaactgaccaatggagctactacttctgtcccgtatcaggaaagtgaggactcaggagaccagcactggaactattgcattcaagaacacagcactttaattatgactcagggttagaaagccattgcccaaccaccacagccgcctgtcagcagcacccaacgaagccggtgaatgagcatggaatactacttcagaaactgtatccatctcctataccttactcgctagaaggaaacagtcaaagcagcaggaagatggtatttatttgacttccaccttccacatgtctctcatttaatgaccaacttattttgctctttattcctacttccgtctcagaacttctatctggaaccatttttccttctgcctgatatatattctttataattttctgaatatctgcttgtgaagaactttcagttttggttttcttgaaaatatctttattttgtccttgttcttgaaagatttttttctttctgggcataaaggataggcaggtagttgttttcttttctttctttctttctttctttctttctctttctttcttttctttctttccttccttcctttcttctttctttctttcatcttttttctttttttttgagacaggttcttgctctatcgcccaggatggagtgcagtcatgcaatctcggctcactgcaacctctgtctcccaggttcaagcaattctgcctcagcctcctgagtagctgggattacaggtgcacaccaccacgcccagctaatttttgtcattttagtagagacagggtttcaccatgttggccaggctggtctcaaactcttgacctcaggtgatccacccgcctcggcctcccaaaatgctgggattaaaagtgtgagccaccgctcccagccgttattttcttttagcaaatgaatattgtcatccttaagggcctattggctacagccacttctgataccaaatggtgaaggttcagtacaagaaatagaagccagcagaaaaggaatttgatacaggcaaataggtagtaaaaatcattcggtacactgaaaaatgacctctatttgggcctccaggaaaatctctctgaacacccagaagtaactccataaaggagcgaccactcctgtaacagtcaggctactgtaaagccacctgtagaacttagctgggttttgtaacacagtactgtggccaccataactgcaactgtgtcctccattcccacaaagtggggactggatagtggaaagctgatgcacgaacatcccatgtcttcaatgatcttgtttcccaggagaaaacaaagaaaactgcaaaaaatatggcctgtctcacatctgctttctagattctgaaaacctaatttgcataacccaacttcaagagtgtccacaaaatgtagctttttgtttcctacccctcacagtacagtaagacaccctagaaggagctaggaatagtggaaggatccctgctgtcaaatggcaggcagtgtggggggcctgaagtggccaatggttttgacaacgcggaagccaaggaggcgagagccccctctctaaaaaaaattgaaattaaaaagcgaggagtgaattcagtgaatgcagatggtttgaggatccctgtgaagggaggaggaggagagaaaggtagtagtagaaggaggggacatacagtttcaagggagttttggttggttgtttttctaagaatggtagagagatgaacgtgtttattaatggaaaggaaggtgtcaaccaaagagaacagagggaaggagtagatgcatgatggaaggagaacttgcagctggtgggaggggatgctcatgatatatggaaagatggtcatactttcctatgtgacaaaacaaattttaaagcaaacattgtatgatccccttccatttacaaatatataatagatacattgaaaatactcactgaatggtcagacatcccttatagagacaaaactcaatttcaatgttgcaaagctacactactgagatggagcagccccaggcaatggcacaggcttgggcaggggtgtgtagtaactggagggcaaaataagagtgggcgagggtgagatagaggacagcagagccatgctatcgaaggccacatgcccatgagactggcttgctccatagcggaagtcatgatgccaacttgcccaccttcccatacgctgaggaacagcctgccatccgttcttctggagcccagctcagagacctaggtatagcatcctccgttcccactcaccctcagcagatgccttcagcagttgtggagatatacaagttcccgcatagtagttttgagacacatcctgtgatagcaacacaatcccctcatgtttcctgcccccctcccccaaatcatgaccagaaggatccgctgaccaaggctgtcccttaaatatatgacttccttgagaataatttgacacggcttaaactaatttagcttttctcaatccctgtcttaactctcaacatgactatttctcatgccaacattatgccaaagtgtagatatataagaataaacaaatataatcctatattttccaagaaaatcatatatcaaaatgttaacagtgttttttgtttgtttgttttttgttgttttttgtttttgacgaagtctcgctcttgtcccccaggctggagtgcagtggcgcgatcttggccaactgcaaactccgcctcccaggttcaagcgattctcctgcctcagcttccccagtagctgggatgacaggcgcccgccaccacgccctgctaatttttgtatttttaggagagacggggtttcaccatgttggccaggctggtcttgaactcctgacctcaggtgatccgccggcctcagcctcccaaagttctggggttacaggcgtgagccaccatgcccggcctaacagtgtttttttgagtgacaggaactgcatgtaatttccattttccctttttggcttattgcactttttactttttctacaacaattttgtattatgtttatgaatagaaaaaaaaaataaaggttgttaaacaggacacaagtggaaagttgtccttgaattataaaaggaataaagtgctgaaaataactaaaatgctggataaaatagtatgtaagccgaagaaaatgtaagtaatacttgggcatgaagacagggacttagagaggtatgcaaagccaggagccaggtttggagttgaggatacatacaaaactgtgaatttgagagcctccttggcttcctcattatccaaaccactggccacttcaggcctctatattgcatgccatttgacagcagggaccccttccactatttctatctccttctagggtgtcttattgtactgtaaagactaggaaacaaaaagctattttttgtagataccctcaaagttgggttatgcaaattaggttttcaggacttggtagcttctcgggactagcaggacagaagataaagcttactgcccacccggagggaagcctaacaggagactccccgcaaaactgtgactctggagggccacgttctaatataaaggtggcctaagaaataaatttggccgggcacagtggctcacgcctgtaatcccagcactttgggaggctgaggccggcggatcacgaggtcaggagttcgagaccagcctggccaacatgatgaaaccccgtctctactaaaaatacaaaattagctgggtgtggtggcatgcgcctgtaatcccagctactcaagaggctgaggcaggagaattgcttgaacctgggaggcagaggctgcagtgagccgagatcatgccactgcactccagcctaggtgacagagcaagactctgtctcggaaagaaaaaaaaaaaaaggaagaaaaaaattattccatccctacaggactgaaaggaaaactgcccttgttggatcctgatgctaatcaaattgagctgggggtgggctatctcccttcagaatttgtaatcatgagcctgccctcatgaatttacatgaccaggcactatcccccttcctaaaagataaacacatacacacacacacacacacacacacacacacaaaacctggagccaaaaatttgattagaaatggtcctaggcttgtaatgcccacagttacctgagagaagcaagtgtaaatcccttcaagaggaactaagaaatttgcctcatccctgacctcaaagaattcccacagtaatattccaaagaaaatgagataattcactaaataaaataattcactaactatacaaataaacagggcactatgagtgagatccagcagaaacaagacagcagattcagatccagactttagatgctggagttatcaaacctagtatatccaacaagtatgtttgatatcatttaataaataaaagagagtcttgaaaatatcacaaaagagcaagcagatgtggaaaaaaatcaaacaacttgtagaaatgaaaaatataacaactgaaatttaaaactccatagacaggtttaacatctagatacagctgaaaggatgattagagacatggaagatagaacagaacttacccgacatatagccaagagagctaaagatatggaaaatatgaaatagaacttaaagagacatggaagatagactgagaaggtctgtgatatggtttggctgtgtcttcactcaaatctcatcttgaattatagctcccataattcccacatgctgtgggagggacctggtgggagataattgaattatgggggtggtttccctcatactgttcttgtggtagtgaataggtctcacgagatctgatggttttataaggggaaaccccctttgcttgcgtctcattcgcttgcttctcattcgtttgcttctcattcgctttttgcctgctgccatgtaagacgtgcctttgccttccaccatgattgtgaggcctccccagccatgtggaactgtgagtccattaaacctcttttcctttataaattacccagtttcgggtatgtctttatcagcagcatatagtctaatgaaggattactttctataaatgacaaagggtcctaatccacaggttcgagaagccaaaaaactttcgactataataaataaaaagaaatgtgcacccagaataatcatagtgaagacacataacatagtatactaaatattaaaatattaaataatatatggtattttatagcatattggaaactgagtatatgtaacttccaaactgttagagaaaagagaaaaaaaactaattcaaaagaaggcaagaaaggacaaaaaaaattgaaaaaacaagacaagaaaacacaaaataagatggtataaataaatgtatcaataataaccctaaattggccgggcgcagtggctgacatctgtaatcccagcatcttgggaggctgaggtgggcagatcacctgaggtcaggagttcgagaccagcatggccaacacggcaaaaccccgtctctactaaaaatacaaaaattaggcagccgtggtggtgcgcacctatagtcccagctactcgggaggctgaggcaggagaatcgcttgaacccaggaggggcagaggttgcagtgagccaagatcatgccactgcactccagcctgggcagcagagcgagactatctcaaaaaaaaaaaaaaaaaaaagaaagaaagaaaagaaaagaaaaggctggaaaatgatgtaccaggtaaatactaagtttccaaaaagtgtgtatagcaacagtaatatcagaaaaaatatattttaggacaaaacagaactagagattaaaagattactatataatgataagatattcaattttccaataaggcataacaattataaacttctacaaatataataatatagcttcaaaaatgaactaaaattgacagaattacaaggaaaattagacaagtcaactatttcatgagctagttcaacacacatttctgtgattgataaaataagcagtaaaaaatcaataaattaagaatataaaagatttgggccaggcaaggtggctcatgcatgtaatccgagcactttgggaggccaaggtgggaggattgcttgaacgcaggaggtcaagaccagcctgggcaacatagcaagactttgtctctacaaaaaatttaaaaattaaccaaggatggtggcacatacccgtcttcctagctactcaggaggctgaggtcagaggatcgcttgatcccaggaggtcgaggctacagtaagccatgatcgtgccactgcactccagactgggcaacgcagtgagaccctatctcaaaaaaaaaaaaagatttcaacaacacaactaataagcttgatctaatgacaacttatagaactccatatccagtaagtatagaatgtatggtgttctcaagcatccatggaatatctacaaaaatgaccattaaaaattaaatccttcaaccataaggcatttgtggaggaagaaattacaatggcaattagaaatatttagaaccaaaagttgatgaaattattacatagcaaaacttgcagtgtacagttaatactaatttagagaaaactgtgtggccttcaacacttctcatagaaaataaggctccaaattaacgagctgtgctcatagcaaaaaatctgaaataaaacaatgaaataatcacccaaaagagtaaaaggaaagaaaaaataaagatgagcaaagaaattaaaaacaagggcaaaagttgatgttttgaagaaattcgcaaaatcaacacaattctggtgacgattataaagaaagaaaaaagaatgcacaagtaaaccaatattaggaataaaaatcagtttagaatataagctacagtacaaactacagttagaagatttaatttctaatgtttgatagcagagtagggtaactatagttaacaacgttttctttttaaaaaaaactttttattgattgattgagacagagtcttgctctgtcctccaggctagggtgctgtggtgtgatctcagctcaccacaacctccacctcctgggtccaagcaattctcatgccttagccacccgagtagctgggattacaggtgcacaccaccacacctggctaaattttgtatttttttggtaaagacaggtttttgccatgttggccaggctggtctcaaactcctgacttaaagcaatctgcctgcctcagcctcccaaagggctgggattccaggtgtgagccaccgcacctggctttttttttttgacagggtcttgctctgtcacctaggcagaagtgcagtagtgtgatcatagctctctgcagcctcaaattcctgggttcaagtgatcctcttgtctcagcctcctgaatagctgggattaccagcacacaccactgtgtccagctattttttcgtagaaatggggatctcactttgctgcccaggctggtctgacctcctggtttcaagcgatcctttcatctcagcctcccaaagttctgggattataggtgtgagccacctgacattacacctgagagcaagaactatttaaggtcagaatttaaaatatcaagaagtcagggcaacatcactatttctggaggagggacaagcaggttgtcaagcttgctttcctgttcagcagtgatgctgtggacttacagatccagcatgccatgggctcagattgtcactgctctttgagttacatagaaaacttctgagatgcagttaatactatatttgagttgagggagttaggattctcatcatatagagttacaaatgttcccatcaccttccaaaaggcaggttccagggtgtgtgaaagttggagggagtgactggaaacaatggggttgagtgtaatttttgcagggaaatgggtggcatccgttgactttcccaagttttcagaaatgcaagaagcagcctgccatactggcctgtggataggagctggtgatcaggatgggctgcaagacccagatttgttgggtaccctgatcttccttgcaaatgtcacattgagcaaatgtcatatttagaccctgtataagtcaggattctccagagaaacagaaacaatagggaactggctttatcatttactatgaaaattagctcatgcaattatgggggctggtgaagtcccacaatctgacacctgcaagctggagaaccaggaaagctggtggttgaattcagtctgagtcgggagccttagaaacagaggagcctacagtgtaactcccagtcctagtccgacggcctgagagcttgattcagggaggtgggttggggcacactggtgtgagacatagagtctgaagacccaagaaccaggagcaccgatgtctgaggcaggagaagatggctatcccagctgaagagagtgcaaattcacccttcctccacctttctgttttattcagaccctcaatgggttggatcatgcccacccacactggtgcagctgatcttcttagtctaccaattcaaaggctaatcttagctgggcacggtggctcacgcctgtaatcccaggagtttgggaggccaaagtgggcggatcatgaggtcaggagttcaagaccagcctcaccaacatgatgaaaccccgtctctactaaaaatacaaaaattagccgggcgtagtggcgtgtgcctgtaatcccagcttctcaggaggctgaggcaggagaatcacttgaacctgggaggtggaggttgcggtgagcccagatcatgccaccgcactccagcctgggtgacagagcaagacttcgtctcaaaaaacaaacaaacaaaaaaaccacaacaaaggctaatctctccctgaaatacccttatagacactgccagaaataatgttctaccagctatctgggtatctcttaggccagtcaagtggacacataaaatgaaccatcagactccttagcaaatatgatcagcaagtaaccaagttactcagcagaggcctccgtttccccatctgtacaacagggatcctaagacccactgctccagactgtggaaaggattaaatgaaatatgcatgtcacgtgcctggcagttagtgggcatagagtatgaagtagctattattattattgtcatttttattaaatgacagatccattttcagtttgttcagacagttgaatatattataatttacatcgtgataaccaacaactgttatcctcaacagatgcagatctgtggatccagcgtagcatctgtagcagctgggacatcattccaggttttgggcccggtgtgttggcaacaactggatctgaagatggcagtcagggtgctttggggtggtctcagcctgctccgagtgctgtggtgtctccttccgcagacgggctatgtgcacccagatgagttcttccagtcccctgaggtgatggcaggtaaaactccgcatgtgtggctgagacaagctgcagcagagtctgcttgagaagctgacgggagactttgtggggagggagtagcatgtctgggtagatgagtagtaaatccacaagcagagcagcagcctctctctctggggtaagaacttggaagtggggacttcatatctccttcccgagtggtgacactgaccttctgggtaatgctaataaaccaccagtctctttgatgtatccctgcttggaccaacaatacaggtcattcagaatgagagctgtgttggacttcccatgggaacacttttattagagttaggcttccccagtgtttggcaagagcttccatagggctgtgatctgagatcatgaaacttctcttctgtagattcaagagaggggtaagggaacccagacctgggacactcactcatctgttaggcggtgtgggacacatcatgaggctggttgcctggcccataccgtctcgcccaaaggccttgaggcctttcagatgtgatgggcatgtggggtcatcctcatagttcaagacggctgcttgagctccagccatcaagcctacaggcagtctttccagccaacaaaggagaagggcattacttctctctttaaggtcatattttgaagggcgcatgctttttgctcatttctatcacactgggcagaatgtatcatgaggccacacctagctgcaaaggaagctaaaaattatagtctttatatctgaccaagtgcccagaaaaagagtcaaaggagtcagatgcagtggctcacgcctgtaatcccagcactctgggaggctgaggcaggtggatcacctgaggtcaggagtttgagaccagtctggccaaaatgatgaaaccccatctctattaaaaatacaaaacattagcctggcatggtggcaggcgcctgtaatcccagctacttgggaggctgaggcaggagaattgcttgaacccaggaggtggaggttgtagtgagccaagattgtgccactgcacttcagcctgggcaacagagcgagactccatctcaaaaaaagaaaaaaaaaagtctaatgaaggaggagggaatagatattttggaggcatcagctttctttgccacagggctcaacaggtgaatttgttttttaagttaaaaggctcatcttctttccctcacgtcgttttttaaccagaaaagcagccagatagatttgatcctggattttgcttccctttcaacatctaacatagatagataaaacagctgaaagtctggagaaataagtagcagaatcaaagagcccgaatgatccgcaggctgtatgatcagctcgaaacagccagcaggtgatcaagcaagagacgctgtgaacaatgaggcttggagtggagctgctcccgcgcccccacccctcagagctctgggacgttggggcacagggttacagaacaggcagcaagtatttcttaaattatgtaagtactacttggatatattcttcttacaaaaaatttaagtatcataggcagggtgcagtggctcacgcctgtaatcccagcacttcaggaggctgaggcgggtggatcacctgaggtcaggggttcaagaccatcctggccaacatggcgaaaccccatctctactgaaaatacaaaaatcagccaggcacagtggcgggcgcctgtagtcccagctacttggaggctgaggcaggagaatcacttgaaccccagaggcagaggttgcagtgagccaagatagcgccactggactctagcatgcgtgacagagtgagactctgtctaaaaaaaaaaaaatttaagtattgtaaacaaaactaacataaatcacctctgacataaccctgatggctcatcacctacccctcttctctccccccatctcctgataacaatcattatcagagatgcggctctgtcaagcttgacaggtgtaaggacaagggtgcttgtccttggcttttgagatcttggaaccctgagaagaggttaggcctcccccacctgcccgcctcccacacactcttcccaggacacactgccacctcatctcccggggaagcccctcctgccctctgcactctgagctcccctgcacttgcttctgctgctcctgacaaatcctcaaaatcctacgagcagctcaaactgcacccgtctgtgagttcacagttctgtccatcagaagggcagcacgggctctctgctcacaaggtggacatcagcgtatggactgggctgagttcttgtctggaagctctctaattctagcagaatctagttcatttcagctgtggaacctatggtgcggcttccttgctcttagctttcagaggccacccacattcctagccaatggcctcttccgtcttgaagccagcagtggcatgtcaaatccttctcatgctttgaatctcactgccacttctgcgtccagctggtgaaaactctgttattaaaagattgttgtgattaggtccggcccactgcatagtctccctattttacagtcagtgctcctgtataagtaacctaatctcaggatacagtccatcctgcgggccaggtgcagtggctcaaacctgtaatcccagcacattaggaggctgtgctggaagaatggattgaagccaggagtctgagatcagcctgagtaacatagcgagagctgtgatctcgccaccgcactccagcctgggtgacagagatgaacgaagcgaaggaaggggaaggaagggaagggaaggaaggaagggaaggaagggaagggaggggagggaaagagaagtaaagggaaggaagggaagggaggggaggggaagggaaggaagggaggggaggggaaggaagggaagtaaagggaaggaagggaagggaggggaggggaagggaaggaaggggaaggaagggaaggaaggaagggaaggaagggaaagaaggagggagagagggagggaagggaggaaaaatccagcccgtgcacagtcccagggattacgcagggcacacacaccaaggggtgggaaatgtggggtgccctcctagaattttgcccactacatccctgagcttggtactggctcacctctgcctctctctgcagaggacatcctgggcgttcaggccgcgcggccctgggagttttaccccagcagctcctgccgctcggtgctcttccccctgctgatctctggttccaccttctggctgctcaggctctgggaggagctggggccgtggcctggcctggtgagcggctatgcgctgctggtggggcctcgactcctcctcactgccctttcctttgctctggacggggccgtgtaccacctggccccgccgatgggggcggatcgctggaacgccctggccctgctgtctggttcctacgtcaccctggtcttctacacaaggaccttctccaacaccattgagggactcctcttcacgtggctgctggtgctggtatcctcccatgtaacgtggggccctacacgcaaggagccggcgccgggtccacggtggcgcagctggcttcttggaggcattgtggctgctggcttcttcaaccggcccacctttctggcctttgctgtggtccccctctacctctggggcactcgtggagccacaaaccctggtttgaagtctctgacccgggaggccctggtgctgctccctggggcagccctcacagcagcggtgtttgtggccacggacagctggtatttctccagccccgctacatccaggaaccttgtcctgacacctgtcaacttcttgcactacaacctgaatccccaaaacctggcgagacatggcacgcacgcgcggctcactcacctggcagtcaacggcttcctgctcttcggggtgctgcatgcccaggccctgcaggctgcgtggcaacggctgcaagtcggcctccaggcctctgcacaaatgggcctcctgagggcactgggtgcccggagcctgctgtccagccccaggtcctatctccttctcctctacttcatgcctctggccctgctatctgcctttagccaccaggaggctcggttcctgattcccctcctggtccccctggtcctgctttgtagtccacagacgcagcctgtgccttggaagggcactgtggtcctcttcaacgccctcggtgccctcctcttcggctgcctgcatcaggggggcctggtgcctggcctggagtacctggagcaggtggtccatgcccctgtgctcccaagcacacccacccactacacactcctcttcactcacacctacatgcccccccggcacctcctacacctcccaggcctgggggcaccagtggaggtggtggacatgggggggactgaggactgggccctgtgccaaaccctgaaaagcttcaccagacaaccagcctgccaagtggctggtgggccatggctctgccgcctctttgtggtaacccctggcaccaccaggcgtgccgtggagaagtgcagcttccccttcaagaatgaaacacttttatttccccatctgaccctggaggatccaccagccctgtcctccttgctgagtggggcttggagggaccacctcagtcttcacattgtggagctgggggaagaaacctgacaatatgacagagcacccactgcccaagactcagccatagaagatgccgccccaccttctacttgggtagctgggctgggacgctgggacaggaccccgtcctccttcatgactcccactgctgcctctcctgggcatggctgttagctgttctgccttctgggtgagctggcactcttctccctgagaccaaagatttgacctgtcggtcttgatgtcaaggtccccaaagaccaggttaagtgacgacacctgtctgttcctgccctgttgcttccagccactgtgatgtttgaaatatgtgatagtacctggttgtgaaaaaagacaatgaactgctagtgacattcctcaatgacctctcccaaacctcccatgatgccttacccttgctgtcatgacaaccctctggcttcctaagacccatctgcctatcgaaatatgtgcaagtcagtgagacgaagtatagagaacaggtggcccagatccaggggacccaacttctggccccttggtctgtcacctcctcgctgtgtgatcttgagaaagctccttccactcacccaccccacttcccagtctgttgggatcagaggaactttgaggtgtctgccggctaacattgtgtcattcctggagtccacagtacacgtcccctgcctcaacaggcacagctctcacaaagctcttcaagcatggaagtgggagttgtgttgtacttcatggcactctgatgcctgctgtctcagtgtttggttattatgcaaacaagtaatgtttgaaatatataatagcactggagattttctccct

SEQ ID NO: 63 - DNA, 2325 bp, Homo sapiens
aggattcacaccaagcagtgccacttcccagctccctgaccctgggctagtggcttgaactcctcgtcattgtccagattaggaatacgggttcgtgaaaaggactcatgtccctttagggttgctgtgagggttcaaagacagaaagtgattaaacagggccaaacacagacccgtgtaacatagagtaataggaatatggaaggaaaaataaccagcgctcttgctttctaatttaatgcaggatcttcatatcaccttcaatgatccctcttctagggacttgccacactttccaaactgccatcctgtagtggggtacccggctaggctgtggggagaccctggagagatttatgcaaaggaggacctggacaaatgggcccattcagctcctcaagagtggagaatagaagagagaggcagatcactgtttcttccgtgttactgagcacaggagaagcgtgaccaaaggactgaggtgggaacggggacagggcggatactgccagagatgcgaagttcgcacccttggcctgccctttgcacactactcccttgctatgctccccgctttggcagatccagaaagtggagcacaagactggggttgccctcgactccaggaaaggcttagctattgactagagacctgggcgttggtgaaggtgaggggaaagccagaatactggggtaggcggaacgccaaggggcgggtgtagcaggcaacctcagggaagctgggaaggcctggcagggtgagagaagccgcacacggggggcacagcgcctccctcgcgagccggtgcgaaaggggccgtcctgcggtgtgcgcccagctgcgctcaagggaccttgcacttggcccatctcctgcgcacagcccaggccgggaccgcgggcggtgcggactcagcgggctgggtgcaagggcggggcggggcgtctgcgcccggccccgtctcctgactataaaaacagccgctggctgttgggctccactccgccttccacgtgcacccactgcctcttcccttctcgcttgggaactctagtctcgcctcgggttgcaatggaccccaactgctcctgtgccgctggtaagggacgcccgggttctgtgccttgggatgccaaattcccagacaccatagagagtgtccctgggtttgaggaggtcgtattttgctatcagaggtaaaggggactcctttattggtccagtgctttcctgttggccaagctcctgagggcattttcctcctccctgttcctctatgtcagagttgagggtcctgaggctcaaggctgtcctgctccacgtcacctggttggtcacagggctgctggctgagccccaattctctaacctgactctgagctaccggattggataggagacattggataggaggggacattgcctcttccaggttcaggacagaaagtcgaagtcttcctgggccatgtctgcagcctgggactttcctttggagtagaaataggagggtgcttggttttcccagcatgaatggagaggacatggggcttctcttcctctgctctgagtgggaaaggagctctgagggctggctctgcacagagaagggggaagtggacactcattgacccactgctgtaccttctgcatctcactcaccgttcactggctttttctcttctagcaggtgtctcctgcacctgcgccagctcctgcaagtgcaaagagtgcaaatgcacctcctgcaagaagagtgagtgcggggccatctccaggaatctggggctgtggctaaggttgggagggaacccaaggctgtccctgagtgcgtgcttctggggaaccggccttcctttgtccctgtaggttgtcactgcctgtctagtcttctgcactttccagggcttatgtgaggtggggcagctttctcaaaggaagacccattccaatgtccaccagttgtctcctgacaaaaaccatgccatcatgaactaagggtcctctggggctggagggatggagacaggcctctgttggggcagggagttctctgatcgagtctgctctgacctctcaatctcctttcctccccaggctgctgctcctgctgccctgtgggctgtgccaagtgtgcccagggctgcatctgcaaaggggcatcggagaagtgcagctgctgcgcctgatgtcgggacagccctgctcccaagtacaaatagagtgacccgtaaaatccaggattttttgttttttgctacaatcttgacccctttgctacattcctttttttctgtgaaatatgtgaataataattaaacacttag

SEQ ID NO: 64 - DNA, 3410 bp, Homo sapiens
agggctgacggtcccggcagccgcctccctgtgaacggctccggctagggctcgagttctggcttgggctccaagctctcctcctggggtttgcagcagaccgctctctcctccttacccacccttccctccctctctcctttcgcccccaagcgctctgtctctcctctctcttttctctctctctctctctggttcctggtcctccgctcttctctctctatcctctcctttccaccctctttcctctcacctccccccttccccagcctctgtctcctggcacgcgccggtttcccggaccccgcgcaagcgcgtgcctcagccctgctgcgaaagggcgggggtagagagcctctcgccaccgggaaaaccccaagtaacccgaggctgcccgggactagggccacaggagtgaggacagggaacctagggccagaagcatcctgaaaatttcaagaaaagggaggtggtttgggggaggggtgcctggaaatggaatgaagggtaagtaaaagaatcttaacattttcggaaggcaaattatgctctaggagtggtgctgggcactgtgaatttagcatttttgccctactccactttgcagatgaaaaacctcaggctcagagaggtcaagaaacttagtcaatatcacacagcaaatgattatattccgaagcccgttctttcttcactgacaaagacagtaaattattttttctttctttcgttcattcttttttctttctttccttcctttttttctttctttctttctttctttcctctttccttcctttcttcttctttttttttttttcgtaaaatccagatcctgcacaagagagtgaagtcttttggaggaggtggaatgggaaagtgaccccgtagaccctaatccccacctccctctcggcccctctccccgcctcttccttcctgtcccgctagtagtttaacttctaccccctgtggctatacctcagaaacctgtgtagccagagatggggacggaggccacagagcaggtgggagtgggggcagggagggggagaagggttacagagagggaggagacagggaaggaatgggattccccacctggcaatgggcctctgccatcctatggcttattcaggattcttggcgctgtctcagactaggggtcctccagataaatgggctggtggtgtgaggctggggttgtgggacagggactagggctgaggggaaaggcgggttgaacctagaggtccagggtcccacctgggccctgaaaacctgagtcccaaccctggagacccccttggcatgagtggttcagtgtgctggtattggaggtacagggaaggtgggtatggaagggaaagaagagaaacagaaacccactccagacggaggttggagtccagggctcaggtctgaggcaaagcctgcatatgggcatccttccaggagagggcgctgcaaagggaactgaagctgtaggatttattaataatacaaactttgggctgggcgtggtagctcaggcctgtaatcccagtactttgggaggccaaggtgggcggatcacctgaggtcaggagttcgagaccatcctggccaacatggtgaaaccccatctctactaaaaatacaaaaattagctgggcgtggtggtgggcgcctgtagtcccagctacttgggaggctgaggcaggagaatctcttgaacccggaggcggaggttgcagtgagccgagatcgtgccactgcactccagcctgggcgacagagcaagactctgtctccaataataataataataaataataataataatacaaactttgtattatggcctttggagaacacaggttctccccatccattattttccatattgccatcttcacagcaaaccttgagaggtgggctggtcaggatttataatctcaacattacaggttaggtaactgaggtctagaaagagcaagtggcttgctcaaggtcacccaggaagctggaagcagaggtaggaggggtgcaagggaagccaaggcctgctgaaggtgtgctaggaagagtctggagaagagcttatgtctccccgtgtactgttacatctggccacacaggagctctcagcttggaaggcaagtgtgggcgggggagttgtgtggtcagatgtgtctcataagatcccgcctctcatttgaccctcccaggtttcctggggccattactctggggatgaagaggacgcatactcggctgagccactgccggagctttgctacaaggccgatgtccaggccttcagccgggccttccaacccagtgtctccctgaccgtggctgcgctgggtctggccggcaatggcctggtcctggccacccacctggcagcccgacgcgcagcgcgctcgcccacctctgcccacctgctccagctggccctggccgacctcttgctggccctgactctgcccttcgcggcagcaggggctcttcagggctggagtctgggaagtgccacctgccgcaccatctctggcctctactcggcctccttccacgccggcttcctcttcctggcctgtatcagcgccgaccgctacgtggccatcgcgcgagcgctcccagccgggccgcggccctccactcccggccgcgcacacttggtctccgtcatcgtgtggctgctgtcactgctcctggcgctgcctgcgctgctcttcagccaggatgggcagcgggaaggccaacgacgctgtcgcctcatcttccccgagggcctcacgcagacggtgaagggggcgagcgccgtggcgcaggtggccctgggcttcgcgctgccgctgggcgtcatggtagcctgctacgcgcttctgggccgcacgctgctggccgccagggggcccgagcgccggcgtgcgctgcgcgtcgtggtggctctggtggcggccttcgtggtgctgcagctgccctacagcctcgccctgctgctggatactgccgatctactggctgcgcgcgagcggagctgccctgccagcaaacgcaaggatgtcgcactgctggtgaccagcggcttggccctcgcccgctgtggcctcaatcccgttctctacgccttcctgggcctgcgcttccgccaggacctgcggaggctgctacggggtgggagctgcccctcagggcctcaaccccgccgcggctgcccccgccggccccgcctttcttcctgctcagctcccacggagacccacagtctctcctgggacaactagggctgcgaatctagaggagggggcaggctgagggtcgtgggaaaggggagtaggtgggggaacactgagaaagaggcagggacctaaagggactacctctgtgccttgccacattaaattgataacatggaaatg

SEQ ID NO: 65 - DNA, 127602 bp, Homo sapiens
tccagagcaactacagagttttgaaatatttatgtcccatgccccctttatcagacagttatttgaggatgtgcttctctaaagcgggaaaagaaacagaaagaccaggggagaggtgaaggagcctctctgaatgatgtgaaggagatcgtgggtcaaagctctgtggtgtcctaaaaaataaacagtgcagaatggagcaggaagacagagttgtttgaacaactcagagatgtattcttctgtcagagtgtttggggatgaattagtaataggtgtaaagaagatgaaataaacataaagatcaggcagtggattaaccctagagaaaattaaaagttgcatggaagcatggtatgtatactatatggctcagctttgagccatacagactcatagaaatataaatattgaattcatttaaatgaaaaggtaattttatcatgttggccagatgggagaaggtggaagagaaggagggaggaggaacagagagagagagtgctagatcctctgccctatacccagaagtcaataattatctaaaattgaaaaaaataagcagcaacaccctattatttacacaatatgggattaaatatcagaagaaatggttaaaagtggttacctctacagagtacggatcaggaattgggatgaatgaactaagggaaaattctagtaggatgataatgactttttaaaacaatgttcatgttactttaaaaggcaaaacatcaggtaaatgggtgccctgccaaatcagggacttagcacccagggttatcaactctgttaagaatcagggagtgctgggggaagaaagtataaatgatggccttgtacaaagtatcttggattcttatcaaggctgtggcagtcaagtgtcctttgcccctgcttccttgttgtttgcataaatatttgtattctgaggcttcattctagggtgagagctcattttctgtttgcacaattgcctggctcctctggccaaagggtgctctgcttctggcagctgaagatcccagtagacagcttcttaaaccatggctttccctgcaggatttggatgggcggcagccactgcagcttatcaagtagaaggtaggggacactctctccccttcactggggtgggagtgctttatttctggtgtgtcctgtgtacctgaggaagatggtggggtaaggaggcaaaaagaaaagcaaagaattgaacagaccacaatgttatcaatgaatttgtttcccttttcaaacatgtcaggggtgggggctcacattctcttgtctctttaggcacaaggaagggtggagggatgaagaggtgaaaaccaagctgtggctggattttcagtcagtccaaactcagctgagacatcagtttacattggaccagctgcttttataattgatttttagaatccatttgccccaactcctctacaaaggagaatcatttttttctattggctggaagaatattgggtcgattttttcaaagagcccttcattaattgggaaaagttccctgttctattcttagtgagcgccaagccaagcctaatcttgtatgccaccatatttcctggggcagctgagaagtaaatagaagcaaatggtaaagagcacccagagtgcctgtggagcccaagttctgatcctcatcctaccacacacaagtgtgtgaattctttgtcctccttgagtctcagtttcttcatctgtgaaataggaagatgagctttacttttctaaaacacgtatgtccccccttcccctccacaaagggagttagagattgttaatagctaccatggagaaaatatttatttggtcaaataagtatatgaaaccctggattaaacaaagcaaagtgagttattgtggtagcttcctaggattgccataataaaatatcataaactgtggggcttaaacaacataaatttatcctcttacggttctagaagccagaattggccactggaggatgtaattagccaagttaagatgagatcatactggagtagggcagatatgcaatccaatatgaccggtgtcctaaaaagaaggaaatttggacactgagaaatttggaaatttgaaagaagaaaaattggacaaagagacaaggagaacaccgtgtgtgagagagagattggaatgttacagtaagctaaggagcaatagtcgccactaaaaattagaaagaggcaagagggattttacctagagacttgggggtccatgagcctgctgacaccttgattttggaactccagcctctagaactgtgagagaatacatttctgttgttcaaggctttcattttgtggcactttgttacagcacccctagaaaacttatacaccgagaaaaacaagtcaatcaatcaatgaaataatgactgctatggtaagtgctatggtgataataggatgttgtgggaaagggtcacgtgaaaaccagttcttcaggatgggtcatcaaggaggatctttgtgaactagcatcattccgtctaaacttaaggtatgaggaggagactgccatttgaatatggggagatctttctagacaaagaaacaggacaagttgatcctggtacaacccatgctgcctgtgattcctagcttcaattgctatttccccatcctctagaatgggaaggaggaatctttactacacagttgtgataactgccatgtagaagacatctcccactgggggattatgtatattattgcacatatatgatctgtgatacaaggctcttttaaaggaacgtctgacagtgtcctggttggctgagattccatgccacctttttcgctacatgggatcttctttcatcttcttccagataatttccactttgttgtagagggtgactgaataggctgaccctctgggaataaaaacaaaagcaatgatctttgttagtttccgtctcaaaagagaggtcggaaaaatccgagaaagcatggtagagcaccagaatggtgtaaatagaatcagattctagaagcaacatagcattggtgattattaagatgagctttgggggaagactctttagacttggattccatctctccttttactagatttgtgactttgtccaaatgactcatcttctctgtgcctcctcacctgtaagatggagattattatggtgtctcctgtgtagcacagctatgaggtttaaataagataatgtgtgttaagtacttggcatttagtgagtgctcgatgcatcatattcatatctgggaggatcacaaaaggattacaaagaatgattcactatggaactctacagttaacttggcataaatatgcagttatacaagacaatagagtgggtttcaactactaactttgagttcctgcccacttaggacctggaggtaacattaactggcccattctgagctcctctcttcacatgatctcaatactgttgcatctcttctgtctgcttggagccagtttgtcctatgctcttcggacttaggcttgcttctgccatattttgaggtctttatttgtggcctctaacctgctgttaactatctatagtttactaggtagggtacttgatccatcatgctctgccaagagccatcagcctgctatctttgtcaactcacagcataacttttgcatgcttgcttgctttccaccctaggagctcttcctgatccttttgtgctgtgtgtgaattttagctcaagcacttactagcagagtgactttgggcaaataatatatttaagcctcagttttcttatttgtgaaatttgaaacatagtcatactctctctgtagattggttctagggactgaagaggtaagcatatgtaactgtggtataagagtgcccccatgtagtgctcaccaaatactaatattaatgccaatactattattatttttctttctcctggctgtattctcttgcactctgagagaaggagagttacactgtctactccatttagtgggaatggtcatttcttgtttggactgctagttagaatctattccctccttgctcatgcttgactacttcaccagcagttgccaggagagttactgtttaaccatttctcccaccatcgactggattacagtgcaggaagttcactcgtggctttatcaaatcagcatggcttggatttaaagccgagaacagcctgtctctttttgattttgataatctttgcagttttgtgctgccctggccttggaaggtctgtagatgcattggaagtcaggagacactcagcagagctgaggactgagcctgaattgtatttgtaaaaaaatctaacacttttaaagatttgttataaaacattaccacgtatctctttctactgtctctctttccactgtatttcaaaatacagttgtctgtattggtatatttgttttcagatactctcttgaaatccctgaagaataactagcatactctccctcaccctcactgcgaaaatggagatattttgtctccatatagaaaatactgtcagggtctttgcaggtgggccccactgagaggggcagggactgggccttatcaccaggtctcctaacacattgactacttggttgcgtattttgccggaatcacggcctttcctttgtcctgtccttgttcagatcctttcttcctctcctctggctatttcactgtttatggtcttatagaagagtttaatgttattacataagagttgactgcatggtgccttgagccttttggaagaaagcacaatacgaatctaataaataaataataaataaatggtataagcaggaggaaaattatgtgttttaggtgagttgtaaagaaccatgtaaaacctaaaaaatgtatttgttagactaagaggcagggaagaaagtgcaaaaaatcatcgtacatacagaagtgagtctcccgcaatgtttttaagtagagaaaaattcccatgatttttaaccccttgtgaagctgactctgtcctctgtgtttggctggagggaacgtgaggtgcaaaaacatcaggtagctccgtggcattttgtttactttgatggtaggccacggaagagatatgaaaatgacattgaggacccaattctacagttcttatgagcttctaactcccggtgatttcagggaaggctcttaaggagcgaacatgctttgcaaaatcccacaaatcctaagcaaagtctaaactactctgttaatgcttcctagtgggatctgagtttgtggtttttaaggagccaaagttctcagttttaggaatgccattgtgaatccttgatattactctaatataacagttgattttaagtttgactttggttttatgtcggcagaaattggggattgcctcagactttggccatctctatttgccatacgttaaaggtggattcttgtagttaagacatttgtgtgtgtgtgtgtgtgtgtgcatgtgtgtgttcccttaaaaaattggaaaaagaacatggcagctgtattttttggttataagttgagtttatggtgtttctatataggctgttttttctttggtcctttttttaaaaaaactcaactgattcacacaaacctaagctggagacacacttcatctactcgttgtaaatgtcagcacaagccccatatttctctaagaccacttcctgattgctttcttcactcaacggattttaactgtgtgtcttggtctctattttctgccaaatcccatggattaaacatcgcagtctgagacttgatctcttggctgctcttggtactcttcaagaagaggaatatccagacagatatgctccttgtctggaccacctaagaaagacggaagggaagcagacttaaagcatggtcatttatttcttggtatgtaaggaaacagggagcagagaagtgggcatttacccatgaaatttatcatagcttaaaagttgacatgacagaaaccattcttatttctttcccccagtttcaaatttgaaattcacaaaaatatcaaatattgccctcctttttcattgtaccatgaaattaatgatgtaggcatcattggaagagtacaggcttagagagggatgatattcaaatattaatcaacaaatatactcgccatgctcaccaatcagatgccaactataaatagtaggcatagactagactgacatttggattgaccggtcagagtggacgtcagccatacacaactaccaaggccacatttagatgtattgattgaatttcaaccttgggcttaggagggggacacatctaaaatatattggactctgtttatagactactagacagtttaattatttaacttctctaagtctccaatttctcacttgcaaattcctaatgctgatctctctctctttttaaaaaatttcattggatgaatgttggagacctttttcttacattttgtgcttctttggatcttgattaatttcttcaactttttattccaaatgacgatactttaactgtgtttggactttagctgaattcattctatttttcaactcctctattgaatatttatttttggcactcatatttctaatttttaggaatgaattatttaattgcttctgtttcaggagacatattttattttctggatgttgtcacctctcaaatctctttaataatgctaattaaaaaaattaagttcctgatccagcaatctcacatctgggtatttaccccaaagatttgaaatcagtttgtaaaagagatgtctgtatttccatattcatttcagcactattcacaatatctatattggaatcaattttaagtgtccataaacaaatgaatggataaagagtatgtggaatatatacacaatggaaaactattcagccttaaaaaaaaggaaattctgtcctttgagacaatgtggatgagcctggaggacattatgctaagtgaaataagacaggcacagaaagaaaatactgcatgttctcacttacatgtagaatctaaaacaatcaaactcatagaagcagagaagagaatagtggttacatagctagcgggtgggggaatcttgggagataatgatcagagggtaaaaaacctcagtcagataggagaaaaaaaattttttttgagatctattgcatctcaaaaaattattaactatgtagttaataatatagtatgtttcaaatttgttaagaaaataaatttcaaatgatcccaccataaaaatgttaagtatttgaggtgatgaatatgttagccagcttgatttaatttttaaaattcgtattcatcaataataacatcacttcatactgtgttaatatacataattataaatgaccaatttacaatgaaaacttttaaaattaatttctcttttttgtgtgtatcaaagaattttggtccttatgtttcgggttacttgttttttgtcaaatgccatatgatgtttatgaatgaatggttatcttgattaataccagtaactgatataggcttcctttgaagttagatagttctatgaactgagtcagggttggctctataagaaaacagagttctatataagttggtgggatctattgacagtcagttgtctcacaaaagattatgcgtgtgagtggaaacagccaaaatttagaccttgataactgccatatagcaaggactttaaggaggagtgtgcttgattttaacttttgtgtttcctttctgcacgtcctttcaagttcatgtttttagctctagagtttgttctgctttttttctatggcctcagtacccatgataggagtcctccccagtcacacgtctcacttttatgaagcatttcttaggacttcaacatggggtaaaggcagaaccaatgaccctgtttatggagaagaaaaacccatcaaacaagctataagataatcctttaattaccataatgattgctctgaggcctggacttctgtctgaattggttggcccagaaaagtactttagtaaatgttttgttctattgggaccttttttgtttgtttgttttcagctcagttgtggattccttctcttatttactgttatttcaatggggttgtgagaagaaaaggaattaaatatgttcactgtattccccaccttgaattggaaatatttaaagactttaatataatattaacttatgtagaagtctttattaacatgcattaatatttgaaagtgcctcataaatcatgaggttctatgcaaagttaatgaatgaattgcccccttttaccattatcatcctccttgtcatcactaatatatccaacttctagaagttttctagtcctgtgctttttaatgaagaagatgagtgctatagactaaatgtgtgtgttcccctcaaattcataggttgaaacactaatccccatatgtgatggtatttggaggtgggggctttgggaggtgattaatcagtgatatggtttggttgtgtccccacccaaatcttaccttgaattggagatcccataattcccacatgttgtgtgagggacctgataggagataattgaatcatgggggcagtttcccccatactgttctcgtggtaatgagtaagtctcacaaggtctggtggtttgataaggggtttcccttttcacttggttctcattctctcttgcctgccaccatgtaagatgtgcctttcaccttttgccatgattgtgaggcttctgcagccatataaaactgagtccattaaacttccttttctttataaattaccgagtcttgggtatgtctttatcagcagcatgaaagcagactaatacagtcaggaaggcagagccctcacgaatgggaattctgcctcatattaaataaaagagatcccagccatgtgggaatgcagaaagaagtcagccatctatcaaccaggaaggcatcttcaccagaacttgactgtagtggcaccttgatcttagacttccagcctctagaactgtgaggaataaatttctttcctttttttcgtttttttaaattttactttaacttctgggatacatgtgattaacgtgcaggttacatgtgccaggtatacatgtgccatggtggtttgctgcacctatcaacttgtcatctaggttttaagcccgcatgcattaggtatttgtcctaatgctctccttccccttcccccacaccttgtgacaggccccagtgtgtgatattcccctctctgaagacagcatggtgattcctcaaggatctagaaccagaaataccatttaacccagcaatctcattattgggtatatactcaaaggattataaatcattctactgtaaagacacatgcacatgtatgtttattgcagcactatttacaaaagcaaagacttggaaccaatccaaatgcccatgaatgatagactggataaagaaaatgtggcacatacacaccatggaatactatgcagccataaaaaaggatgagttcatgtccttttcagggacatggatgaagctggaaaccatcatcttcagcaaactaacagaggaacagaaaaccaaacaccacatgttctcactcataagttcgagttgaaccatttctgttctttataagccagtcagcctatggcattctgttataccagccagaatggactaagaaaatgagctaatgtggaattaatggaatttcagacagtataacaagagaaagcaaaatattcagatactgtgagaaaagtcatagtagggggaggtgactatgactgagaaagaaaacatgtctcatcatctgcttttgaggtcagctgatccaatccatttgcatttttcataatttattacctccctcaattcctgaacacagattctgcatctactaagttttcctgtacctcagctggcttcatgggcagtgctgaaaggtatctgctgccctccctatgtgtatatgtaagttatttattgataagtgtcggtctgcctgtttgtatattcttttttttttggaaaggtttatttatttatttattttgagatggagtcttactctgtcgcccaggctggagtgaagtggcacgatctaggctcaccacaacctctgcctcccaggttcaagcaattctcctgcctcagtctcctgagtagctgggattaaggcacttgccaccaggtctggctaatctttgtatttttagtagagacggggtttcaccatgttggccaggctggtcttgaactcctgacctcaaatgatctgcctgccttggcctcctaaagtgctgggattacaggcgtgagccaccgcgtctggctgtatattcttttgtatcagcaagattctgagtagagtgggtgctagtcacataagtttagaaatattttttgtattatgaaaggaatacaagataattttagaacatttaaaagatacaaataagccaaaaataaaataattagccagtagatatttaaaattttagaatatgtatattttcagtatttttctatgtatctgtagacatacatgtacctatacacttatttctctgataagagcattctgtaaatggttgtggttttcttaacacacttagaaatatcttgataagctataacacttctctgcatcctttctcctcttcctgttccctctctcccttatctgtgtttctacagtgcacaaggatgttacacagaaagctaaatgtgagccaatatatttaactttgagaaaccagataaaaataactgtatcttaattatttgtttggtgtaggggttctatctgttggaccacacagtcatacatgaatttttttgtcattactaaattagtcagttaagagaggacatttgtttacttgaataaatatgtgccagccttgtactggaggaaaaaaaggtgttggttgtgctgttccttcctcggcttgcccatctggtaggtgttgcttcctagctaaattcactggtgcacaaggttaaatgaatctttaaaaattattagaccgtcacacaagtgcccaaaccagaaataagctagactgttcctcttactccttcattttaccaattcctttttattctatctcctctaaacctcttgattatacccatcttcttcattgctactacctttccttctggaacttagcatttcttatcttcttaaagtttccttctgtcctctccactctcctccaatttctcttgcatattacttctagcatggtcttttacaaatctgaccacattattccattttcagagagagaggatgagctctgaaatcaaacagactggatttaaaccctgactccacttatcaattgtatgatcttggaagatatctaagctttgcaggcctcagtttccttatttgcaaaatgagaacggtgatagtgcttatcttgggatcattgtaaatataaatgtgttcataagtaacaaatgcatagaacaatgctgtgcaaatcttaactgttcagtaaatgtcaacaattgttaaagaacttgaaatgtcttctgaccttctgcaggataatttctgaactttttgaatagcagaagaaaaccctgcaattttctctctgactgcaactccagtttcacctcttgcttcttctctatttgtatcctactctttgaccaaaataaagcacatggaatttgctaaatgtgccatgaccttcatgcctctgtacctttgcacatgctgttccctttgcttgaatatacatgactattggcatcaacagagatcaaaagatgacaaagatccagcctttctcacttccaggctggagcttgagctactccagcacactgcctctttcatcttttatgctactctcccaagtgtgttactgtgaacttggcagtggtagtaaagggctcgatgactgatgggggtgaagagaacccctaaaagaggtttttagtatatacgaacaaacattatattaacaatttggaacagcatggataatatgcctttttacctgggggcgtttgaacataactccatgtatctaaagaggactaacatcatgagaggtgttgatatgactgttgcagctgtgtgtttgtattttgcatgtcgtgggtggtgccgtcagcagcagctggggccctgctgttttccttctgttctactatgtggccctcttccttggggcaccctcaaccagacgagcagatctatattggctttggatctttctcaaggtgcctgctcttcctttcattagcgtggataatcagaatttgattgtaaagtatgcccaggccaaatacaagggcttttaaaatcgtctgctgttttagattatccaggccactgatcccccttccttagcgtggataattgagagtggactgggctgaagaatgttaagcagaaccaattgacaaaataaatgagattttaaaaatcctttagattttaataatagaaaaaagttttttttaaatctgaaagagcttattttatatttcaaaactgtaaatttattcggctttaaattacttcaaaataggaaaatatttcatatgatgcacccatttaaaacctatttaaaatgtatactaattacaatatgcacttaatggagttaaaggaagaatggaacatacagacaagaggttggaagtttctgattcaatgtgaaatcttcttataatcatgtttatatttcatcaaggtaacaaagagagggtaggagccacttccaaactctgaaaatctctctcttgatagtggaggctgcaattctttgctcctagtgaacaataatcatttagagacaggcatttaaaaatgtatgtataagatgaacagaattctgatttctgggaatatatgatcaaattcacctgtcattatttcatctttccccatgccccatgcccctccaaatgcaggtagaaatgtatttgcatgccatttgactgggaactgagaggacattttcccaatggaacaatgctgtaaacgggggtaggtgtcaataaatacccttcaggtgtgtaatgaggataaatagatttgggggtttgcctgggaatttgaaacataatgtaaaaggcaatggtgagtttctgggcaggtgactcataaacaagttttttgaaacattacccatttttacgttgggaattgccaagctcagccttaacgtctcccacaacacctatgaataatcatttaaatacaggctttgagacttggggaaaaaagcgtattatttactctaaagacaataatcttccttggagtcattgtagtccatcatgcagatgcatacttggggatctttggaaaagcaacattttctcttgatggtccattacttcatttatcttttaagttattatccaggactagattgcagacacaggttagggctgcacatcagccactctgtaacagtgtgggagactaaggttctttcacagggagaaatatgacaaagcggctttgctcgttccctattgcgtttgtgtgaagagcaggatacagtaatggaggtaatggggactctagtgcatcttttggttccttatagtgctgagaacttggcaaatgtaggcacacataaattcttgttcccgagtggtttgatgaagggagaactgagaggttctcagcacagatattatacagctgagaccaaatatccccctagggtcatcctactactctttccatggctgaaataaagaccagataccaccatactaaagctgtgatgtggttggcttgttgctggatgacttttctcatgcttggagaaaattacgtaagaagattgagaaaagttctatcccaaagatccgcatctgcaaagacgagcaagattgcaatgtctggattaagttctctagaatttaaagttctgtctcatgttgtatttggagacctggcttccctagcatgaagtgaataattaaattacattttattttttatgtagctagtagttaatcccaattagaaatttatctactgtggttactagagcctgggagtataaaggtgaacaaaatgatcacttgaatctgacattctggatggggagagaggcaggtacatgactacagtaggatgtgacagccccaacaatagaacagacaaaagggtattttgcggcagaggtgggcaggatggggaaataagaataaagtgtgtgaggccggatgtggtggctcatgcctataatcccagcactttgggaggctgaggcaggcagatcacgaggtcaggagttcaagaccagtctgtctaacatagtgaaaccccagaaaaaaattagccagatatggtggtgtgctcctgtaatcccagctacttgggaggctgagacaggagaatctagtaaacccgaagggcagaggttgcagcaaaccaagatcatgccattgcactctagcttccagcctggtcaacagagagagactctatctcaaaataataataataataataataataataataataataaagtgtgtgagattacttgtggtatctaaattgggttttatgaagacatgttttctgttttgttttgtttccaggaaaagacacaagaaagggcatattagcagaaaaaatattttgacatgagacataaaagtataaatacttctgttgtatttttggaatggtgtagtcatgtacagttaagtaggcacatgagttagaattctaatactttaggatgtattcgaatcacttggagttctaattaaaatgtagattgggggcctcatatgaaactataataacagtattcacagatgagggccaggaatttatattttttgtaagtgcctatatgattgttttgtagattgctcatgctttgataaagcctgccataggctgtgttttctgatgacggggttaatggcagaacctgaagccttatgtcgtgatgcacgtaaactgctaggctaaggaattagtattagcatcatgtgcattagctatttgacagccataaaatatacttagtcaaagggtgtaatacagtcaggtctgtatatttgaaagagttttgatggcagtgtggagaataaaccgaaagaaggagatacggagctggggaaaagttgtcgggttattgccatagatgaggcagatgatgatgaagacctgaatttgggtgtcaggaacagaatggagaaaaaaagagtaaaaaaacattgagggaaaaccaaaaggatatgttcataaatgcaatttagggcataaaggaaataggaggaagactaaggtgacttttgtgattatggtttaggtaactggctggctgaggatgccatgaagagaagtaaaacactagagaaggagcagacttggaggttgtgtggtagaaatttaacagcttcaatttcatttgagattccttagggtatttatagaaaattgtctgggaggcaactgaaaatttctgtctccatttcaggttggattttctgttagaaaaccacagctgatggtgaaagtcataatgaaagagaatgcttgaaagagggtgatagagggaaacaagaagagaagcaaagatgagcaaggttgcaatgtttggattaagttctgtagaagaattgaaaagtctcaggggaaacccacacagaactgacattcttacagaaccttagaatgactgagaaataactttagaacatttctagtctggtggtttttaaatgtgttttgacgtggcaaagccaggttttcaagcaaatctaacaaggtctttttgatcattgccgatggaacccttctttatgctgacaatctattgtcagatatgcaggattaaccatatgtagctacttttatcagtgtttagcatgaaaatttcagaaaactgcattcagggagccatgttgatacaccagaagaaatctgccaggactaaagaccgacccaataattcccgaggtaccttcaggaaagtcaatttatttttgagtcaaaggaatctcaaattatcctaaatggcattgcttccaccagagttctgttcttaatttaataagctgctacaagttccaagccaatgttccttcttagaaatatgctatgctatgggatgtaaatctttttaagtgcatttcattgtaccaattttttcattttgaaaaagcccattggtttattattaagtggtctatttaatagtgccaataaattctaaaactggagactaggcattgttattttagatgctttaatgatatcaattgtctaagttgcttggtcttggcttatttgcttgacctttgtctgttttaatgatctggaaaaattcctccaaactatacagagttgatatagtggctcttgatatatgatacaaatctgaaaatactttattagaataagtttactaatagtattcgaatgattgtattaggtctatacaatcaaagtgaagttgataactgcaaattttagaagaaccaaaagcttcaagtaaaaattcaatttctgggaggtggggtgggataagggttaaaaaattacctattgggtgcaatcttcaatatttggttgatgggtacactagaagctcaactcccaccattatgtatgcaatacccatgtaacaaagaagcaaatattttccccaagtctaaggaaaaaaatcgacaaaacccaaaataagatcacagttcaatttcttgtaaaataggttttacttattacttctgtgttttgagttaactgtaattatagaataactatccagaaaaacaactggacgattatactgcaaaatactaatacagagaggtaatataaactggtggtttttagtaccagtgattctacactctattgaagaccaaaatttcaaataagaaaaccaaaattccaaatttgacttcttatattcaaaagtaatgtggtcttgttcttgtttagtatctttaaggcttacttttctcaggttagtaacacctattggcagtttattggagtttattggcagcataaaataatttaggcagtctcttaacacagggcttggcttttaaaacaggacttcaataaatgctaacctttaccatcataatttttatcaccactattaccaccaccgttatcatcatcatcatcatcatcatcatcatccttctcatcgtcttcatcattgttgccatcaggtggcatgttagtttggatcctctgagaaacagataccaagatgatattgaacgtgcaagaaatttattcagggaaatgaacatcagggaaaatggggagggagccaggaaaggctatcatgcatgtctgacaagcaaaggagagagtaaaggaagaaagggagttggggtgaaccatttagactacagtgcaattcaaagggaagttcatcaggatctttggagagtccttgatccaaagtcacctgtcagaagagtcgcacatcctccacgaacaggcctactttcttagctttgccacactcagcattgactgagatcagcctggggaactgtggtgtcagtagaaatgctgtgacatgtttcagtgctcagtggctgaaggctcagtcagttatgctccctgagcttggaggtaggttttgtagtgtgtttctataggtgtcacagacaaaattgtgggtgattaaaaaatatcccattttttggtattttattaattatctatatgtaacctgcatttaatatttgagggaagaagtaaaataaataattaaaaatatttccttttgcttgggtagcattaactctttgaaacttgcccaaatctcacagtaactgtttagctttttaatttgcatgaatattctggtacagctctgctattacgtcaacagcaccttgccacgacaagttttattttcttgttccaactttttctatttagaaacctgatttgattagagtgtgaaagtttaagtgtttgaaacaggattcaattaaactaggtcattcttggggctctgaaaatggtaactggccttaggcaaatgagaacaaaagttataaaactcagttggatgcatcacaacatttagcatctttaaggaagacgtcttgcctaatagattcaatttagaaatatttagtgtaggtcatcagcttaagcacctaaaaaatgtgtttgtttgtttgtttctccctttagttataactagaatcggaacacctggactctaatctacaaaataaacaatttgtgctgggaccttgaagaaagtcaattagtttccgtgactttaccagtaggttaaaaaggagattgtaatattagtgaataatgtgcttagagatgtttgcataaaagatgctttgtcattgtaaagtattattgaatatttatggtctaccagactgagccaaatggcccagaggaaaaaacagttagatttatgtaaaccttgttcagtgtcccagatacttcaggatgggtgctctatatgtgaataaataaataaatggtataaatattattttaaaatttgaaggtacatcaatattatctggggtgttagccaatgtgcctgacctatgacattgaaatgaaatgtctgcctccaggtaactatttcaacctcataaatatttttaaagccagaggctttgatggcaagtaatgttttcttagagttttgtgtctgcaaataaaggtaaattatatctttacctaaaatctacaagaaatgattgtctctcatccaaaaggttgctcagagagttcccagattgaaattgtatatgttatacttctttccctttcttctaaaaaagtattttacttactcttgcacggtagttttctgtcacattattgtgagagatcagagcctcaaagaagaaaaaagttagccataaacactgcccaaggacttaatggatcttactgagccacaccatgcagatgtattggaacataaataggtataggagataagaggcacaaaagcaatttgtttggattgggtcactgcttaatccagatgggttcagcaaaagaattcatgaaacgtgacagtgggccaagaagaacttgctgtgacatttcagattcccctacttcttctaattaaccatttcaagtataacaaaacttatagcacatacaaatctagtgcaacccatctgtaccaagcgcagacctgtccgtggaggatggatggttctgttctcaagcaatggactatgacacaataatatctcaagttgggcttttaatttctatgatacattgattctgaacagcatttttctaaaagacaaaaactataccagagttgctttttgacatagcctgtcattaaatgcatttggatatattgcatggatcaaaatatactgcaagtttaataagatatttgaaaatataaaaattgcacgtagaaaaagcccaccatcatggtaatgatgagaataataacaacaatagctaccttttaaaaaaagcaactattacttgccagtcactatgccggacgttgtacacatgtccttacaaaaactttgcgaggtggagataattattctctttttatagaggaggacacagactcaaagaagtaaagttgtccagggtgaattagtatgtggaagatgtaaaattttttttggaattacagaaaaaactccacaaacccacattcctgcttaggcaagtcaagaattcttgcctctttagttgatgggtttagaataattttttcaggtgctaatatcaggatataacccatatctcttcatacacagttcttcaaatctacctgttcgcagcccttctttcttctcttgagaaatagaaactaggatttaaacctcagaattatgcctcagtatctacagcactgtagtgcctcataaatattagttgaaatggtaaaagaaagatacaattgcccctaatgcctatgatattcattagtcaaaagaggatggaattagcccatttccatgaatgtaaaatttatatatgtattctagaaaacatatatcaaaatggagttattttaaataagatgttcatatttaactgacaaacagaatcaatctaccgtgcctagttcatagaatagattcggggagtcaatttttgtgcttaattgtttgtacaaagaaaatctttgacttatgaatgataagaaaataatgaaaattgagttagtgcttataaaattctcgaattcttttgcttttgcaatcaagccaggcagatttctaggagttgaggtttcttagggtattttatgtttcacatgacgtcaccaagaagttacggatcaatagaactttgtaatgttcatgtagcagagggatgaaagagttaaaggatttaggtgttgcaaagggtgcttcttctgggcaacagaggtttgaatgtagggcaccttttgcattttcagcattaatgtttgaactcttgtcctacagttatgtaataagacaactttatttttttttaaaagagaaacagaaaaaaacgtctgctgagaaaaatacttgccgcccttggggacagattttgcagtacatttttgtacaggagtcattctctcctgtccaaaagctctggaacaggatgaatgtccttctcaaggttcttagagcccagagtcatgactgactacacgcatcagaagaaacacagagatgtatgggcaagattcagtgggcacacccacaggtctgagagatcactgggctggcgaggcattgcagccaggccgccagctagtctagaaaaagaaaccaggactgcagtcgtcggtagactagctagataagggtcggttccctcaaggactagttactctgaggtctgttctaaggggaggcagcccatgagcaaatatagcctagtatagtaggtataaaaactgttaattaacaataacatttatgtactgccccccagcaagtcagttttaaattcaacaaattttctcagtaactttgggaaacaggaagaccaggtgttatcctcattctcattttacatatgaggaaactgaggcacagggaggttgagtgaatttcctaaggtcacagatatagtaagctacagaggtgaattaatgtatggaaaatactgattgaaaggctggagagcacagactttgttcagtcacatctgacttacaattttagttctgccgactgctagatctatgaccttctctaaatccttgaactcaaggaaacttcagattcctcgtatttaaatggaagggagggaacatgagtagttatgaagcatgtaaagtgcttagcacagtgcttaccccattataagggctcaataaatgatagctactattactatcatgatgtttttttccactataccattccatccttccaaatggagctcagtttagcacagtgacagtcagaagctgaaaccaacttagagtgatcagaagctgaaaccaacatagatggatggatttgcctatccatatccagtctctatgttgcagcttagaccagcacccaaaacactaattgttatcttggtgctgtagttgacattctattttgtcatctgttacatgtatgttgtactagttatatctacgtttctagtttacatatttagtattccttagcaatgctctgatggatggaaagaagagtcgaggttttgttgcaaagacagagcaaagtgtctttcactagatagcgtgattcaatgcataaatgactgaatgcaaggaggcttaattgaaagataaaagaataattgctgtagaatagcagaggcaaaagcagctatggtaaaaagtcgcctgtcttaaacagagtgaaaataaatgaagagggggtttgagaagtctttgtagcaaaagatcataagaaaataaacaccagtgcaaggcaggagtccagaagaacaagtcccagaaccaagactgatatattcctgtcagaatttatcacttctctaaattaccaggtcagtagttaaattataatcacattctgttatatattatactggttcagtcaacaaatgagacttttaggaaatccttataaaaggaactttgtttctgtttcccaatgtccctttacacttgcttggtggagataactcttcccttccatttagaagaaaacgtaggtaggttctatttctctggtcaccttaaattttattgtgtactggatattttctatttgcctatccatatccagtctctacttttccttgctctgggccaacccatgtgggttggcatcaatggactccattgtcctttatcttccatttggacttgatcaatgggaaacattagcaagagatgggaaggtaagtgggaggagagaaaccgaagtctttaccctgctggtttccttcctgctggactgcagtgggttggctgtgtccctcgactaatgcctcctctcgtgctaggcagcctttggcaaactgctactctctgcaggttttgtaaaccaattctaccccagccccttcatgggcagcaatgacttcctgctgttgcaagccctgaggtactgcactattccttgttgctttccttgaaccctgctcacaccatcgtaaacagtctttttttaaagctttcctcaataacccagtctgagtgctgtctgtttcctgctaggaccctggctgatgcatatggacactttaaattgcaaaataccgtctaattttgatgcttagaataatctgactatgaagtagttaaaattccaaattgaatttagaattaagtctttcttagctctattggaagagggagcaaggccgtggttctttctctgcctcctcttatttctgcctgtttaccatggtttctgacctagttgccggagaggtaataaaatggaaagttcttaaggtggcatcacatgctctgatttcggtagatatttagagttgattctttttcttacagacatttgtgtggcccactgctgagaagtactctagtatcttagatgcaggtgatgctgtgttcttcagttcatcactttctctgtcctgtgggcatctagccatttaccctagcttccatttgttgaggtctgcagtggtctgagcagccacccccacaagatatgtctgagtcttaacccttgctctccgtgaaagtgaccttctttggaaataggatttttgcagatataattaagataaagatctcgagatgaaattaccctggatttagaaggagccctaaattcaataagtgtcccttatgagagacagaaaaaaagaagacacagagacacaagggggaaggacatcagaagacaacagcagagactggagtgatgcatcaagcagccaagaaatgccaagaattgcagcagcaaatggaaaagaggcatgggataagtgcttacttcagtgactgcagaaggatccaactccgccaacatcctgatttcagacttctgggctctacaactatgaaagaatacatttgaattgtccgtagtcatcaagtgtgtagtgatttgttacagcagcagtaagacatgaatacaaactctgtttgcctttgtaggcctccttggagagatgctaaggcatcactgtgcttactccttcacctgtgccgtgtcttgtccaggggaaacataagcacatccttttctcagtctctagggctgcaggaagatcccaacccagcttcagttttcctttgcttcttctttctttcatcatctttgtttctttcctcttgttctcttcctgggttcttgattcattcagtagaagttaagactccaattcatcatattcctttaactgaagggactcataccatgacctgtgagtagttcatttgagtgctgaattagtcttccagggctgctctagcgagataccacagattgggaagcttaagcaaccgaaatttattttcttacagttctggaggctggaagtccaagatcaacgtgctagcaggcttgttttctcaggaggcctgtctccgtgactggcagacgtccaccttcttgctgtcctcacatggcctttgtcctatgcctgcatccctgctgtctcttcctcttcttacaagtacaccactcatattggattagggccgcatcctagtggcctccttttaacttagttccctctccaaaagccctatctccaaatatagtcatattctaaggtattgtgggttagaaattcaacatatgaattttgaaggaacactattcatagcaagtgtccacctttaggttgaagtgaaaggaaagtaatcatcctccctttttctttgaggcatgaaacgcacattacacggagagttctgttcaaggaaaatacctcttgaaaatcctcattaatctccaccgctgatgtgggtgagagagtcaggtgttgtgacccctgtttgggaaaatgcatttgtgtttgcagcttagaccagcacccaaaacactaattgttatcttggtgctgtagttgacattctgtcatctgttacatgtatgttgtactagttatatctatgattctagtttacgtatttagtatttcttagtattattcatcttagagttgttttgatttatctcaactcagttttctaaatctcatttcagagtctcacttaaatactgttaagtacttaagtgaataaatggaggaaagagagagagaaaggaagagagaaagaggaagagagagagaaagagaaagagaggaagagagagagtaaagtcattcagccatctagtctatatttcttttaatgtcaggaaaccagttatttagataatgcattaaattaataaatatttatttcagtttggtctgttttagtgatcctttttaaaaacaaacaggttatagctatgtctacagagggaatatgattgtgtgtgtgtgtgtgtgtgtgtgtttgtgtgtgtgtgtgtgtgtgtgtgttagttagggagggtggtgggagggaatgtcctggtaggaagaacagggaaaggccaatcttaaatgaatagttgtccaccaagtcaatactttcaaaatatttaagacgagtttggacacttatatctcatgaagtaactatgtaagttgtctaatttcacacagtcacccagtcacccatactttgaagaaataattaaacttactgacaaaactgaattccaactccttccatatgttaagttccacagtgagataaaagcaagtatgactaagcttgagtcttttatcctgggaatgtaatttatttctcaagtcctagagatactggtcttagaaggactggggagctttatttcttaacagagaaatctttaatcatgtcatttgtctaggaccattcctggtgtaaagattcttgaaatgctgagttgattttagggtttcactgtgtctttgtgaatgagacgaccgaacaggcacaatatgcctaaccaaactcttatctattttctaaggtagaaatttctgaaaatctggacagtgaactctccaattgggaaaagtccattttaaagcatttagctgcattaaagatgtttattttcttaaaataacattagtaacacatttttccttaaaattattttgcttttatttcctgcttaatctaagatttacttcagagttttttaaaattccaagcacatagattggagaagatggtacgtagacttatttttttattgttaatctttcttcctcttttctcctttcctctcgctctcttctctccttcctacttttcttttgtttttccttcctgctcttctttttttccctctcttctgattggttgtcagataatgtagcctgtatgaattatatatgagtgaaagtaattttattgttattgttgagtatgaatttctgtctctctcattctttcatatgtatatgtgtatcatttgtatgtgtgtatacgcatacatacacatataaatatacaaagacatatatacacatgtgtgtaccatacaattttacaataattttattgttgttgagtatggatttctgtctctcttattcttccatgtgtgtatgtcatttgtatatgtgtatatgcatacatcacataaaaatatacatagacatatatacacatatgtgtagcctgtatgaattgtatatgggtgtttgaaaataattttattgttgagtatgaatttctgtctcattctttcatacgtgtgggtatatcatttgtatacacatgcatacacatataaatatacatagacatatatacacatacgtgtgtaccatggagaataactttacaaactattttaatcaaattatctttttctttgtcagtttctgagagaaactctctcattgtgttagtgcagttttcaacatattcctgcatctagggaggtttttatctgtagatttcaaaactcgattgttagatgcataaaagttattctatatagttttagtacactgtaacttttaatgtgaaaatattactactcattcaatttaatgctttctaattgtattaatttaaaatattaatattgctaattgtactttttaaaaatatttgcacggtaaatacttttttctcttaacccttacctttgttcaaacaggaatatttaatgaattggtaatttttgtgcttaccaatatgtttcaacttcttttggccgtattattatggtatattttctgtgtttttttttggtttttatttttatttttatttttttaattttttttgtttattattattatactttaagttttagggtacatgtgcacaatgtggaggttagttacatatgtatacatgtgccatgctggtgcgctgcacccactaactcgtcatctagcattaggtatatctcccaatgctatccctcccccctcccccctccccccaccccacaacagtccccagagtgtgatgttccccttcctgtgtccatgtgttctcattgttcaattcccacctatgagtgagaatatgcggtgcttggttttttgttcttgggatagtttactgagaatgatgatttccaatttcatccatgtccctacaaaggacacgaagtcatcattttttatggctgcatagtattccatggtgtatatgtgccacattttcttaatccagtctatcattgttggacatttgggttggttccaagtctttgctattgtgaataatgccgcaataaacatacgtgtgcatatgtctttattatggtatattttctaatgctatagtttccttttgtattttcttctcttctagcttttcccccgtcattatgttttgctttactctttttcccatctagtgcagtgtttcctaggagaggtgctgttgacgttcaacatggccgtttcttgtttgtgttggctgctctccactttattattggctgtgccactaaatatcagtagcatcccagtcactgggacaaccaaacaacacttgttcctttccacatgcctccaagggatgtcataccactctgaactgcaaataggtgctcactactttgggatctaaaagtctgagttctcttctcttgtggttatctttatttttctaactgaatgtttagttttgtctctgtaatatatgtgtatggtttaaaaattgaaatagaacattgagagtcataccacccaatagcaaagaatcatcatcttttttatcactctacttcttatgttcttgaatgccaacacttttaattgtatttacttctatgtaaatacatgcatatatagttatttgatttttctagttgaaaacatgacattgacttcctattatatacgatgaattttttctttttctagtctgaatacaacattatacaaagtaaactttctcttctccatttttctaatttggttatttaacaaattttgtttaaattgtgactcagttcttacatcatttttaatgtaaatattgtgcgcaactgagccactaatgtcctaagactaattttttttcagtagagtttttgtttggtctgagttaataattgtctttgtttttgttgttgtcttttatttgatccttttcttaattttttgcccactgtctgccagaaatgtaaattccgtcttgatttactcaaacacatcagaaactttgtttctttttcttttcttggagggatccttctggaaacttccatcctcctgtgacttaataataaaatgtgcttccatgtggtgtggtggtttcccttgtgactttggaggctcttgtcctgtcaggattagtttagggcacagagtgctgcttgcagatcaaggcatctttgcttaccacagcctcaaagctttccataccatacttatgtgtaatactcttaatgaatgttagttgtaaaaataaacaaaattttcttctgaaagaacaccaaatcacaacttatacgggcattgacttgaacttttagtcacattttacctttcaaataaagaattttcaattacttacgagcacgacaaagataacttctgcacgtgtctgtgaagcaatgagacagtaaacagcagtattcgtattttatgtgaagcacaccccacaaaaagcattttactgagcgtgcactattttgatacatgattcttactactggagggacacagacaggtcagtaaaacatggaccctgctttgacagagctcaaactaaaggaggccaaagaaaaatgtttttaaaatgactcagccaggcgtggtggctgacgcctgtaatctcagcactttgggaggccgaggcaggtggatcacgaggtcaggagtttgagaccagcctgaccaacatggtgaaaccccatctctactaaaaatacaaaaattacctgggtgtggtggtgtgtgcctgtaatcccagctactcaggaggctgaggcagcagcatcgcttgaaccccggaggcagacgttgcagtgagctgagaacatgccactgcactccagcctgggtgacagagcaagactccatctccaaaaaaaaaaaaaaaaaaaagactctagcactatgcgttatttgcagggtgggtgttcagaggaggatgtgataatggtggggagtcagaaatgctgccaaaaggaggcaatgtggtgatgtcagttttgggtttggaaggaagaataaacagacagatagacagatacatgtaccccatcccccttagttatttatttcttacttgacatgatttcctttgtgcaggggtctattaggtctgtgacctcgcaaaggcattgttatggcaattgttaaagtgataggataccatttgtaatggtgttttctatatcaggaagctgagggccctacagaccaagttatacaagccaagacattgattcttaaccacaggcaagtatgcaaatattaacagtattttctacatgtgcattctggcatcaatagggaggccacagagagaagaaaaaaacaaacaacaactggtcatttgcattcagcctaagggaggagaaaagaactaatacattttgagcacatattattaaatatctgccatgcacactactaagcatttttgctttgactactagaaccctatgaagtagatagtatcttcctattttacacacagagaggtcatgtaaatagtaaggggtagagacaagacataaactcatttatgcctgcctccagagcctatgctcttttcataatcctttgcaacctgggaagtctttgatatttgataaaatatcagtattttacttttttgtggaaatcccttctatgttctaataggataatttcaaacacaattttattttcttccaaattactaaaaataaaacacaggatcttgtcatttcttgccgaacatattgcaatatagctaactggtctggtttgggtctctatgccttctttctccaatcaccccagcacagccattgaagtatgcacttgctttccctcgatgagaactcttactcatctttgaacaccctggcttaaaatgttttctcttgggcaagtatacctgactcccaacaacagaattaattattgaatgcctgttcattaattttcccacagtttttttttaaaacaggttttaatacaactcttaatgtagtctaagaatttctttgtataatatctactagattgtgagacccttaatgagacctcacctaagttgtaagtattagtaatggtctccaaggaggttaatctattggtgttgataagggaggactctaagggtatcacattttgctgttcggttatcagctatgtgatcatgggaaatcaactcaatatttacatgccttggtttccctttgtacttatttggaataatcacagtgcatttttgaagggttagagtgagggaaacaatgggatggttgaagtaagctgttggtgtagtgttgacagaaaactagtgctcaataaatggcctttactatgaacaatgaaattataaaattgattttgttagatacacaatagataatatttataatatctgtatatagtattaaaaatgatatttacctactcccacatttccagaacctccttcaatattgtctgtctagccctctgcccagtggtatccaggaaagtgaattttgcatttatcaatttttttgcttatatggtcttgctacatgagaatgtatagtgtgataatttattatttaattttacatgctttgggacactatataaatggcaatgtattatgtgtattttttgcaacttgctttttctctctcattatatttgggacatttatgcacattgatctgagaagtagttcagtcttactcctgtacagtctttcattatagaaatatgctatagtttattgatttattgtcccaacaaaggaaatttgggttgttttcaatggttttctttttttttcttcttcttcttttttttcactgactgttgcattcatggatatatatgtctcctggtccattgtagaaacagggtatacaatggtatgtgaattactcggttttggtgtatgtgcttctttaattttagtagatgtttccatactgttctcccaccagcactgtatacacatttctgctgagcaacaacctctcctacactggatactgcccgacttttaaatgtgtgccaattgtgtaggtgtagaatggtgtctcattgtggctttcatttgcattttccaaatttttaacactctcttacctttttaaagaaatgtttactagccatgtgttttcccttctgtgaagaaattcttcacatctttcatcaatttttctgtagtctcgttggcctttttaacggaaatattcaaatataattgcggatttcttgcagttctgtaagtttttgctgcgtgtatgttgaaactctgttatttcatggataaacatttaggattattagggcactactcctatgtgagttctgagtactgtcacctctaatccttcgggtgatttttcaatcaaactcagatggtttcttcacgcatgtgcctggataagtattctgcatgctcaagtgcgaccttctatggtttttgttctctctttggaactctttccctctttggtgctctgccctgagaattctagacatcttggtctccctgggtcctcagctttgtctcctcagcttaagaagtctgccagactgtgggtttgtcctctctgtgctgtgtcctggaaacttcacaaggtaacacgatggagcagttgtagggctcatttgttccctggctgtggatgatccctgttctttgttgtctgaggccaaatgtcttcaatttcactgtgtcctatattttgtttggttttcaattgttttaggtgagagagtaaatctagaccctgttactacatcttggcagggagaagacattcaggtcttttgtattcatttttaggagttctttatgtgttccagataaaagttcattattagtcatgtatgtagcatatatatcctcttactttgtgccttgcattttaatttccttaatgatttctttttgtaaatactatttcttaatgcagttgaatttctgagttctccccctttaggtctaagctctttgagtcttttaaagatcttattctctaacctgaggttacaaaaatattctgtgttgtcttctaaacattttagagttttcctatttaatccacctgtttattgtgtatatgtgtagtgagtaggcatccattttcacgaaaaaatatataaatcaattttcccagcattatttactgaaaagtccctctttactgactagaatgccatctcttttgtatattgaattttttatattgaatatgcatggtattattctggggtctctattaagtccattgatctatttatgtgggcctatgccagtgccacgctaagctacttattataaatttgttctaaatcttagtatattttaagataagtttcatacaatatttttttgagagattttaaatactcttggcccatttatatttcatacagattttaaaatcaacttactaaattcctttaaaaaactgttaggacgggttggaattgcatagcatttatagatcactattaagagattcagaatctggatgacattgaatctttgtattcataaacatgatattccataaacaaatatttagatattcttgaaagaaaattttacttcctttcttatctttcaataaaattttataattttctagacaacatgcttacactttattatatatacatttaggtatttttgctgctatttatataaatgttatattttataactgttactttgtatagaatgcattgtcctttattaattttgtatcaagcaagtttactgagctaaactctataaattttattctattttaatttattttattttaagttctggggtacatgtgcaggatgtgcaggtttgttacataggtaaacacatgccatggtgttttgctgcacctatcaatccatcacctaggtgttaagccccacatgcattagctatttttcctgatgctctccctcccccccatatcccctgccccagttaggtccctgagtgtgtgttgtttccctccctgtgtctatatgttcacactgttctgctcccacttacaagtgagaacatgtggcgttggttttctgttcctgtgttagtttgctgaggataatggcttccagctccatccatgtctctgtaaaggacatgatctctttcctttttgtggctgcatagtattccatgttgtatatgtaccatattttcttgatccagtctgtcattgatgtaaacccttattcttataattcatccttacatttttttggaggttttacataggtaatcttacagttaacaaatgattgttttgttttgttttgttttttcctctctggggcttatattatttagttagttttatttcagtgtacctctaattaacaaaccttatgtaatgttgaatagaattgattatagcagacatccttgactttttcttgatcttaaaaagaatgttttttagcatgtaggttttttgtaactattagttactacaatagggagattgccttttatttccaatttactaacacttttattcatgtatacatatatgatgttaacatttgtatgtattgagatgaccacacggatttctatccattaatcagtgtttaattacattaatgaattttctaatgataaactagtcttgtatacctggactataactcagatttgtaaaacattcttttttatacctgttcaatttggcaacctgttattttatttagcacatttgcaactgtgttaatgagtgagattggcttatgctttttcctttattgtagtaccattttctggtttggtatcaagattatactagtcacataaaatgaagagaatatttttttctttcttattttctgggagaatttgcacaagagtagaattttttgtttgtttcattttttaaatgattgttggaactcagttgtaaaaccaactggtctggcattttctttgtggaagattttactaccaataattagtaactactgatttaatttcaagtttttcatttctatttgagccaaccttggtaagttataattttctagatttgtcatttccatctaacttttcaaatgtattttataaagtttttaaaataacatatagatgctgtcagtttaacctctgcagcttctttagctatgttcccctttgcatttctaacatttatttttacctcctcatttaaatacatacacacctcagatgagtttctattttcttagacttttttttaaaaaccatctgcttctgttaatctctatcctgagttttttttgtttttttttttttttggtttttttttgaaagggaaaaaaatttttttaattacaaactcaattcatttggtgcatttcaaaggtgcaatacttttcttcatttatcagtgaaagaagttagaaattacttggtgcatttcaaaggtgcaatacttttcttcatttatcagtgaaagaagttagaaattaacttcccaaaaaaatcagcaaatggcaaacaaatgtccttgaaagtcacagtcacatatagtgcgtcctagaaaagaggaggggcaagacgggctccacccactttcatgagtttcatcaaatactggatctactcaagggtggagagaaaaggcaactttcaaaaaggagtatgttattaaatgaggcatttactatactccttcctaagagcaccagatggggaacatgttttctaaactagatctaggaaatggaatgtggaatcaatccgtcctcctccccttaagggctaaccactggttaatgaattaaaaaaacaagactaaaaaacaaaccccacacacactcccccccaaaaaaagaggagggaaaaaaaacaaaacaaaacactaagatgtcccagattactctccagagtggaaccagggagcagcttcaacaattccaattagtctgttacagagtcatccataagcatgccttgcttttaaacaaaacaaacaaacaaaaaaacacacacaaaaaaattttttttgaaacaacaaaaaaaaaactagtactaatcacttttctgacaatacaattactcaaaattaactagtactgggagggggaagggggggccatacctatgggccttgtctcacacgagtgcatgtgggtaggtgcagggcatttgtcattattggaaaaacgaattttaatttttaatctttagtttgatttaaacattgcttttagtatgatgccgacaccagctgtgcagaaagggctctggagagatgttcatagcagcacacacctgcggctctttttcggttctggaggctccagggcagccaatattgcttcgtcaaatacattctttaggcctttctttgtaagtgcagaacactccacatacttgacagccttcaggtcacgggccagcttttcagcagtctctggagtgataggcttctgtttgttcttggcaggtttctcaatagtagaggggtcatctctgagatcaatttgagtcccaacaagcaaaaaaggagtctttggacagtggtgagttatctcaggcacccacttttctttcacattttcaaatgaagatggagagaccactgaaaaacagactagaaatacatctgtttgtggataactcagcggtcgtaatctgtcataatcctcttgccctgcagtatcaaaaagtccaagagtatatggttctccaccaatcataactgtgactgcatagttgtcaaaaacagtcggtacatattccgatggaaatttgtttgttgtgtaggatatcaggagacatgttttactaacagcaccatcgcccacaacaacacacttaattgtctgcattgctgaaatagttttgtatccactttaaatatttcaaatctgatgttgacctcagcttctccaccggggcgttcccctgagtttttttttctatcttattatttctaatcttaccttagtttttctctttctgtttcttagtttctccttctgttttctttaccatctttctcttccttctatttttcctcttcctcttcctctcttacgtgattagctcaataacgttgaagtttgcttgttttctaatacatacattaaggctttctgttttgtcaaggctttctatttaagtaccacttaaaccagatgacacaatgttttaatattttgtgttatttagtttttattatatttttggtaactactattatttattcctttttttcccttaagttcttcctgtgtgcattttcatatttctgaacttttggggtttcctaattatctttatttattgaattctaacttaattggtcagaaattgttatctgtatttcctcaaacttgaaatttatgaagagtttatttacggaacaatttgtgcacaactttcatagtgttttttgtctgcttgaaaagtatgtattcttcaattatagtgtttgttattttgcaatgttatgtatatcaattagatcaaatctgttaatgtctgactcttttcagtggctgagaaaggggttagttaaatcctcccattttggaggtggatttgacaactttttttcagttatgtcaatttttgcttcacatattttgaagccatattctcaggtgcatgtatatttaaaatagttttatcattatgtagtgacccatgttctctctagtgctgctttttaagtcttttttaatgctgttttatttggtggaggggcagagtatcatattttgacttttgattttcttatatctccatgttttcaaagtgtgagtatagtaaatagcatatcattggatttttaaaatttaacaaacaatgcatgttctcactcctaagtgggagctgaacaatgagaacacatggacacagagcgaggaacagcacacaccagggcctgttggggggtgggggtgaggggagggaacttagagtacaggtcaataggtgcagcaaaccaccatggcacacgtatacccatgtaacaaacctgcacattcttgtacgtgtatcccttttttttttttagaagaaataaaggaaaactaaaataaaaaaattaaatatggtactgaagcaaataaaccactaatagctgaaaaaaaaatttagtctgacaatgtttgttttttcaccgagtttacttcattgacttagattgttagaatggatcagttttattgtgtcctaccatcttactttatgctttttattttgctaactatgtatttttcatttttttattttcttgctctttttttttatgtatttacttttccgcagctgtcatgatcagttaacttctcattgtgaaagatgaggatttatctctttgttagttttctttccttctatcttcctatctccactactacatgaaagattccaacaccataatcctccccaaataatcagattttaattgtatttagatcagtggtcagggtttacctcattgtaaccactgaaacttatttacacctgaaccacatagtatactatcattatttttattttccagaacaacattttcacacaaagttaatacttgttttctatttgttcattttgttttctgtgtgtttattgctaaataaatctaatactttttatttctatacattttctctcattctaacatactagatagccctactcattagtgatgtaaggaatctttcatgtacttatcactactaatcattagggaaatacaaatcaaaacaacaatgagacattgcttcacacataatatgatggctactattaagaaaaaaaaaagcaacagaaaatttcaagtgtcagctaggtcgtggaaaaatagggcatcttgtgccctgttggtgggaatgtaaaatggtgcaggtgctatggaaaacagtatggtgggtcttcaaaaaattaaaaagagaattaccgtgtgacttagccattcctcttctgggtatatgcccagatggtctgaaagtagagtcttgaagagatacttgcatattatgtacatagtagcattattcagaataaactggaaataacccagtgtctattgagaaatggtggatcaacaaaatgtggtatgtacgtgtgatgaggtttcaccaagccttaaaaaggaagaaaattctgactcacgctacagcatgaatgaagcttgaggacattatgctgtgcaaaataaatcagttacaaaaagacaaatactgtgtaatttcacttttctgaggtacctagagtagtcaaaaccagaaagtagaatggtggttactaggggcttggaggaggaaggaatgttgagtaattgtttaatttttgcaatgttttagttttgaatatttaaaaaactctggagaaatgatagtgttgatggttgctaaacaatatgaatatatttcatgtcacagaactatactcttaaaaatggttatgatggtaaatttgatgtgtattttaccacaattagaacaatatttttgttagttcacgatacacaataaaatgattacagattgaatgaggaagcttgggtggattcagacaaaaaagattggcaaaatgttgaagactgctgcagatgtgtgacaagtacatgggtttcatgctattctacttttatgactgttgaaagtcccatgataatttatttttttaaataaaacttatgtaatggttaattgtatgtgtcaactttactgagctatgagatgcccacatagctagtaaaatattatttctaagtgtgtctgtgagggtgtttctgaaatagattagcattggaattggtagagtgagtggagaagattactctcatcagtgtgggtgggcatcatctaatcagttggtttgaatagaacaaaaggcaaggaagggaaaatttgctctgagctggacatttatttcttgccctcatacactggcactcctgattctcggactttcagacttagattcagttataccaccagcttaacagctttcctcgttctccagaatgcagatagaagactgtgggacttcttggtttccaaaattgagtgagccaattactataataaaactatatatctctaccttattggttttctggagaacccagactaatacaacatactagatattctatttgtatcatcttcttgaggaaatagctctcacagcctgtcgcctgctcaaacagactgggtactccctgtgtctactgcatagctatcatcctggaagtttccctttgcctttatactcctgcatgagtttgccaggactgccaaaacaaaataccttttgtctgtgttcacacattcctgatctctctctctctttttataaggacactagacattttggattagaccctcacccttataacctcatttaacaatcattacctccttcaagaccctatctccaaatccagttacattgggggttagagctttaatatataaatttcgaggggctacaatttagtccatatctaatatggtttgaccgtgtccccagccaaatctcatcttgaactctagttcccataatccccacatgtcattggaggaacttagtgggaggtaattgaaacacaggggcggttacctccatgctgttctcatgataatgagtgagttcatctggctttactctgcacttctccctgatgctgtcatgtgaagaaaggcatgttggcttccccttctgccatgattgtgaatttactgaagcctccccagccctgagggattgtgagtcaattaaacctctttcctttataaattacccagtctcaggtatatctttattagcaacataagaagagtaatacaatatcactcagtgattttgtcaatttcttctcctgaatttcttttttcctggatcctagatctttatctttcttgattacatcattgttttagtaaaatgtatcctccagtaatatccaaagagaggaaatttttgagagctcatgtatctgaaaatatctttttcccattctcacacttaatggtttgatggctgaattgtggttacaaatattgaggagtaatttcctctctccacccaagtttgaatcaagctaatttttttgttctctctttctgcaggttgggtttgtctccagtttttttttgcaaaggatatgaagtccttgcataccagctttttgtgaccatctctatttatacttttcatctttgatgcatcttagactttgtctcctttctcccttgttccacaagccattaaaatgaaagctcagatggtctgaacttagcagacactcccagtacaaaagcctgcatcactactcacatatgcatctaaattacccctcgccctttgtgtttgggtcacctaacctcctgctagagtaacaatgcattaaaaagtgtatttcctatatgtaatccaacaatcataattgtttggagaatggctctgagtatgcagtccacctggaaacagtagtcttattcatcataaaggacatcatgcttttagaatgtgggcataattgcaacgggagaaaatttctaatgggcaaatgagttattaatatcattcatatagtaagatttacattaaaactactaacaaatattggcctttatatgatttttatccaatttcagttataattgttagttatcaatttgaagattagttttttttagaaacaatgttgtttagttctgctttgtctagcctagtacatgtggagaataagcgactccacctcagtacatgttcctgctaagtgacattgacctgttaaaattgtcaaaacttgtttgagttatgttacttgtactgctttccaaaatgtatagattatgttttgcacttcttagtcttgataaatgaagtagtttggtcatcagctgactttttcttcatcactctgcgtaattattactaagagcaacatggtccaatggcagaatcttagacttctaagatctgaatacaaatcttagcactgttacttcctaatggtgtgatcttattcaagttagttgtaagtgatgtggtgaagcccgcttgtgctggctcatgagagcctattgagtttttgtgtgagctgattctttaacacagactttattaaaaattacttatataagcttataggtaaattatatcaaaaacaaagttagtaaatacttaaaatcattacttaactaattaccaaatttcactgttttctatggccttgaggtaatttagatctcttgtatttgaataggagaaacactgtaatatggtgtgctgctacggctcttcttttcccagctctgccttcacggatatcatggttgcagaaattggctgatgctagaagtcattatttgatttattgttttgctagttgtctagaccttagaaagtgataggaaacatgttaataatatggattcaacttaaaagtgtgtcatgtctgtggctgtggtgttgtgagtagcaccaaaaattgaggagacagttaccagtgtttgaaaactgttacctgattcaacaaagaagtagctcgtgtcagtggtaaaaagtgaagttctggtacatcttttgtcttcttttccttctacctgtgaatataaggaaaaatattaaccaaaagtcatatgataactacatgcatttgtcaaattacaactgtaggttggctactgatatggtttggctctatggtgcccccgcgccctgccccaaatctcatcttgaattgtaatccccgtgtgttgagggaaggtcctgtaatccccacacatcaagggagggaggtgattggatcatgggggtggtttcccccattgttctcatgatagtgaatgagttctcatgaaatctgatgggtttgtaagtgtttgaaagaaagcgctcctccttcactacttctctcttttttgccaccttgtgaagaaagtacctgcttcctcttccccctgattgtaaatttcccgaggcctccccagccatgcagaactgtgagtcaattaaacctcctttgttcataaattacccagtctcagatagtatctttatagcagtgtgagaacagactaatatagctaccaatatgactttgccaaaaatctaaaagagcatcctatatgagaatcagttggttatatggagttcacagaaaagggcattgcatagtttattatttgtaaattgtgtattatgcatactttatatcagcaaaattgataataaacatatatacatataggtctatacttattttttaacatatagccagttaaatatataccaatacaccattgcttaagctgagattaagctttttcatgtattaaatcaatcattcaaaactatgagcatcatacttcaaaaattttagttttgtgtttgttcctatttcattctatgaataccactcttcttttatccccattcctctaaaccccatatgtagacataacttgagagtcactggattgtgtaaaactatttgcttctataattacatggctccaaagtaaaatactttcgaatattcatagctttttttgaatagatatttagtattctaccttgatatcaatgaccacttttgcttttgtcagagctccttttagcagcctcttctgtatcctcatggcgccgtccatgacttatcactcctgctgtcctgaggttggaactggagactatacctaatccttttagatctgtgcacaaaatatgagtatgtagatgctcaatgaggtaattgttttcatctattttactccagctgtgacctcttttcttacatagtaattataagatattatatattaggcttatagaaagggattgccaaaaatgtaataaacagcccctcatataccttctaccttgtttaatgagtgaaacataagagatgcatttgaaggccctgtagacccctccatggttccacttccttctcttttcctcaaaggtaatcactcacctgaattgatcattcccaggcatgcgatacttctacctcacatgtatatgctcagaatatacgtggattgttacatatatttttaaatatataaaatatgataaacatactggatatgttcttttattaaattaatggactttatattttagatcagttgtaggcttacaggaaaattgagcagaaagagacctcctctgactccagcccacacttggataaatgcccttccctcgtttctgaaaaagaaagggcctttacattggctgttacgtaaattccccaaaacatgagacacaacatagttcactctggtatcccctgggcttgttatcctgcttgacacataatatttgttgagtcaagggcagtatgaatgaatgagtttcagatagcaatatcgtataagcagtggtggaaaccagggctccctcccctccagagatggactggaccagcacagcctccattgtcagagaataggaaaatagggtttaaatgtcaagggccacacataaagtcccaagatcctgtcacgcataaggacaaggcatgttagtcatggccagggggaatgtttgcaaggaggagatgttttcaactcagatattcataagccagggcctgcctctgtttaccagctgggaggtcttcagataatgaaacatgaaagcctgctatgcagcggcgctatgcaataatttttcatttgccaccagtcagcttcagggatcaaggacagctaaacacataatccgctcatgcatgttattttaaaggcttatattttaaaggttataaatatggtacattgagttaatgaggtatgttcttttggtgacaaatatttacattccacatatgcctcttgatgtcaagagtgtaactgtttcattttcttctttttctcaggaggctgggatgcagatggaaaaggcccttgtgtctgggacacatttactcatcagggaggagagagagttttcaagaaccagactggcgatgtagcttgtggcagctacactctgtgggaggaagatttgaaatgtatcaaacagcttggattgactcattaccgcttctctctttcctggtcacgtctgttacctgatgggacgacaggtttcatcaaccagaaaggcaagtgtttcttaaaaatagaaggttgcagctttaattcaaggttattgctgcagtctggcataattaatccagtatgctattctgcaatgtagctttcaaattgcaagtttttagagtgattatgggataaattttttgaaatgggtttgcattagttttcacagtaatattttggttttctttgactgttgagatcttttctgggggtgatgagtgggagggaggttagaataagtgttttattatgtaacgtgagtgttaatctgaaggtaaatttaaaaaatttgtattaaactattttcagttgtgtaaccctgtgatgagttatgaaaagtcctgaagaacttgagatgattctaagcacttcaattagggctgaattagtggagctaattaactagcatggggttaacaccaaggcccctggagttcacttactgaagattaagtccagctacatcacttactatctgtataaacatctcttgggcatctctcagtgcctcagtttccccatgaacagaaaagaatgctgtaatagtgactaattcagagagttgttggaaggttaaatgaaataatctttgtaaagtgcttaacacggttgctaacatttcaaaagcatttagtaagtgttagctattcttcttattatgccttgtaagtaaaaggaccagtcattgctctattgaatgcctgttatttatgaggcattttcacccattttctttaattctcaccaacagtagggaaggcatagtgatcatattttacagaggtgtatgtccaaatccacatatttggcaaatggccgctcagttatttaaacctaaggtctagctagctctttctacaaaacatggttggaaaactatgacctgaaggtcaaatgtggcctgtcatctatttttgtaaataaagtttgattgaaacatagacatgcctgttcattatgcatcatctatggttacttttccactttaatggcagaattgagtagctagggcagagaccatatggcctgcaaagcctcaaatatttgctatctggtcctttacaggaaaagtttgccaacccttgcactacgacatatggtttcttaatgaagacactttattactactttgtcttagaaaagattttacaccatctatggtgctgggactaggtgaagcaatgaggtgtctagggcataaaatttaaggagagcctcttaaatttaaggacaggcctcacttgtatgacctaagagaacacctgcttgcctcgccatgcttcccatcccaagaaccttcattaatacaaaggcattattcgtgagtaacttatgtgattccctatatagaacaacccttgatgacaattcctagatgggcttgtgcacttgaaaagctcattttatttaagttgggataatcttcacatcatgaaatagaattgcaactcatgaactcacgtgtagtatcagccctagagtagcttctccaaaatagggacagtttaggatcagcaggctcattccctgattctaaagacattggcccatgaccagttgctgctgattagatgtatactttcttgccatctctgactagttttattttttatgttgaatggaaggtaatttgttgttcagtttaaaagtgaacttattatcttcaatcttcctaatccaacatctgtattctcctttctttctggcaccaccttactccaaagtctaaaaaacaaaaataacctttgaatcctttcttgtcttttcttcctccatctaatgggttgctgaatatagtccattctaattatgactttttaacttatcttctaatccctctttttgcccctgccctagtttgggtatttatcattcttacaaggactttttgatatatccttgatgaatctatctgttttcaccttctgtctgtcctttgctttctataagatgccatcatagcaattttcctaaaggttgacccaaatcgtattggtttggatcatctactgctaaaaatgaagcaagatgcgtggtggctcatgcctgtaatctcagaactttggaaggctgaggcaggtggatcacctgagttcgggagttcgagaccagcctgaccaacatggagaaaccccgtctctactaaaatacaaaattagctgggtgtggtggtgtatgcctgtaatcccagctacttgggaggctgaggcaggagaatcgcttgaacccagaaggcagaggttgccatgagccaagatcgcatcattgcactccagcctgggcaacaagagcgaaatttggtctcagataataataataataataatagtagtaataatttagtcactcaaagcctcaatatacagtccatactccttcatatatcattccaggctctatttgacttagacttaatcacctccaaaaactttgcagttttggaggtgattaccccacgtgtatgatcacgcaatatcctaaacacacattggtacaggtctataatcttttatctgtaagtataagtaacccactacttattaaacataccatacagttttccaccttgtaggaatttgcttaagctttttattctgcctagaatgagctttcattaaccccaactatacctgctgaaggcctgtcctgctgttcagggctagcacaattgccctcttctttacagtatttctctattctaagccagaaaaaaaatctctctttttttttttttattctcatggcactttgcgaagctcttaagatatttctcacattcttcattgttaactgttactatatcccatgttagactatgggtgccttaagtttaattcaattcaaccaaagtgtgctgaatgtttattgtgtcagggactgtgctaagtactcatgacattcatattagagaacccctggaattgtttacagtgtaatgggtagataattctgccctgttacccttgtaatctagtccagcaccatccatggaagggattcagtaaaaattattgaattcaattgaattaggtcaataacaatcataaaaataactctaagggtagtaatgcttgcctttcattgagcatatgatatacagagctcaccatgcaaacattgcacatacttttgttgatttaatgttcataacagtcctatgaatgaggggcatctctaaacagaagcaataatgctaacatgggaaataaggttaggcataaatttgccaagatgacaaatttagttaggttcaacctaggcttgtctgacataaaaaatcttgcatctagtctagagctcagtaagtttggccaaaccacttgaattctctgtgctacagtttccctgttggttaaatgaagtggaggccttatggtactaaaacttcttgtactcattctaggggtttggagtttttactgagcttccatttggatggtaaacaacaacaacaacagcagaaaccaaaaacccaccaacttgtagtattggtccacagtgccgtatctgaagttctaaaatcaaaaggctcttattactaaatctttctaaaattaaattggcagcaaaagctaactgaattgttgtgaatatttattctgtttggtgataatatttatttattttactacagacatattaggagatactcactcagattcactgagagtgttaatatatggtatatgctctgtgtttcctttctaaaacattctgaactcatatgcccctaagattttcagacacaagattatgtacctgtaccaatatgtcaacatattcagctttgaaaaccaacttgagatactcagaagtttgtagagacacactgtagatcagcaatccaagagcaaggaaaccgaaaccactggagagtgggggtggtggtactgaagtcatggaaaccacctgaatattgtggagaaattgctcatgcagatctcacgtggggatcacgtgcctgtagcactgagatttttgtgtttggccctagctttggtaaaaccatggctgattaatattacagactttgctttgaacaagagggcactggaggtgcatccaggaggtggaatttcaataagcagttgttcattcttgtgcagtgatctgttgaagcaattggaatggttttaacttggaaaggccatctcttttttcccatttaaatattttctcaaaaagcatgcgaagaattagaaaatccctgtcactgttcttcccaaggaacgacctttttgtgtttgactatccatttcaaagcttgattataggacatttggaaacttgtaaaattctgtgtccccaaactagaagaatgtttttatgaagtggaattgttacagactgtctctttcaaatgtcagtttttcaaagtttaacaagaaaagattgagttggcaactgaaatcacatattcctgtatttctcaactgttcaagtgcatgttcatatctgccacaaatgtaaatttcagacgattagtgggaagcccaagtattggaaataaaaaaagggaatatttatgcagaatttagtgctcacttgaagatttaaaatatgagttctcttagcagggatggtttaaataaattaactaaacaagcattaatcttgtattctatgttgggcactataatagactgaaaatggccctctgaaggtgttcatgttctgattcttaggaattgtgagtgtattagcttgcatggtaaaacaaactttacagatatgattaagggaaggattttgagaggaggagattgtcctggactatctgtgtggtccaagtataattacatgggtccttaaaagagaaaggtagaaagatcagagtcagagagaagaggtaaaagagataatgattaaagcagaggtcaaagagaagaggtgaggatgaagatgggagaagaagccatgagggaaggaatgcaggtcgcctctgccacctggaaaaggtagaaagatgaattccacctgagagcctccagaaggaatataactttgctgacatcttgattagcccaataagcactgttttggacctctggcccccagaactgtaacataatgcatttgtcttggtcctgccactaagtttgtggtaatttgttttagcagcaataggaaactaatacaggcagtgtggcaagagaacacaggagcagttaaagaaattgatgggaggtgggggatcacgagttcaggagatcaagaccctcctggccaatatggtgaaaccccgtctctactaaaaatacaaaaattagctgggtgtggtggcacgtgcctgtaatcccagctactcgggaggctgaggcaggagaatcgcttgaaccagggagtcagaagttgcagtgagttgagatcacactccagcctgggtgacagagcgagattctgtcaaaaaaaaaaaaaaaaaagaaaagaaagaaaagaaaccgatggtgtgaatggtgtgaatctagaaaggtgtgaaccaaagaaagttgtaaacttgatgcatggtaggcatgagatcaaaggaattctatgttacttttttttgttgaaggaggattctaggtcaattttttttttaatttgagacatcatctttgcaagttcgagccacgccctcttctaggggaattcccctatatctttgttttatataatcctgcttgaccccaggtcacagctgacaggacaaaggaaagacatttttccctggacttataatgagctgtgacctcatggaaaaataggagcttgctccattgttttcctccctcaaggatgtctggaattgaggtactgagaggctgagttggttggtggttggcactggggctcagaagtagctttggcaggtgggacggccattttgagaccacaacagattgagtgtgtaaagaaaactggttctttcttaagtatatatttttctgttttgtctctgctgcttgaatcagaagggaaagctgtttctgaaagacgaaatggagcagatgtgttgagagaagctgggatggaagagatcagttttccctgagaagcaaagattttctcagctcccaacttcaattcttttgacttccacttgccattattttctgtcattgagtccctgatctatttctgtcatttaaaataatgtccactgcatctatatctactacccaactgcccccagtgccacctttgtatatgagttcatctgggttggtttttgttatatccaaaagacctctacctcaaatatgtttcatattttctaagatcaaataggcagaaatcagcttaattagagaagataatattgactatgaaagaaagctatagaagttttaatccttaaaataatcaattctgtcctaaatacccagaagcagaatgggatccaaatgacctctcaaagtttcaaaatccctagattggtaacaggtgatcatttaaaaaatacacatttattcagaaggagaatttgtttatcagtgacttacactattctgaaaaacaaagttaaataaccctttggcagttttattctcattcaatactcacatgctcctaaggtggcagtattaacattcccattttacagatgaggatactgaggtgtagagagaccagtgatttatccaagatcctttgactgagttttctgggtctggggctctcctcttaaaaatcccactctggccgggtgcggtggctcaagcctgtaattccagcactttgggaggctgaggtgggtggatcatgaggtcaggagatcaagaccatcctggctaacacaatgaaaccctgtctttactaaaactacaaaaaattagccgggcgtggtggcgggcgcctgtagtcccagctattcgggaggctgagtcaggagaatggcgtgaacctgggaggaagagcttgcagtgagccaagatcatgccactgcactccagcctgggcgacagagggagactccatctcaaaaaaaaaaaaaaaaaaaaaaattcccgctccacttcatggaaaagtttcattacaatattgaataaactgtatgatcgagaagtgaagtgcttaattctgggatagtgaatgttaattatgcaatgctctgttgctctgctgtgctgatgagtgagaagaaaattttcttaaaatttacttatcttcctttcaacagacagttatcatgtggtttgaattacattgattggccatcattaatgacttctccacaaagggggaaaaaggaatttgatattgtgatcaggtctgaagtaggtgaccatgaacgctggtaaaatagagtcacatgtttccggctcaggaacattagttaacatgagaagtgggatgtcatagtgagaacagttcagtctttgtagtgagacagactgggattaaatgtgggccatgccatttgtcaacattgagactctctgaatctgttttctcatttttaaatgggaataaaaacacctatctctagagcttagcgcttggatttggcaaaatgcatagtacgagttcaataaatgaaagctaatattattttcatgttcaaagtcaatggaaagagttggctatgaaaaccctcacacataccaatacccagattattttatcattttatctttagatatctcattcacaaatatagaaatgtgggtttatgggggcccaggggtgggatggtgaaatactctctttgagagaaaaaaggatagtttataaaatttcatgagtatgttagttttattgctactgtaacaaattatcacatattagctgcttaaaacaacaaaaatttgttaccttagagttctgcaggtcagaagtctgacatgggtgtctgtgaggctgaaatcaagatacctgcacgtctgtgtctctttctgagggatctttggaagagtctgtctcttggtgcattcaggttgttggcagaattcagttccttgtgattgtagaactgaggtctttattatcttgctctggctatcagctaaggactgttctcagctttgagaagccatctgcattccttggctcatggtgggtctccttcctccattttctttcttttttttttcttttgagatggagtctcactctgttgcccgggctggagtgcagtggtgcgatctcggctcactgcaagctccgcttcccgggttcacgccattcccctgcctcagactcctgagcagctgggactataggcgcgcaccactacacccagctaatttttgtatttttttagagatggggtttcaccatgttgatcaggcttgtctcaaactcctgacctcgtgatccgcacaactttgcctcccaaagtgctgggattacaagcatgagccaccgcgcctggccctcttcctccatttttaaagccagcagtagtgggttgagtttctctcaagctgccacttctcctcctcttcttccgttgttgcatctctctgacccactcttctgtcttactcttccacttctaaaaactcatgtagttatattggatccacctggacactctagggaactcttcccaattcaaggtccataccttaattgcatctgccaagtcccttttgccatggaaggtaacatgttcacccgtttcacggattagagaacggacatctctggggagaggatgagttattctgctaccaagtgagaaatagcacagaagtgtgtcttccaaatatggagttgttatgcatgattcacagtacattccagtttgcaaaataaatgagatggtgtcaaaaatacccacttacccagacagagagaaaacacatgattgtgcataatttggcttctgcttaccttgctcatctctcaccattctattcctcttttgaccattctattcctccttatactgaactttttatttccagaaagtgagtgaatatacaaacactggccaggtcatatctgataataaaactcagactgacaaaggaaacccaggaagccaaaccttagcctctgcagcaatcagcccagagtagtcacagtgtggtcaactgataccttctctattttctaaccccctgctctctgcttccaactcaggagcaacctgagaaaaccaaatgtgctccccaaactaatcagaaaggatgccctgcttctagttagctctccaatagcttcccaaggccaacaaactttaatcagggcacacccaagggttctcttttttccactctaaagcttttcctctgtcctgactgtatttgaatacctgccaaatgcaagtattggtggctgactctcttgctatagcaaactctgagtaaatagtctgtttttctcatttgagtggtctttgttttaacatttcctttgtgtattgtttttgtttcctctttttctcttccttgatcacatttttctccttaccttaagcgattaacttgtattcatattttaaatatcagcttagatgtcactaataacaataataattactatttcggtgatagctaacctgtactgagcccttaccatatgccaagaactgttctaaacatgtttaatttaccagctcattaaactctcacaacagttaactgaagaaggtttctcttattatccacatttctcatacaggaaaagataattcagagatattaaggatcttgcccaaggttgcagagctactaggtgaaagacttaggacagaatttaggtggtctggcaccataattcactcttgaaacaattacgctatgttgctttcagaatattttcaaataccctgagtttaggatggatatcccttctcatatgtttaaataggactctgtaatttatctactactctattgtaattgtttatgaatttctctgtagtctctgctactaagctccctgaggacaagggtggtgtttgttttgcttatgtttgtatgtcaagcatatagtagtttctctattaatgtgtatttaaggaattaacaaacaaatgatcgaattaatgaaatacatacaaaagtgtgaattgttatttttaaaaattggaggctcttaagaaaaaagaaagggaccttaggcagactttcaatgcaacacacttctacatatgacttcataatttttatccaggaaacaacttcttaaaacagggcagcttctcttgtctaagcttaggttgcctccatatttttaaatataaaaccacatgaaatactaacatcagcctcttcccagaaagcctcttccaagctaatcgtcatcattaagctagactcagtgaattcttgacataaattctgagccaggtcatgttcaatttagaaactttcttctgaactctgcagcaagcctaaaaactctctcttacatacttgcagtcctggaaaaatcagatgagagccagaggtggctatgtatccccatgaactatgttggagttttagagcaaacctccaactgggtgcttttaatgtcctaagcctctggctgtctgtccttgtaacccagattctggggcagatgctgagctcttgttcattctcagtaggtctcttttcctagacttgtgagactagttgacctggaaaagcattaaggcagtcatctggatcaattcctttactttatatttaataccatcggatccatgcatttattaaagaaatatttattagcctctaaatttctggtactatcccaggatttggagatccagaggtgaattaaacaagccttctgctatcatggggcttatattctagtggggctaagagacaaaaatgagcatacatacaaatgcatgaaatcatttcaatatgtatgaaaataacacaaagttagataacagcgatctgcctaaatgtatccatttcaatacgtttatctttcaatcatgtcaccccattaaactcctacttcctgatcaactactcttctttggaattctcagtgtttcctctcagtctttcattgattatatcaaggaagtagtaaaacttgttttgaataaaagtcattcagaaaattgtttttgatattctcccttttaaaatttattgccaatatactacaaataacttttcttcttagggcactttctttttcctcctaggaattgattattacaacaagatcatcgatgatttgttaaaaaatggggttactcccattgtgaccctctaccactttgatttgcctcagactttagaagaccaaggaggttggttgtcagaggcaatcattgaatcctttgacaaatatgctcagttttgcttcagtacctttggggatcgtgtcaagcagtggatcaccataaatgaagctaatgttctttctgtgatgtcatatgacttaggtatgtttcctccgggtatccctcactttgggactggaggttatcaggcagctcataatttgattaaggctcatgccagatcctggcacagctatgattccttatttcgaaaaaagcagaaaggtatggtgtctctatcactttttgcggtctggttggaaccagcagatcccaactcagtgtctgaccaggaagctgctaaaagagccatcactttccatctggatttatttgctaaacccatattcatcgatggtgattatcctgaagttgtcaagtctcagattgcctccatgagtcaaaagcaaggctatccatcatcgaggcttccagaattcactgaagaagagaagaaaatgatcaaaggcactgctgatttttttgctgtgcaatattatacaactcgcttaatcaagtaccaggagaacaagaaaggagaactaggtattctccaggatgcggaaattgaattttttccagatccatcttggaaaaatgtggattggatctacgtggtaccatggggagtatgtaaactactgaaatatattaaggtaaatgcatgattttttgtgtgtccatgtacacccaattatgtgaaggtgggcaagacaggcatatgtatatatatatatatatatatggacctgaaaaaagaattactttaggtaatagcatatacatttgctggcctgggaagagcagattaggatttgagttgatgaggggtaactagccggtaaaggcttcaaaagcagtggtcaaagtctaggatttgttgttaaagttagttgtggctatagaagtaatttggacatatttttcaatctggtgtcacaactatgattataaaagacattttaaggattgagatagttggatcctttttttgagtctcagctatagtggatgacatccagttagctaaaattaaaatttcaattacaggttttcagaacccctcctatgggggatgtagaatgtagctactggcaggactgaggggttaaggagcagtgacaatcaacagatgctgatggaagaaagatatttctgtcttctcattataataagagtcatttgactgtcttcatggacatttgcacagttttgcgtttccattgttagttataaaaggtcagtgcatggaaaattaagttaatagggtcagtgcaatttgatgaaaactagttttggggttgtagcttacagaagatagagggtaatgtacctgattttatgagctttctttttttaaaacatctgtttggaataaaacttctgttctttttttttaggatacatataataaccctgtaatttacatcactgagaatgggtttccccagagtgacccagcgcctcttgatgacactcaacgctgggagtatttcagacaaacatttcaggaactgttcaaaggtaccatttgaaatgatgaaagatcaattgtgcaaacttaatataattttcccatttgcttatttgcattcagcaaagaccaataatttttgaaagctgaaatccatgtaaatcaatgcaaagccatataattaggagagggggaaaaagtatttaggaaagaggaagtggaggattttggcctagctacaacctcctgaaattgaatcaagtgaaaagtgactgtcttcagcattttgtgactcccaggtgaaggtgacaagaacagaaggagtggtggctgttgggagagaacatcagttattacagaatagattagcactgatcaactataacatgcttatttgcatattttaatatcctaactaccaaaaaaaaatgaaatgacaggatttttaaagaacccaaattaagcatctgtgcaataaacttaaaaatggcacaagtcctccatcaatgtatgttgcatttaagctgtaaccaagcagcccagttagaaacatttttattgtcgtatggaaaatgtgagttgtgttttaagataatgttattttagtatctcttttccctccatggaattcttttcatatgaattcttaacatatttgaaaacagtcatgaaggaataacctctaactggtaacacacatttctaggcaagttagcacctcctctcctattatttgttgcttcccaaatttaattcctctttttttttttttgagacagagtcttgctctgtcacccaggctggagtgtaatggcgctatctgggctcactgcaagctctgcctcccaggttcacgccattctcctgcctcagcctcctagtagctgggactgcaggctcccgccaccacgcctggctaattttttgtatttttagtagaggtggggtttcacggttttagtcgggattgtcttgatctcctgaccttgtgatctgcccgccttggcctcccaaagtgctgggattacagacatgagccactgcgcccggccaatttctccttcttaaaaaggaatcatgtcatagcaacaaaatccaatgtaaaataagactttaaatttcctttttttttttaaaccatgatagccacacttatttcttatcattctgagaggttccgacattattctttctaaaattattcagtattacactggtaatcaccagaaggaattctggaaagtgacacaaagtggtctttttccaaaacctgaaatttatttactggatccttcactcaggcctggagtttattggcagagagcaattggattcttgcaatttgacccaagtgaagaaattattttgtattgcacacaaaatagattcttccgggtaggagttcatcttctgataagagagggaaatctctagttttctgagattcctctccacttctccctgtagatgggtcctgttcatagttaatctattgatattcccaggctttatcctgaagaacaaataggctagttactacccggcagatttatggatggctacagggaacacaaatgacttgcctaaaattgctctgtgtatttttgggaaaagagagataaacagaaattgctttttttttttgtttccattcccagcctggtactctgttcagcgctaatcatatagaggcatttcgttgttttttcaaatagtttcaagtactttataccatcctttacatctttaatgctaaatgcttaatgatcgaccccaaactaaggtgattcaaggatagaaaagtaacagaagataagagtggaaaataaaaaaagatttggatttctaagagacgggagagaatagggttaggacaaaaaatatgtttttcaatttgttgaacttctattttgtcttcaaattacttgatgagaggtttattaggcatataaaacatatactgtctacagcatctatgttctcttctgaatcttaacagtaggctagctatattcactgtaatagacacgtactatttttgttttgccttttaaaaaaacgactttttaaatgtgtagaaatatatatattgagaagaaaaacatatgcataaatgtatttattctggactgggtatagtggtgtggtaacttttttttttttttgagatggagtctcgctctgtcacccaggctggagtgcagtggcatgatcttggctcactgaaagctccgcctcccgggttcacgccattctcctgcctcagtctcccaagtagctgggactataggtgcccgctactacaactggctaattttttgtatttttagtagagaccatagccaggatggtctcgatctcctgacctcatgatctgcccgccttggcctcccgaagtgctgggattacaggcatgagccaccgcgccccactgtggtgtggtaacttttttatgtattctcgtagtggacaccaattatttctgctgtggtgcaactctctttcccctttcttctataaaatactcacctccccatgtacatgcttaccacagggacatccatgcaagtggaatacaatcctcctccttcagcagataactgactggtccaaacgtaggcacaggacgtgagctggggcaatttcagttcttccctggtacttagaacgtggaccaattagtttcttaatctcttggactgggttgggtggatgtagctttgtgagccactggtgactcggttctaccctgtaagcttaggcacagtgagaagggaagatatctatgcattaaaggaaggtaaacatggagaacttccagacagcactggagcctctgcttttcatttttcctgagatctgtctgcatgcaagttcttgagagacattactttcatcataataaagtgctctttgtgcttaatcttattctaattgggcttctatctcttgaataaaaagagttgtaattgataccatcatctcgtttccttctcaaaacaatgatatgaagtcattactcctactttatagatgaggaaactgagtttcaaagaggctatattatttgctaaagaaaataaaggcactaagtagtatttcctggaacaaggctgaatgcatgtatattattattattattattaactatttggtgtgagatataatctgtgagttcagggctctctgagttaaagtgtttatttgtcccaccacacagaaacttttccttatgtttggttactttgggtttgcatgtattctttcaaagtgcttcatgctgtctttgaagaagagccgacaggttctgtgaccttgagcaaagctcagacgccctatatcctagttctcatcaaaagagcagagctgaacttgctaatcaattttctgagactcctccgaggtaatgctgatgatcttggttgccaagaactttaatagtaagaagcaccctgtgagcaattaaaaataataacaggccaaggaagatattcctgggaagcgctgcaggtgagaagtgaccaaaacctagggagtcagatggatgatggctctgtgattctcacgaacaaagcctttcctctgacatcacacatatggagaggcacataatgacactatagatggatcaatgggtccgcttggaggtcttactgatctcttcaggtagattcccacagcaattaatcgagcattaaaaggtatgctaatgtttctgtttccttttggaatatgagaaaaaaaaaagagaaaaaatatcattttagaataaaaggagagaaatcagctagtgccttttaaattttgcattgtttaattgtattaaacaccttttaataggttatattttaagtaatgtagaggcaggtgagagtaaaggataccaaaaagttgaaataacatataactagatttgcattccagatctgcaaattattcaataagggacctttagcaaattgctcaacctgtctaatcctcagtttgtttatctataaaaatggggttaatttttttttctggcggggttgttatagtgagattccatttcatgagctaatgtgtaaaattcccttagcaactacctgacccatagtagctccttaaccaatggtaacaattattattattacaaaatgtgcactcttaaaaacgtatctattatctccaagttattctccttgttattaaaaaaatgccattccaagacttgttatttttctatcccccccccacaaattatagcagactatttccccatatttctgtgtttctcttcctttttgaggaacttctggatgtgtgttataacattggtcctctggctttttctagtgtgaattgcactgaggagaaagcagcacctccattcattatttccctgtgggaggtgaccagattaggtgaaaagtcaaatcattgacagtggaaactgctatcaagtaactgggaattgttctgccacttgaatctttgtatatgtttgggattcaatgacattcaaatagttaaaattttcttgtatcataggaatttttattatattcataacatttatgccactcctcaatacttaagagccaatgggcaattttggcttcatatgtagatgcacacaaatggatacctctccagtctaagtgctttcatggagatgaggaagaatggggagccaggggccattgctccgatggctgatactgcccccatcacctaaattatcttgaaaggggatccgagcggtgctcaacctgtttctcatacctacccagcacatgtgtgcttttagcctggcttatgatccttcctccacctggaatgccatgctctttgctttcttcctggcccacttttgtttgaagtagatgggcttgcttgaagtcagagaaaacataggtttgagaccctggttctgcccataatgagcccaaaactttagggaaaattctgaaacaggcaaccacctcagtcatctaatctctaaaatggggataataagaacattgatcttctaaagagtggtgaaaaatgagcaaaataatgcttatgatgcctaaaaaaagtctggcacatttcctaaggattctgtaaatgattgactaatttttttggggggtggaggtgctgtgaattctctgagggctagagctttgtcttttttttataattatatcttcagctctaagcaccatgactgttacatagtagtgttatacacatatttgttgaatttggttctatcatggaaaggctagataatgaataatgagaaataaatgactaaatggttgggaggcatattttctttccctgaagaaatatacccccccacacacacacaaaaaatgcagccttctgaaaagtttctgagccagtccaactttccaggcagatccatgcctgagttagcacagcggtagatgattgcagagaaggtttgttaatgaccagctttcagcttttaatgacaaaacccctcagcaagatgtcatcgaagttattgaagacttcactgaaagtgttgaagctgatacattgtaacaagaaggttataaatcttgcagcttggatataccaccaagacaagatgctgagcacagaatcaccctgctgttgtctgtcagcattctccctccctctacgtctttcccttcccacggagagcaggtaaaggagaaatacatctatttcccaaagtagtgcagacctggcagccacctgcctatgccaatttcagatcacagaggtccatttaactggacaaaatgtgttaagcgcctgtgtttttctaaatgtgcattagaaaaaaatcctaagcattagggaaagatttcaaaggttaatacggtgaccttttagaaacaccagccaattaaaaatctattgcaagctcagaatagagacccaaatacctgaatatagattctcactgtgtatctattgttttattgcttctcagaggacatctttgtcaccttggcccctaggaagcagttcatgtcataactcctgttaaatataactgtatggctttggggccacgtggggtgggatttggattgactcaatactgctaaccaggctgctcctggctgcactggatggctgctagccacaaggggccaggtcagaacacagaggaagaatgaggttgaaggctgggcatgagaatggctagtgggtgctagtatatagagtgtgcaatttttgttttttaattttttaattgacaaaaattgtatctttattgtgtacaacatgttatgaaacatgtatacaatctaaaatgccttaaacacatgcattacctgacatattagcatttttttttgtggtgggaatgcttaccatctactcttttggtaatttaaaagaatataacagattgttattaattatagtcaccatgttgtacaataaatctcttgaatttttggctcctatccaactgaaatgttgtctcttttgaaacagcatctcctgagttccccagccccataaacgagatcatttatgtctacatatgctctgaatgccttaaaatgttagatgttattctcaccatctactctctgcctctttgagatccacttttttagattccgcatataagtgagagcatgtggtatttgtctttctgtgcctggtttctttcacttaacataatgtcctataggttcatctgtattgttgcaaatgacaggattttattctttctaaggtccaattgtaggaccatgctgttttggttactgtagccttgtagcatagtttaaagttgggtaatgtgatttctccagcttcactctttttgcttaagattgctttggctactcgggctcttttttgattacatatgaattttagaataatatttttctaaatctgtgaaaaatgacactgtattccccattttctttatccattcatccactgtggacacgtaggttgatcccacatcctggctattgtgaataatggtgcagtgaacacgggaatgcagatatctctttgacatactgatttcatttcctttggatacatggtagttttatttgtggaatttgaaaagtcatgaagaaaataatttcttatgtttgtgtcccactagtctacatatgtagaccacacttagactcagccagggtttacagagttaaccttaaaaagggatatgccagatgcccttctcatttatttccccctgctacttccactcatgacgtacttgtcatttgcccttccttcccactgggaagcatggaagagtagaatgcatcgaagtagaaagtctgcaggctttggagaggaaagatgaacagagttctgtgctctagtggtgtgtctttgggtaagtcatcattggtactctctaaatgtcaatttccttatctgtaaaatgggactaatgctaactgctgttctgcctaatccaaggtcagttgtgaaaataaaatgagatcatttatatctacatatgctctgaacaccttagactgttagatgttattctcatatttgatatacgtactttatgcttctgtttaaggacattcatcactctggtcaaaatacattatctggacctcaacattctccactgccaaggaaaggggttggtgctcattatttgggtcttttcaaagtctagattctcagattttatcaatttattttcctgcacatttctatactgctgtgtaacattgtgaccaatttaagggtttttagagaacatgtactatgaccaagtgattaatatagtgcttaataaagccagaataacacacatacacaaacacattcacacatacacagaaatatgtatacatatatgcatatactctgtatgtctctatctggctacctatctatgtaagtttatgtaagttttttgatgagctactttaccacacttgtctggtgaggcatatattgatgtggtcagaaacctaaaccatttatgaggcacattctcttagaaacatagaacctggcatacctgcttcacaagaacaggtttcatggagttgcccatgtgagaagcagcttgatcacacatcagagaatctttccttgtgcgttttaactggaaaccattatcttctctgtctgtagtattccaatatctatgctgtgccccaactgatggacatcactttgggctttttaactcagtttccactactctgaagtgatacttaaggtctcccaccatctcaggtccagtgaattttaaggatacaataaagcctttaaaaaaatcagatgatttcaaactaacctttctttttttctttttctttttcttttttttttttttttttttgagacggagtctcgctttgttgcccaggctggagtgcagtggcgcgatctcggctcactgcaagctctgcttcccaggttcatgccattctcctgcctcagcctcctgagtagctgggactacaggcgcccaccaccatgcccagctaattttttttttgtatttttttagtagagacagaatttcaccatgttagccaggatggtctcaatctcctgacctcatgatctgcccaccttggcctcccaaagtgctgggattacaggcgtgagccaccgtgcctggccgtaacctttctttttttcatgaaaatgtatagtgtaacagtaagcagaagctcagtttttattttccacaactgtgaagaccaatgaggaaaagaattgttatttatctgaaaaaagttagcctttccaatatgaagagttggctgaatggaaactagaaaaaggggaagggggagaaaagaaaaaattcaataatgattttttattatttattgatttatctatttttttctattccctagatagcttcagggaggattcagtaatgatttttaaaaactgttccaagagagagccatgttggaatattttagtgattagggggctactggaattgaagcaaggtgagtatctcaggtttcccccagagtgtagatgaggtggtcctcaagcatctgtctacattagctcttattccctgatctccagaataacctggttactatctgcctcttagtcatcttgggagcgaaaaatcactgcctttgaatgaagccagtagagttccactttagtgtgattcacaggcgttgcctggatgactgtgttaaggattctgttggatagctatgggctcatggaaagaatcaaaggaagtagatggtcaaatgctatctatttctgctcatgaaacttaacatgagttttcccatgcttggaaagagatattcctcattgtaaattaatacgttgacattaggttttgtaaataaaaatcttgttcattagtagggattagctctcggtgcagtgaaaaaaaaatgaaatggtggatttgcagtgcgaccttaggcggtgctgatctcaccggttctataaccttcctctctgtagtcttctcatcttacctttttatagcttcaatgttgcttatattggtcagttgctctacagtgatataaatgttgtttctgccaactttcacagactcctaattctgtgaattactggttcactacctcctatcttatttttttcaataatgagcctgatactatgtagacaaaaatcagcaatattatgattgaaaacattaaaaattgatgccatgaccactgcagaggcttctaactacagcattgtagcaaatacttgttgaataagacaattgaatatatggaacttgagagatactttgattcttgaagatgatatccatgataatctttgggaaaaaaaaaagagcattttcaggagaaaatgaaagttattaaaaggtaaaagaactcataggcagaagaagtgtacctaaagattttattcaccatttttaaagacaaaattctcaccagaaaaaattttggagttttgagctatatactcagcattccgtaagtgctcagtaaatgtttaataactgaaaggagattgagcctagattagcagaaaaactgaattacttacttctgggaatttcaatgaaatattagacttatgccaccattgtgcttttttgatttctaaagaagtggcagattatttattctattataaacaatttgtatgtattagaatatgcatgaacactaattatatccttttgatattaaacttctgtttgggacaacaacaatttaaatatatgctagagttttaaagctctcatgtataaattctcttaagcgctccatgcttcagtttctttaattgaaaataaaagggctgaactagctgatcttttgggatactgccagcctaagaattttgtgaccttctagatagtcgttctgcagaagtatgtcacggatcacattttattagaactcttgataatttcgtaggctataaaatttagtccaaggaattataattaatggtctttttttatacaaaaaaaaaagcctctcttcattcttcttatccagctacctaatttgaaatttaacacctttcttatatggacataaaattagaccttgcttttcaatgcgctgtttctattgatattgattgaggttccaggtaacattttcttgaccttcaatctgagtgtttcctcttctattcattcacattgaaaatgaacctcacctttctttgcttgagaaagttttcccttggaattcatagagtcagaagggcacttcagactcaagtttaacaaagttactgtagagagcataaaatctcagagaggaaactggatgtgccaactcatttcaaagcattagtgtaaaatccccagctgaagaacttcacagcagctacaatcaccagcagtaaaatcacctttcaaaacacaattatggcaagaggcatctaatctattaaattttaagatagttaagtatgagtttttgaactttgccataaatgcataatttaattcaattagatagcgtagtaattttaactttacgtatatttaacttgaacactaaacctttgtttctgggtaagatcctgaattagaaggagggattatattgcggcgttttcagaattacagtctcatcataagtctgtgcagagacttcatataggcaagtctgtttttctattctgacttctgagcgtagagcttattccaatcagtactgcttttacctcaagttactgtttaggtagcattttcttcaatacaatgaaaatatcactctggtgctagagatgaaaatagtttcttttagaaagtaattcttaaagtttatctgaaaaggctatgtgcagagatgggggagggaggcccgtctcattcagtagggtcatctcatcaacagcaaagtctcctgtgtgttgagattagctaatgaaacagtatcatggcctgagattagtttgtgttatcctaaagctcggccacatttccccccttgtttgtgaaagtctgttataggaatcactgtctgctttaaaaataagtgaaactattgtggatggaggaagaaaaggcatttgaaccctgaagaattttaattggtgctggtgagtgaaggtgaacaagaagccatcgatgattcaggtgaaaacattaatgagtgcggactaaacagataataggagtagggtaggaggaagaatgtttgacatttgctgatgaaataaccttttttactctcctggcaacaagtggaattcatttctttgatatttagacacagctcaaagtcttaaataattttaaacgaccatattcttttatgagtcagagtcaagtcaaatatgttttgtagttgaaaatcagaataataaaaaattagatcagcacataaaatatgagtaaatgagtctattgtaaggtatacatttattagtagatcatttttatgtggttgaggctctgtgggtttagtcccttaaaacattttttttccccaaagatgttcaggatatgttcttgatactttgaatgagcagttggccttaaaaaacaaaaaaaaggaagcttcaaaaatatttcatggccaaagtttgctgccctcatgaatagatggtaacaatgacaagaatagttcagaaaaatcttttagcactcctagaaaaacaaatagcctgacccattgattgtgtacaaattttgtacagacaggcagataactttatgaatactcttatgccacaaggatttgcttgtttgacatactgaaagagcatattctttgattgattgattgattgacttagatagattcaggggggtacatgtgcaggatgtacatagatatattgtataatggcgaggtttaggcttcttgtatacctgtcaaccaaatagtgaacattatacccaataggtaattttcaaccctcatccatcctccaactctccccacttttggaatgtctagtgtctatttaatttccttctttgtgtccatgtgtaccattgtttagcttccacttataagtaaaagcatacagcatttaattttctgtttctgagtgatttctcttaggataatgacctccagcttcatctatgttgctgcaaaagacatgatttcagaaagagtatattctttaaagacagatccattttcagaatctggttctgatactctttcagcttgtgagccttgggcaagttatgaatatcagttcatcatctctgaaaacttatttttggtgcagattaatggcatacttcatatcctagagaaatgcctaccacataaatcctccaaatgataactattgcagtgaattatttattaccagcatctagtaaccaggattttggaaaaactgcgacttcctgcatagtcatcaagcattgataatttatgcttctcttgatgaccccagaatgcattctgaataattagagaaagattaaattataatcagtttagtttcagtgttaagtgtattttaatttattctcattctttaaaaatttgtaatctttttgcatgtggcaacaattaacaaaaaacatttgattagctggggcaccacattccctgactatcaagctaataaagagtttattgcaggttgttgaaactcaaacttttccctgtgcataaactgggcatttgctggatggagtctcttcatgccagtcttctatcctttctcagagccagtgtgttgactgttggatatcttagatttaatctttatatatccttgaacaacactcttggaacctataccagacacttcttgtgtattattttgacgcagggtcctagtcctggtcatcacttctgatttggtgcagatgaggacctaagtcttctatttctgaggttgtctgttcttttcctatgtatttctagagatgaacatctcagctgactttagtaaccaatctatcttggtgtttgatcaacctctgctcttacccaatcatgttttggacttgttctcactaggctttttaggctatataaccttcctgatgaaaacttcactatgcattttatcatttttgtggttctttgaactttccagttttttttccatttgtcttttttcccccaacacaccaatgtcatatgttgctgtaaaaagtgccttaacacctgatttgtgttaaaaggcatctcttcaaaaattcattcatattattgttcttttgtgatcttgattatggtacattttcaggcaagcagattgatttttgtcatttgatcgatcaacataggacataggattcatcagttccttttcgtctcccttattctgccttcctttacatatctgccctaccccaaagcctctctttgcaacctgacactctcctttttcatagtgtccttcacatcccagctgacatccccaatacttactcagtgaatgaagtaaggcagagactgcttgtttcccttaaagggagagtgaggccaaggggaaaaacagctgataaagaaataatttttcactgtaagcccaggcaactcttgggcctggtgtaaggggaagattgattaggattctcttgttaaaatgtagaagccttctttggtcatgtgtgggtgggtgtccggtgagaatcggaagcctgggtgtctagccaggaagcaacaattagcattctactctaattctgtgatttctctgatatggagctcactgggtagctgcatttcagttggtcagtcaggttgcctgttactgctactgtgcgtaatttctccccaaagtgatatttttcattatatagacaaacattaaaagtcagcaactcagtagtaaagcagtcactgttcctctagctgtggcacacctctatttagctactgcaaatacgtttaatatttggcaaaccatatgtatattattgggctattttgaattttctgggaactatgattttgagctttgctgtgtttgaatgatcaattgcaatgctttgttgaatagacttctttacaaaatgttacattttcataaatatagcataagatcacctggtaaacaaatgaatttgtgttaatagaaagtgtgaaaatttcagaacattcacagaattgaagttaaagtagctacactatctttatgtatagatagattgttggtcacaggaatgacatattaggctgggtgtggtgtctcgtgcctttaatcccagcactttgggaggctgaggcggcaggggtggggggacggggggaacgcttgagggcaggagtttgagaccagcctagccaacatggtgaaaccctgtctctactaaaaatacaaaaaaatttcccgggcgtagtggtatgcaccggtaatcccagctgatttgaaggttgaggcatgagaattgcttaaacctgggagacagaggttgcagtgagccaagatcacaccactccactccagcccagacaacagagtgagactctgtctcaaaaaaaaaaaaaaggaaaaaattgccatattaatacatgtgttgcaaagaaggagacaacagtcactggggtctgcttgagaagagagtgggggaaggagggagaggagcagaaaagataactattgggtactgtgcttaatacctgggtgatgttatgtgtacagcaaacctccgtgacacgtgtttatctgtgtaacaaaccttcagatgtacccccaaacctgaaataaaaatttaaaaaagaagaaaatcatttccatgggattccaaataaactagctcatggagtatggaaaaaaaaatgtgtgttggatggtagttgaaggccatttatatatcatattctttaaattttgacatttcgaatgctggattctcatgaatttgggtaacgacattcactctaaataatttagtgctctcttttattttaagggatattttattttattaagaaaatgttcttcctgtatttctatcttaaaaatattttttggttaacacaaacacagtagtttccctttaaccatggtttcacttcctgtggtttcagttacctgaggtcaaccgctatgcaaaaataatcagtggaaaattccagaaataagcaattcataagttttaaattgttcaccattttgagtagcttgatgaaatctcacaaagtccccctccctcctcctgggacatgaatcctccttctatccagcatatccctgttgtcaacactacctgcccgtgaatcagttaggagtcacctgggttatcagatctgctgttgcagtatcacagcgcttgtgttgggttgatacccttttttttacttaataatggccccaaagtgcaagtgtgtgattccggcaatttggatattccaaagaaaagcataaagtccttcctttaagggaaaagtgaaagttctcaaattagtaaggaaagaaaaaaaattgtatgctgacattgctcagatctatggtaagaatgaatcttctatctgtgaaattgtgaagaaggaaaaagaaattcatttatagtgtatatatgttttggtactatccgtggttttaggcattcactgggggtcttggaacgtatcccctgtggctaaggggaactactgtactggaaaacctttgtgatttgtaataattatagagatgacaattcagaaatgtcagttaaattgttgagaggtattaatttttgtcaattattgaagatggaccattttattacattgaggttcttgataaaaagaaataccagctcataaatcagtggtagggagggagtgggaggatgtaaatatcctacccgtagttgttgacataaagcttgaacactggcttgtagcttcctggcattcagatcaaaacgaattcaccattggttttcaaactgtgctttctggagctttctgatctatgaagatatctttggggactcagttagatgcacagagggtgggaggaaaagcagagctccagggcacctctgcttttattggttgtgtatattaggaatccataaaaattttcatttgaaaggaagactctggtgctaaaaaaaaaaaaaaaagaaacattggaaaaccactgaataatagggatctcattatcagaggggcagaaacatggtagctcctttggggaaataaagcacaactttctttctctttcacttgaaaaaatgagttatttcaaacatacagaaaaatacaggtacccatacaactgtgacccagatttaacacatgctaatattctgtcatacacattatacatgaaaaaggaaattaaatattattggcccagggtaagtccctttatatctttcctgtatctcctttctgtcttccttcacttgggttaactctgatcttgaagtgtgtgcactacacattttgctacaaatttatacatccatggcctatctgtataatgctttctgcattttactatttacataaatggtgtcacactatacacatatatattttcaacattatgttctttgagatttatccatgttgatccttttagctctaattcattctttttagtggatctatagtattctgatgtgtgaagagaccacatttatttatctcttcttctgctgatggatgtatgagggtctttccttttttttcatttttataaacaatgctgcactgaatatccttgagtggctcataggctgaaaatgcatttcttacatgggagtttatgaggcagccctgctgctagtccacatgatatctttgtaccattagaatgaagtttcccttcctcaaaaatgttacatttttaagaaaatggttgcaaaggctatacaaatttacaatgactttatatcaacagtgttctttaaagttttgacatttaaaaaaaagcaatagttctatatgtaggggatgctaccatagaaacctgtagggtgtaaagaggttgggcgaactaatgtgtttaacaggttagaagctaatctaaataaaagtctgtggttagcctatataagaggtttttctagctaaatgcaggggctggggaaattgttttcttcagaaacggtgtgttgcaagtaaagaacacaaggaaagtgtgtaaggcttttgatttttcccaggttacaaggccagtggctggcccaagtgatgttgtaagggagaccttatccatcagttttcccctttccagaatacagccctcaagactgtctatgtagacatgtatacagtgcgggcttctaccaggctccatctgctaacacaacagtgtgctaagaatgaagagaagttgcctagggaagacaaataagcccttgctctgggaaggaaagtttgaattgtatccagaggaagtagtgagcctcccagaagactgacgctgtaagtcccaatacactgaaataagttcatgttcatccaagttccattggtcctcactagatggctttgcctggggagggaaacaactccacagcaggcaatgcaatgtcttctctattctttatgaaagttaataggggaaaaattctttcctgctttggaaacttactttagaaattaaatttggaagtactcaagagtagaagcctggtggaaattgttggatattcttcatggaagcaattatatatgttgtggtcattaaaaatttgcctaaattaagatgtggtaacatcactctctgtttatatctgtaatactattttccgtcctgggaatcattgggcattaacattaatattcacaatctaaattatacccagaagacaggatctacgatgattgtgtgtatggagaagcctgttaacttctgttaattcttttaagaactatcaggtagaagactaaaaaaattcattttatgttgtgtcgagggcagaactcatgccagtaggggaccattacatgaagacaggttttagttcaacattaagacagaactttccaacaattagagtggctgagtaagagaatgagtgtcctcaggagatcattagaggcctgtcaatagatggcagaaaagcagatgccagattcccatctgccaaagatgctgttgggaggatgtctgctccatgtgggagggtcattccacaagtgcgtacaatcacctgctatttattaagtacctaccgtgcacttgctgtcgtcggggatagggactgttgtaggcacagctgttgtctggatgtgatcatcttccagtcctaaattctgtgaatcccagggagttttagccagggccctgatgaaattttcacaaattccacattagagtggtctgaagtaatgaggtctcacaatgcggctagcctagtggtaatgcttaaccttactcccagcaggaaggatatggcgcagaacaccacttcttagctaagacctgcttttgtccctggatttcagctttggcttggcttttgtgacatgaaagatctcagtatattaaagttagtttcttttctctggttcacttccttctggtcttgaaaattaatataacttctgagctccagatgatgtgtgtcagctttatttagtcaaactctgtcaagataaatatttttgcattggaattgaatctctgtaacttccattcatgacaaaagcatgaattacaaagtggagactttatggaattataactaaatacacttaattctttaaagtcaagtctgcctcaatcacagtgtttgacttggaaacctcctttagtccagtagagaatataaataaataaatgtatggaacagttttgagattagatctggatattatattatgaaggtaacattttggtctgaattctctggcttatgctgaagacacgaccttggctgcctcatggatatggcctgtctttcacacactttagagacaagtgtgttagagtcccattaatgcacataatggctcctgcagctcactgatgcacatgctatcacagtgacctgaagagttaaggtgcgtactccttaggctacttcacataacattgaagccactttgacccagagtagactaaaaccccatatattcaatatttgctttcattaatatattcataaatatacaaaatccttgagtggtcttttaaactgttcctttgttatatagtctggggccctagctatttcttctattggctgaagtttctttgtgtgtgtcagcttttcatttatggaccctgaaattaatccggtttaaaattatgctcttcaaatatagttcaaataattctgttttgaggaagaaatgtagtacagagggagtctttcatgaaaacaactttcccaagccattgctctggagttgctaagggtgatcagccagcaaagcccaaagtgttcatttagtatgacatgcaagtattttaaaaagatcttagctggaaaagcaatataattggcaaattaaaaatattaaaatgaaagtttgcaccttctgactagggagaaaacagtgcccttacattgttcctttttttgttgtgttttctgctctgtgcacagtaaagatttgtggcactgcatcttttaaaaaaaatttattttactttaagttctgggatacatgggcagaatgtgcaggtttcttacatagggtatacatgtgccatggtggtttgctgcacccatcaacccatcatctaggttttaagccctatatgcattaggtgtttgtcctaatgctgtccctccccttgtcctcaccctccgacaggccctggtgtctgatgttcccctccctgtgcccatgtgttctcaatgttcagctcccacttatgagtgagaacatgtggtgtttggtttctgttcctgtgttagtttgctgaggatgatggtttccagcttcatccatgtccctgcaaaggacatgaactcattctgtgttatggctgcatagtattccatcatgtgtatgggccacattgtctttatccagtctatcactgatgggcattttggttggttccaagtcttcgctcttgtaaatagtgctgcaataaacgtacgtgtgcatgtgtctttatagtagaatgtctttatagtagaatgatttataatcctttgggtatatacccagtaatgggatcgctgggtcaaacggtatttctggttctagatccttgagaaatcaccacactgtttccacaatggttgaactaatttacactaccaccaacagcgtaaaagcgttcctatttctcaacatcctctccagcatctgttgtttcctgactttttaatgatggccattctaaccagcatgagatggtatctcattgtggagcactgcttcttaatcttggctgcacattgtaatcacacagaaagatttaaaatatactgtcatttgggtttcatccccagctggacatttaaatatcttaatgtctggggtgctgcatgggcattggggattttacaagatctacaggagattctaatatacagataatgcaaagaatgattgatttgagtgctttgatcttctaatattaaaaagaaatctaaaaatttctctgttattatttgtggagtatgatttgcatggaacctagactgcctgtgaatttaagagttgaaaaagtctcagtttttgagatacttcacttggtcttctcacttatgttgggccattgtgagatggtagataatttttctgaaaaagacttcgggaagagtttgttacaggtgcaatgttttcagagcatttcctaactgcattgtttgagaatgtaattctgctgcctttgcacataaatagcaatttatatgtgtctgaaattctttttcttcttcatctcctcctcttctttctcctcctcacaggaggtcacaaagatttaaaaacaagagaaaaaataaaagacatggggaacagattcagaaaatccaaactctgtaaaaatatacttctcttcttcctcctccttttgtttccttctaattaaagttttgctccattttcttctgaacattattgttgtggaagagaagtctgtagatagactgatttttatttctttgtaagtgattaagtgtcttcatgaatgcttataagaatatttatccttgaaatacatacagacgatctctgtcttttcatttacataatcagtaagccatttgcaacaattgtttcaggttttttgtaagctcaggaaaaaattatgccatgatgcctataataattaggtcagcctcatctgtaccatgatctacaattgagaactaatttttacgtatagattattggatttttcttatctagtctccatgtctatgttttctcttatatttaaatctttttacttttctctgagatttggacggatttccaaccctgtcttccactttactgatttgattttcagctatggccaattttctgatctctaccaccaccacagtgattttttaatccaacaatttattttctctatatgttctttcctgatcttatgactgtttactctagtttcataaatacaataagagttcacatactgttgagataaaggggcaaaatttttctaaacatgtgtacttttctagcagtaaatccctttcatagttgatatggtttggctgtgaccccacccaaatctcatcttgaactgtaattcccacaattcccacatgtcatggggaggtgactgaattatgagggcgggtctttcctgtgatgctctcatgatagtgaataagtctcacgagatctgatggttttgaaaatcggagtttccctgaacaagttctcttctcttgtctgccgccatgtgagacatgcctttcaccttctgccatgattttgaggcctccccagccacatggaactgtgagtccaataaacctctttcttttgtaaatttcccagtaatggttttgtctttatcagcagtgtgaaaacaaattaatacaagagtcaattattttctgtaagtttttggagtagttttttttcttatgaggggcagtagcttttcaagggtctgtttttctcttcatttgggaggaatccaggctgtgattttcctgctgatgatgtctgcctttcacatgagttttctctacttcctgtccacgctgatctgtcctccattcttccttcaccctggtgccatctaccctctctcaagcagaacaaaccagaaactacattttttggcaaatggaacacatcttttatggttttcagaggtattacaggttttacttactatatattttgaaatgttccacaggaatatggaaattgggaaaattagctacttgtactcacactaacagattatctaacatcatgataaatctttggagagtattttttccacccagcttacatttacatcctcaggatatagttctatatggaaaattactaagtcaaagaatatgaccttttattttttatattttatttttattttttaatttttaaaaatttccaatagcttttggggtacaggtgctttttggttacatggatgggttatatactggtgaagtctgagattttagtgtacccatcgcccgagtagtgaacattgtacctaatgtgtagtttttttatttctaacctccctaccttcatctcccttctgagtctctaatgtccattatatccttctgtatgcctttgcataatcatagcttagctcccacttataagtgagaacatatggtatttaattttccattcccgagttactttacttagaataatggcttacaactccatcaaagttgcaacaaaatacattatttcatcatttttactgctgagtagtattccatggtgtatatataccacatttaatttatccacttattggttgatgggcacttacgttggttccatatcttttcaatttgtgaattgtgctgcaataaatatatgtatgcatgtgtctttttcataaaaagacttcttttcctttgggttgatacccagtagtagaattgctgaatcaaatggtagatctgtttttagttcttcaagggatctccatactgttttttacaggggttatactaatttacattcccaccagtggtatacaggcattccctttcaccacatccacaccaacatgtatcgttttttgactttttaataatgaccattcttgcaggagtaaggtggtgtcccatagaggttttaatttgcattgccctgatgattagtgatgagcaatttttcatagtcaacaagtttgttgactatttgtatatttgtatattttcttttgagaaatctctgttcatctaatttgtccactttttgatgggattatttgtttcttgctgatttgtttgagttccttgtagattttagatagtagtcctttgtcagatgcacagtttacaaatatttggtgccattctgtagattgtctgtttcaaagtgtatgcacttttaaaagcacttagatatatattatcaagttgatttctagaaaattttctcttaacacttgttaggatattcattttgccacattgtattagtctgttctcacactgctgataaagacatatccaagactgcataatttataaagaaaatatgtttaattgactcacagtttcacatggctggggaggcctcacaatcatggtagaaggtgaatgaggagtcaaggcacatcttagtcttacatggtggtaggcaaagagagaatatgtaggggaactcccctttataaaaccatcagatctcatgagacttattcactatcatgagaacagcatgggaaagacctacccccatgattcaattacctcccatcaggtccttcccatgacacgtgggaattaaagaagctacaattcaagatgagatttgggtggggacacggctaaaccatatcacatattatcaccaataccgaatgttgtttttaaaacatacaggcacacaacacacactttgctaatttgacatgatacatacattaaaagtatatttttattttcatttacattaaattacagagaaggcaaaatattttatttattagtttatttgaatttcttctgtcgggtttttgtccatgttatttgaccattctatcctggtttttgtgtttagtgtgtattttttaaaaaacaatagccattataataaatgaatgccatttcacctagcaatccccaggaagttatttagagacaatgatgattccaatatatgaaacaaagtcttcaatttttaaatatttttaaatattgaatccattataatcttggctacagttgtacatactttttaaagcttaaaataatattttaagatgcctttatatgaatgacatcatatgaagacagctaaatgagaatgaagtgaaggagaggggctcggagttctgccatctcaactataatactcttatagtttcatgagacacaatttaaaagccagagtttagagctttcttttctgttcatgctaatcaaacactttggtattattttcctgtaacttcatttaccttcagcttcagcaaatcaaatggaatatccccatagctgcttactgcctacatacatacttaaatgcttatatatatatatattctggatatgtgttatgaatttagcagtgataatgaaaagaaacaggctgcttgttgaatcctaattaaaaccaaagttgttttttatgattccttaaatctaggccacactttaatttcacaaacatatcccaaagagaaggcaacataaatacattgtatgatttttttctagaggtgcatgatttatgttctctctgtgtacaaatatgttcatatactattgcaattgtgacaaattgaaggtgtgatattatacattggaatctggagtaaaacagactgaaaaagtttctgttaatggaaaagatatgttttcagatgttgctgaactttgtagtcagcactcaatatatctcagtataaaagatagatataaaaattcttcatttcttgggaaaatgattttttgagcctcattttaatttttcttggtgattttgtgatggtgtcttcctttctttgatatgacctttcctcttcctcattgacccttctttgttcactgttattcttttatctgtaatgcaccattcagcctgacttggaatagttttgtataaataagagaattgtgttatatgctattcaatcttaagggataaaaatgatttttactttagtgaaaagaagcagcaccatgttttaaaattataggcttttagagctggaaggagccatggaaatcatagagtccatccttcttgttttatggattaaaagtgagcgtgcaatcattctatcataggtaaaggctgctccgtgtactctggggcttgcttcatatatcttgcctaccttatttcctcagattaagtttagccagagttagattaaagtataatagttaagagtacaagtttgaggttaaacaggtgtggatgcagactggtcctctatctttcagctcttagagcttgaataagccacttcactctgccaagcttcagtttcttatctgtaaaacagggctaagtatatctactaaattaagtctttatgagaattgaattatgttatgtttgcaaaatatttggttcagtgcttgatactaagtgttaccaaataagcatccaagaaatggcaatttcttttactgagattcttttgttgttgttgttgttttttgtttgtttgtttttgagacagagtctcactctgttgccaggttggaggatagtgacacaatctcggctctctgcaacctctgcttcttgggttcaagtgattctcctgcctcagcctcccgagtagctaggactacaggcatgtgccagcacggccagctaatttttttttacatttttagtagagagagggtttcaccatgttggccaggatggtctcaatctcttgacctcatgatgtgcctgacttggcctcacaaagtgctgggattacaggcgtgagccaccttgcctggcctacatagattcttttacttgtccacctctcttcctagactgagatttctcagagccaccaagtcttggcaatctctgtatggcccagtgccttcgcatggcatctcattcattgacagctccaagcttccaattacttgagtccaaaatttcagagccatttttgtgtctctctctttttctttttgtatactctcagaaaattaatctgcaaactcctagattcaagccaccgttgtctttttctggattcatggaatttgctcttaactgttctcccatttatccattttgcagcagcgagagttatcctcttaaagcataagtcatatcttataaatgttctgcttagacctcttcaaaggctatccatctcacatagagtaatatcaaacccttaacagtccagcaccatccccttcttattcagtctctttgacctcatcttcagttgacctctctcacactccacaccagtcacacttgcctttctgctgttcttcctgcagttctttctcaacactccacccatacaactgccccgagtgaggagtagagtcagatttttaaagaaagatagtttgtggcaggaacagaaaaaaaaaaaaaaataactgcatatgctcagttataagtgggagctaaacactgagcacacatggacgcaaacatgttgtattagtcagggtttcctagagggacagaactaatggaatatatgcgtgtgtgtgtgtaaatagcaaagacttggaaccaacccaaatgtccaaaaatgatagactggattaagaaaatgtggcacatatacaccatggaatactatgcagccataaaaaatgatgagttcatgtcctttgtagggacatggatgaaattggaaatcatcattctcagtaaactatcacaagaacaaaaaaccaaacaccgcatattctcactcataggtgggaattgaacaatgagaacacatggacacaggaaggggaacatcacactctggggactgttgtggggtggggggaggggggagggatagctttaggagatatacctaatgctaaatgatgagttaatgggtgcagcacaccagcatggcacatgtatacatatgtaactaacctgcacattgtgcacatgtaccctaaaacttaaagtataataataaaaaaaagataaatatccaataaaacttttttagtttaaaaattttttaaatatatatacacacacatatatatgggtgtgtgtgtatatatatatatgagtttattaagtattagctcgcacaatcacaaggtcccacaataggccctctgcaggctgagaagcaaggagagccagtctgaggtccaaaactgaagaacttggagtccgacgttcaagggcaggaagcatccagcacgggagaaagatgtaggctgggaggctaggccagtctctcttttccatttttctgcctgcttatattccagccatgctggtcgctaattatatggtgcccacccagattaagggtgggtctgcctctcctagtccactgactcaaatgttaatctcctttagcaacaccctcacagacacacccaagaacaatactttgtattcttcaatccaatcaaggtgacagtattaaccatcatacatgggaacaatagacactgcagactatgagaagggttgggggggatgggttgaaaaatacctatctggtagtatgctcatgacgtgggtgatgggatctgtaccccaaacctcagcatcatgcaacatatccatgtaacaaacctgcacatatatatcctctatctaaaataaaggttgaaatttaaaaaaagaaaggtgggataggtgccatggctcatgcctgtaatcccagcacttagggaggctgaagtggatggatcatgtgaggtcaagagttcaagaccagcctggtcaacatggcaaaacccctgtctctactaaaaatacaaaaattagcagggaattgtggcacatgcctgaaatccaagctactcgggaggttaaggcaggagaatcgcttgaactcaggaggtggaggttgcagtcagctgagatcacaccactgcactctagcctggtgacagagcaagacttcatctcaaaataataataataataataataataataataataacaataataataaaagatgtagtatacaagtacaccacaagctagctcctgcaatttaaatgggtgttttgtagtctgtctacttgctttcatatgggagtagagaacacttaaaagaaaactaacgtgaaattcaacggattagaaaaaaaagtgcaaaactaaaggaaagtgattctttagtaattgaaggtggtctgggacatcctaccatgcaaggtagtgtatcggaaattggtgggttcttggtctcactgacttttagaatgaagccgcggaccctcgtggtgagcattacagttcttaaagatggtgtgtccggagtttgttccttctgatgtttggacatgttcggagtttcttccttctggtgggttcatggtctcgctggcttcaggagtgaagctagagaccttcacggtgagcgttacagctcttaagacagtgcatctggagttgttcgttcctcccatccagagttgttcatttctcccagtaggttcgtggtgtctctggtctcaggagtgaagctgcagacctttgcagtgagtgttacagctcataaatgcagtgcggaccgaaagagtgagcaacagcaagatttattgcaaagagtgaaagaacaaagcttccacactgtggaagtgtacccagttgctgctgctggcccgagcagcctgcttttattccgttatctggccccacccacatcctgctgattggtccattttacagagagctgattggcccattttacagagagctgattggtccattctacagagagctggttggtccattttgacagggggatgattggtgcgtttacaatccctgagctagacacagagtgctgactggtgcatttacaatcctttagctagacacaaaagttctcctagcccccaccagattagctagataagtgctgattggtgcatcaacaaacctggagctagacacagaatgctgactggtgcatatataatcctgcagctagacataaaagttctccaaggccctatttaactcaggatcccagctgacttacccttgtggatcctgtgctggggccatgggcggagctgcctgccaatcccgtgccttgtgcctgcactcctcagcccttgggcggtcgatgggactgggcgccatggagcagggggcggtgcctgttggggaggctcccgcctcgcgagagccccacagcggggggcggggctcaggcatggcaggctgcaggtccgggcgggaggcggctgaggcctggcgagaattccagcgtggcaggtgtggaccggcagtgctgggggacccagcgcaccctccacagctgctggccgggtgctaacctcctcactgcccagggctggccgcagcagccggctgttccgagtgtggggcctgctgagcccacatccacccggaactcgcgctggcccgcgagtgccctgcgcccgcgcctcttcctccacacctccccgcaagcagagggagccggctccagcctcagccagtccagagaggggctcacacagtgcagggactggccaaagggctcctcaagtacggccagagtggacgctgaggctgaggaggcgccgagagctagccaggtctgctagcacgttgtcacctctcagtaggaactgggcttctagttccattacccaaatagtgaacattatacctgattggtaagttgtccaccctctctccctctaccccccccccacccacttttggagtgccaggtgtctattatttctatgattatgtacatgtgtacccattgtttagctcccacttctaagtgagaacaagggcatatttatctttgaaaatggactaaaatttttacactatttgttggagggaggatatagactgagattgactcttttgaaatgtaattcacttaataactgtgtgtgcaaaaactgttagaaacatgactttttgtggagcggtgatagtttttatggtcttaggggacccctgtgatgcaatgaaaagaaacttagatttaacccaagaattcgagaccaaaaagatgtcaccataaacaagtcatttgagaccattttgtcatgatttgtgaaacggggtcattgcagctcttacattctatacagtgttttgacttttggctactttgaagaaatcacaatatttcaacctataaaggactcttctatgcttctgattatagtggaagttgatcctttgcaatgaaattaacctgatgacctgtatggctctggtagtttgaaggatatgagcaaaagggatgatacctggagggtccacccagacagttggacaatgtcctttggaggacattattgtgactggccacagccacgatcctcagctttgtttgctcagaaactaaagttttgccaacattcttagagaatatccatttctcctgaaatagactcatatctagcaactctcaagacaatgatatagaaaccaaaatgtcaatttataaatttatgatttaaaatacaactgtcaaggacataggacatttatgtcagttagacatatctttctggaagacgtctatatacgtgagcagaagtcaaaaaatggccagatgatcacggcaggacagactaagagcattgtaatcttgcagtcagatgcacccatctctgttttatggttatttctacttgggggcacagaatattgcactagttgcccagggcatccagtgcttggatgtgctggatacatattgacaaatctcccaatttcctatttggatggcagaacgtctcctttctcttgctatatcctgcctttaggtgtagtcgtaccttcattttggctctggtcagctctgtcctgtactagaaaaaagtgctgttcgagaggatttctgcagttgtctgctctcactcatttttgtacggctgatgcttttctaattcactgagttctgagcatgccttttgttccccttgcctgtgttccatccacatcgtactgcaggattctgtttactgtatgtatgtatgtacattttggcagtaacaaaaggaattctcttcaggatctgcattcccaaagcatgagttatctcccagcctaaatgctgagggaggggatgggaaattagatggaaggggatgaagggaagtctgaggggagtggctactcccaaagacagataatttgtctttgctttgtccttgctgggctcaaaccttgaaggatggatgtttggtatttacttaacacttgcagtagtcttggactctctttttgcagaccttgaatatttaccccctcagggaaaacttgattctcaagagtaaaatgaattatctatttagctaattagctagaacatagcaaaattctcaggaggatcatcccatctgaggattgatacaatgtatgcttgtatttgcagagcctatctcttttcattttctggcctgcccgtcctatcgctcatgcttcacagagaagggaaaattgtccagtaagcaaaacctctttttctttcctgcacttttctgccttgcttctcttgctgtgcctcgtaacttctgatgctcatgggtgacctaaggcacttgatctttgcattttcctgctctacagattacccatttcaggaggtgcaatgtgcttaccccacaacactcaccaagactgacattctctgtacactcttcttctcagatgccacaatctgcaatcagtgaacataccaatatcttgaagagtagaagagtagctaccaggggcagggagatggagtggaggttggagatgttggtgaaaggatacaaaattaattgggagaaataagttaaatctattgtataacaagatgacttagttaatgcattgtgttcttggaaattgctgagagtagattttaagtgttctcatcatgaaaaatgaaaagtgtaatggaatgcatatgttaatcagcttgatttagccattccacaatgtatacatatatcaaaatgtgttgtataccataaatagatacagtttttattcatcaatttaaaaaagagaaatagtgtacaaaactacactgcatgggtcctgcctgatgcattgtttactcagaaagtggcatttccttctctccccgaaaacagccagagacatagcctaatggagtagttaagaacatgaacttagagtaagactgcctgggttcaactcctggtctccccactttggggctagtaagcaagggcaaggtaattattaataatctttctgtccctcagtttcttcatctgtaaaatagaggcaataatagcatttactccggggattaatgaggaagagcaaggacaagaggcaggagatgctaagagcagagagtggaggattggaggctaggggctggttatacacgtctcacctagtaggggccttttgaagatagacttcaagaagctgagggtacaaacatctgaggaaaagcttccagaaagagggaagcaccagaagaaagtctctgagttgggatctggcttgacatggcccagggacagcaagggagcccctgtggctcaagtggcgtgggtaagggggaagagtatgagtgagcagtgagaggtcaccagtgggagagaggaaacctggatgatgagattccagaggaccaggcagacctttaacaacaatggcctctactttgaaataggagcttttggagggttttgtgcagaggagggacagaatttgatgtacattctaagtggatctctggctgctcccttgggaagagatttggggagtgtgttagtttgctatggctgccattacaaagtacgaaagagtaggtggcttaaaccacagaaattaattttctcacagtgctggaggttggaagttcaagatcaaggtgctggcaggattggtgtctggtgaaggctttctccttggcttgcacagaggaaaggctgtgagtggctgccttctccctgtgtctttccatggcatttccgctgttcttgtgcatcctggtatcacttcttctttttttaaggacagcagttttattaggttagagcctcactccccttttttttttttttttttaagacagaatttcgctctgtcgcccaggctggagtgcagtggcatgatctcggctcactgcaagctccgcctcccaggttcatgccattctcctgcctcagcctcccaagtagctgggactacaggcgcctgccaccacgcctggctaattttttgtatttgtagtagaaacagggtttcactgtgttagccagggtggtcttgatctcctgacctcatgatccgcctgcctcggcctcccaaagtgctgggaggcgtgagccactgcacccggcccagaacctcactcttatgaccttatttcaccttaattaactccttaaagggcatatttcccaatataattacattgggggttaaggtgtcaaccatatacatttctgggagatccagtttaatctacaacaggtagtatattggttaattttatatgtcagcttggcttggctatggtgcccagatgtctggtcaaacactagtgtagatgttgctgtaaaggtgtactttagatgtgactaacatttaaattagtagactttgagtaaagtaggtgaccctccataatgcagatgggaattgcccaattagttgaaggccttaagagagaaagactaaggtctctgaaggcattctgcctccaggctggctttggatttgggctgcaacatcaacatttccctgcaaattttggacataatcatgtgaactgatttcttaaaataaatctctaatattatatctagatttttattaaatgatcataacgtttaattccatattataatatcacagtgtgcatattatattatcgattgggttatttacatctgtcatagaaggcattttatattctacaaatgaactgggatcccacatgagagaaacaaaatgggcagtttttctaagcatggcatgtataggcttatgttttgttgtgaacttggtcccttctgcaaggttttaaaggcacataatattcagcagactgtgattatagctgaccgagaaccacacactgggctcttagtagcttctcaatgcatatttcataaatacataagtgtgagggccatggctggttagaaaggaagctttaggggccctcagtgtaatgaaagctgccagtgaagcatctttagcccattgcatgctctctccttggggcagtggagggtttgcgtcttttatagttttaggtcctcaaggtgcatcactcatcctctctctgatgcctgtattcatggtaagtttattcttcaggaaattgtttttcaaaaagcctcatactgtgatggttaatattgagtgtcaacttgattggattgaaggatgcaaagtattgttcctgggtgtgtctgtgagggtgttgccaaaggagattaacatttgagtccgtggactgggagagacagagccagcctcagtctaggtgggcgccatctcatcagctgccagctccccttgaataaatcaggcaggagaagatgggaaagcagacttgctgagtcttccagcattcatcttccttccatgctggatgcttcctgcccttgaacatcaaacttcaatttcttcagcttttggacatttggacttacaccagtggttttgccagggcttctcaggcctttggccacaggctgaaggctgcactgttggcttccctaattttgaggttttgagactccgactgatccaccactagtttccttgctcctcgacttgcagacggcctatcgtgggacttcaccttgtgatcgtgtgagtcaattctccttaacacactccctttcatatgtacatatatcttattagttctgttttactagagagccctaatacatataccttagttattttgaggaaggagacagaacccaagatttattatttttagtagtgagactttggacaggtagcctaacctcttacactgaatttcttcatttgtaaaatcgggatgacatagagacagaatgcaaatttgttgttgccatgggctggatgaagggaagagtgagcagttaagaattaactgcttaatgggtatgacatttccttttgggacaatgaaaacatttgggaactagatagaggtggtggttgcacagcattgtaattatactaattcactttaaaatggtgaattttatgtcaggtgaattttacctcaataaaataagtagatgataatagtactcagtttatagggttatgagacttatggatgttaaatacttagcatatgcctaatactcagcacatggtaaccaatcgaagaatgttggtctcttctttctcctcctcttcttcattgccactgttgtcattgtcataaccattctggaaccaacttctttttaaataaaagtgctaaccttcatctattgtcactcaaagggcaatactgggatataaggctggaaataaggctgggactatgttatgcctacctgagagagggagagaatgtacgtagtacagcaagggaccactaaagatacttgcatagaagatcaaagggagtcaagctgtgctttcagccaattagcctggcagccatgggtctagtggtttgaagtggaagaggctgaaagagggggacacagttagcaggttactctcaacagggtcgttagatttccctttcttatttcctcctcagtcaccttggatttggctggctacatagcaaacgcttaataaatacttgtagattagttattttacacttgtttaatgcccttctttgaagtacttccagttgagattacttctacaaatcatataatacaagataaaataccctatatatctgtcagttttctctaagactgttttctaagtattatatgtgcttggttcatgggctgggtattcagttgctgaaaaaatagaaatcactccattagtcatgcctctgcaaatttcacattttatattccaagtctgtggtaggtgatatttaaagcatttttttttgtttgtttgtttgtttttttttttttgcttgctgttgtatcactacaactgtatattgcttgtggacattttgatctcagatctcaagaaaatgatgatgttccatttgttatcactttaagggaagcacaaaaagaccttaaagtgaaaaacacagcttaattagcacgttggtgatttatgttacccagtgtgaaatctccattagtaccaaaagaaggatttttaaaaaggcatcttctgaatttttaaattatttttggtcttatttagaattcacaatcttatttccatgtctctaatctgcaaatcccaaaatgtaacatcattgtctcaaagttattgcatttcacaatatcatgcaaaggaacacagctgcttattgtttaatcaccgaggacaaatgtcctctgtaccattttatatgcaggtttataccttgatttatgtaatgcaaaagctcttaaacatcatagagttttagaatttgaagggactgctaaaattttctagttattcttgtactatatattgttgagaaaatcctaatagaaacacttaaaaaatttatatcaattcatattttatttaacacattatctacatatattataaatatttgagcatctttgtactagactgaacagtcaacctatagactgtacatatcagatacagctctttcagttaccaaaacttagaatctggtttaagaaacggggaaatttatttcctcaagtgactgaaaagtccaagaacaactcttcaaattagcaggacccggaggctccaagggatgtttcttttccatctcgtggctcagcttttatgtggattttcaactcctaggctctctctgtgtggctgttacctgatccgggcttaaatcctttaggttcaagaccagagaaaagggaaaaacttcctgtcacttctccagccaatcgttggcttacctctgattagacagtttgagtcaggagtccatctttagagcaatcactgtgactttagttttagaaaagagtgattgacctgtaaaagggtttgtgtccgtacttgaactcggagcccattgaaatcatgtgcactgagtgtgaacagaatggtttttccagagaatgtggagtggctgttggaagataggtgtaaggtaggcaaaaccattgtatggctgtgagacagtcacaagtggattccaggatatcttctggtaataacagaatgggaaggagaagatgtaaggaagaaccctcccccaaaagactgtctaagtctatggattagcacccctgtttataattcaactttttcatgaagatgtaacctcagaaaaactaagtggcatgcccatggaatcacagttagaaaagtagaggcagtttaacaccattctgattatcctccaacagagaaggacatttcttaggttattcatatatatgattaaaaataaattgtaaatttttgaaagtgatagttttgcctaatttcaaaaatttgcataattaaaaaaccacaaaaataaagtaagcaaatactcttattctctctctctctctgtgtgtgtataatgagaactgtcataaaaattctgttgaattattttgatttaattctataaaaggaaaacttaatgctattcctatttaatcagagtctctgataatgtcatttttttttcttttttaaaatactttcaacttttatcttagattgagagggcacatgtgcatatttgttacatgggtgtattgtgtgacgctaaggtttgagatataaatgattctatcacacaggtactgatagcatagtacctgataggtactttttaagcccttgcccctctctcccttccctcttctagtagccaccaatgtctactgttcccatctttatgtccataagtactcagtgtttagcttgccgttataagtgagaacatgtggtatttggttttctgtttctgtgttaatttgcttaggatgatggcctccagctacatccaacttgtagcaaaggacataatttcattattttttatggctatatagcattcatggttcatatgtaccacattttctttattcaatgcactgtggatgagcacctgggttgattctgtccctttactattgtgagtagtactgtgatgaacatatgacttcatgtgtctttttggtagaatgatttattttccttagggtacatgctcagtaatgggattgctgagttgaatggtagttctgtttttagttctttgtgaaacctccaaactgctttccacaattgctggactaatttacattacatttccaccaacagtgtacgagcgttcccttttccccacagcctcaccaacttctgttattttatgactttttactaatagccattatgactggtgtgagagggtatttcattgtggttttgatttgcatttctctgatgattagtgacttggtttggctgtgtccctacccaaatctcagcttgaattgtagttcccataactcccatgcgttgtgggtgcgactcagtgggaggtaattgaatcatgggggtggttacctgcatgctgttcttgtgatagtgagtgagttctcacaagatctgatggttttataaatagtttttctcccccacctccctctgtacttctccttgctgcgttcatccggagaaagatgtgtttacttccccttctgctgtgattgcaaatttcctgagacctccccagccatgctgaactgtgagtcagttaaacctctttcctttataaatcacccagtcttgggtatgtctttattagtagtgtgagaacagtctaatacaattggtgatactgagcattttttgtatgtttgttggcctcttgtatgtattcttttgtggagtgtctgttcatgtcctttgcccactttttttttctttttttgaggcagagtcttgctctgtcacccaggctggagtgtagtgatgctacctcagctcactgcagcctcggcctcctaggttcaactgattctcctgcctcagcctcctgagtagctgggattacaggtgtgtgccacaatgcccggctaatttttttgtatttttagtagagacggggtttcaccgtgttagccaggatggtcttgatttcctgaccacgtgatctgtctgcgtcggcctcccaaagtgctgggattacaggcatgagccaccgcgcccagccctttgccaactttgtaatagggtcatttgtttttttgcttgttgagttgtttaagtttcttatagattctggatgttcgaccttttgtctgatgcatagtttgtgaatatttttctcattctgtaagttgtctgattatgctatcgagtaagcagagttttgcacattgttgtacaaaagccctttagcttaattagagccaatttgtcaatttttgttttagttgtaattgttcatgaggatttagtcatacattcttcatcaaagctgatgtccaggatagtatttcccagaatggtatttcttctaggatatttatagtttgaagtcttacatttaaatctctaattcatcttgagttaatttttgtgtattttgaaagggtaagggttaagtttcattcttctgcatatgactggccagttatcccagcaccatttattgactagagagccctttcccctttcttatttttgtttactttgtcaaagatcagctgattgtaggtgtgcgtgcagctttatttctgagttctctaatctgttccattggtttatatatctgtttttgtactagtgccatgctgtttttgttactgtagactacagtttgaagttggataatgtgatgcctccagctttgttcctttttcttaggattcctttggctgtttggattcttttttggttccataggaattttggaatagttttttctaattctgtggaaaatgatgttggtagtttgagaggaatagcattgaatctgtagattgctttggaaagtatgttcatttttatgatattaattctcacaattcatgagcatggaatgtttttccattttttcatgtaatctctaacttctttaagcagtgttttatagtttccttgtcgagatcttcaccttaattggttacatgtattcctaggtattttattctttttgtggctattttaaatgaggttatgtccttgatttggctctgagcttgaacattattggtgtataaaaatgctactgattttgtatgttgatttttttatcttggaacttcattgaagttgtttatcagttctaggagccttttggcagagtgtttagggttttctaggtatagaatcatatcatcagcaaagagagataatttgacttcttctcatcccatttggatgtcttttatttcttcttgttgcctgattgctctggctaagacttacagaattatgttgcacagacgtgttgagatttggcatccttgtcttgttccagtccttaaggggaatggtttcagcttttgcccattcagtatgatgttgcctgtggggttgtcatagatagtttttatgattttgaggtctgttccttcaatgcctagtctgttgagggtttttatcatgaagggatattggattttatcaaacgctttctctgtgtctactgagatgatcatatagattttgtttttaattctgtttatgtggtgaatcacatttatggatttgcatatgttgaagcaaccttgcatcccagaaataaagtcacttgatcgtggtgaagtaactttttgatgtgctgctggatttggattgctagtattttactgaggagttttgcttctatattcatctgggatattggcttgtagttgtctttttttgttgtacctttgccaggtattggtagcaaattgatgctggcttcatagaatgagttagggaggacatgaagaggcctccaccccatgatgacatttttaatgcacaaaattttcactgagttgttttgacaatttaggttgcatgtgtggaaagctacatttgcaaattctttgatgatctacaacctgaattacattatttacataaaagccattcgttttagtgtaagggacttcttgcaggcttttccagagccctgtaatttgctttccttcactgactggctgtcactcttctgtgtggcaggttcccaatgggctgcctcttttgggtgctcatagtacagccctcttcacacttgccctacacagtctgctggcccagaatcatggctcagttttgacctctgcctgtcagcttcaacccacagttggcaagccacccaccctgtctccccttgctacagggtcccctcgctcattgagtggctcttttgggagtgcttaaatccatctgtacactgacatctgattgacatataggaaaatctccatatgcttgccatggttaattgtgggggtgcagtctgccccataccactgcctgccttacctctgctgcccaactcctgcatttcgccctacatatttgcagcattaagcactctgaagatcccattgctcagcccttcaggcaagaaatgatcaccagtccctgacttagtggaggtggggagaacatttgggtcccctcaatattatagaaggcagtggtggagaagtccaagaagaaaggatgtcagctgctccaaaaaactgttataaggtgacctctctacgcctcttattctagccagatctactgagctggatggaggttgaggtggtgatcatggtggtgagtgttgaacaaagctcccaaatgaagcaagctctgtggggaagtgcctgcctttgactcctgacagttctctaaacttaggaagtgcaggagtcagtgcctttttggtcttaactatgattgctgcaaaaataagattccaccttgcccctaaccccatcctaccatacaagtcctgtgtagatgaagcaagcaggtctaaaacctcttaaagtgatgataattttatcaaataaactgactttactctctgcctgccaagttttcccttcagaattgtacccatttgtcaatctgtccaaaaatgtggtattttaagtgatgtttttccttctgatttaatgcagtaaatataaatttgtgactataacctatgagccaagtgctgggctaggttctagagattcaaataacaccaaacaacataagggtccatctattgggctttctctcaggccttgtactcatgttatatgaatgttattgctaattcttaaatctgaactgcaagatgagtatttttcgtgtttttatgatatgacagtggaagcatagagaggtttcataactttctgaaggttttatatccaacaaatttggaagtcagagcctatttccactatatttactataatatttcttaagaaattggaataaagacatagctcttgccttcaaggcgctcaccatctagtgaatttattagtgagtacccaaccaaaaataacagaaacctgattgtgatactgtagtccttgaagtggttaacaaaggaaatgaaagtctaagagattccagctcagttgtcaagggtaatttcccagagggggtctcaaataggagtgtttattctatctttggattcctagatgatgaatctgagaacagaattgagtgtatgtgatagataggctggatgtgtagaggcaagctgaaatggacggctgcttcactacagccccacttaggagtggccctagaaaaagccatgtgaagacagggaaatccatccaactggcagagctttgggtggtctacctggtcatctgcttggtgtgaaaagagaagtggcctgaagtaaagtatatgcaggctcatgaacagtgataaagggtttggctggttagtcagacatcaggaaggagaagtctttgcttctgctggcagtcaaggggtccctttgttcctgaaatatcagctctttcccaaagagttttgtctcaagatgcagtctcagactcatcttccttttcttgttactatttcaagggtcatcatgaaactttagtatttcaatctcaggctaatcccagtggtaggtcaagcctggattgctactttttttattcttcctgttgctctaattctgactctatttgtatggccctactattggcattttggactaggttctgggcattccagcctgtgtcctgggaactcccacagtggccgtcacagttcctacagccgcttctttctgctcagttctcctttgtgtatatgagagagtgtgggtgtgttcttcggatctcctttgaagctagcaatgcaatgtgtgttcaagaatgtatcatttccaggttaactgtggtgtaggaagcttctttaaaacacttagatattcgtaattatgccccattctgtttttgaacccattctatagggcctttgcacccactgcttcaacaaagcatctcttacaagaaaaccaatgacctctaattgcccaataaaatggtgattcctgagtccttgtcttactttatctgtaggaagcaactgacttagttgttccccttttccttgaaatactttcttcctttggcctccaaggcacaatttattctctcttaattctcctcttgcttcacaggcagcttcttctcagcttctttagcctatctctctcttcttgacctccaaacactgaactacatcaggattcagtctccagaaattttctttatccatgttcactcccaagataatctcagccagtctcatggctttaggtaactctgtaagctgatgattctcttttctataactccatcaaaaactcttccctgaactccagacttgtacattcaacttcctacccaacgtttatacttggagtcctagtaaacatctcaaattgtaacatgttctcaaggaatttgaagaattgtctcatagtcttctctgcccaaataaatgatacttctagttgctcaggctaagaatcatggagctattactgactctttactttatatcatacacatcagtttctcctaaatctgtccagaatcctgactatctccattagtactacacttccacttcaccatcatcttttgtttggactattgaaatagaatcctaactaatctacctgttctatatttgcttcctagttgtccagtctttgcatggcagccaagttagatcatgttttttctcttctcacaacacttctaatggcttttcattgcactctgagaatcagatccaaaatcattgctgtggcctacaagacccttaactgatctagtcctcactacctctctcccacctgctgtttcattcttcctctgctcatttaaatctaacctgggattcttgttgttcttgtacatgtcaaaaatgcttcttacctgagggtctttgcattttctgtttcctctgcctggaatgctcttaccacatattctcaggatttgttccttttatttattttttataacttttatctcaaatgtcattttatcagcaaggtctttcttgaacatttcatgtaaagtaacatcttctgacaatcttagttcttaccccaatttcttttttctttatatcatctatcaccacctgatatatacatatctgtacttgtttattgagttttctcccacggacttttcctgtttggttaattgctatactcctgcagtcagggcgacacctgacaattggtagctcttagtaaatacttgttgacttaataagtgaatgacagatgaataaattaagggtggatatagtaaaattgagacaaaacacagaaacttatttcaaagtttctgttgactggttttaaccaaatgcaaatttcaaatccctgacagaaaagccagctcctctcttaattttgacacaatagttttgactgtttccattttcgtaaggaataactagggagctgtacaaatgatgagaagccctgtgggcatttggtaccatacatcatttcttctttgctgctagggctgttattgcattccacatttttactcccacacgctcatgtgatggaagctacaaggccagactaggtaactggtaagatctccttttgctctaaaatgtataccctgtgcatttcttttccttccattccactctgtgtgcatttagtgcagacattgttccttttcgcctcatctgtattgtttgcctgctcataacttgcagatgaagctattgtgggacatgatttggaagactgatcttgactatgtctttcaaatgtcagttaatggtggctgtagaggctgctaatttaggaatatgattcggatagtgtggatgatgcacctgttgttcagactaaggctctgcttgaggctatcagttttcatctgtagagccgtgtggagtttagggctccgaaggccattaaaaatggctgctttccgtttagtcaaagagatttgcagaggtgatttttcagttagtctctgaggttgttgacagaaaacaaggggacagggctctttctgtaaacatttctcaccagaatttttagcctctcattcctggcataagatttttgttacatttttgcctaaaatcaatacacttagatttctctgggtctaatagaattatgtgtgtgtttggtttgtgtttttgtgtgtgtgtgcgttgtgttgttttttcccttttaatttacatagcgtgggagaaagaagatttttatggctgggatgacagaatgtttgggttgagcacatgtccagcaaagaaaaggaaagaaaaaaaaatataagccctaacttagaaggagaaagtttatttagaaatagaattaacctgtcttgaacatgataaatgccatacttttcaaaggtttgttatagaattgatttctttccatatgtttctagtggtttaatttgattggcagaagaaaatgttgccatttgatataggagaagttatttttaatgcacaggactgtaggtgtgaattttatttgtgttaataatgttgaataaacgcatttatgtgttgggtttatttctggctactgtgctactacataatttgattgttcagttttcagacatggatttaaatctttacacagctgggaattagctagtcacattgtatttgcttctgcttatggaatcaggaaaatgaccgaactaaggaagaggagctatttcaaggttttcttatctttctttaaagtacaaaaatattttctgtaggaacttcttaatgagaagcaacttaactctttccagaaatgtgtttgaataacaagtcttctgacttttctgtttaattgctacatattgctaaacagaagatgtaatatgttttctatattttctttaaacctatttttattcttttaaaagagattaaatataaattaaaaattggcttttattacattataaaactattatcttcaatatttaccctgacaattataattttcaatcactgatcttcaagtactcaaacttgtgaaatggttacaggggtaatgctgtttcaataatactaaatgtgtagtattcttatatactaaagtagacttaaatttttgtagactgtaaaattatttgatcaagttgcatagcttcagtgacaattccagttaattcaggcaggattttaatttactattctacatcttaggctaagtgttgcccaactccagtggagttaagactatgaggctttagtatacatatacttcgattttgttttgaagtcctcataaaataagccacctttggctcaggagtaaggtaggcttttttcctggcttattttattactgatttgttctatggatctgttagggtttaaatgtgtgtgtctccccaacattcatacgttggaatctaagatccaatgtaatggtattaagaagtgggcctttaggaggtgatgaaggtaggagggctccacactcatgaatggggttaacaacctttcaaaagggctgaagggaactacctagatcttttttatttgccagtcctttcttccactatgtgaggaaacagcaagaaagccttcactagacaacaactactggcacctagatcttagacttcctagatccagaactataggaaataaagttatgttttctataacttacctagtcttaggtattttgctatagctgcatgaatggactaagataagatatgactgcacgtttgtctaattggataccaaaacatgactagagcttaaatggttggaattattcaatctcaaagagttagtactcatggatagtagagctaactcaccaatattcagtccagctgattctcaacagggatgacaaaaatttaatcaagaatatcaatcaacaaaaaaatatctattgagtagatgatcctggtggtatgaaagtgaacatgaaacctgtctccaaggagcataaaattaaattgatgagaaaattatatctaatacttacctaatgctcaagcatatgaaaagttacttagctacatagtaatacaaactaataataaaatataacttaattgccaattgagggatataggggatacaacaaatgtcctgagtaaatttgttttttcaaacctgagtaaatttattctctcccctgactttttttttaatcccacttcttgggttaaggtgggttgttgcatataaataagcaagaacagtaaatagtatcagttcacatttactgaatggtttctatatgtagggcacaggtttattacctcatttgagactgctaaatctcatgcaattatccccatttcacagatgaggaaactgagaacagaatatcttgttgaaggctgcacatctggcaagcaccaagactgagatttgaatctaagcagtcaaggcttagtgccagtggtctttgccactactccatcctgcccatccagcatacctgatcctgtggtgtatcagagagggaaatctgaccacagagagccagcttctttcttgctgcaagtttactttcacagggctccaattagtacactgaaagagctcatttactaaacgggctctgagtaattggctaatgggcttggggtgagtggtgtcctccagagggctatttcctcgggctgacatatcgggcagtcaagcctgcagttgtttatcccactccaggatcacacagccaagcacattaatgctgctggaaaatgattctctatttaaaactcaaactgggtgaacagagcctggctctagctttctttctttcttttttttttttcttccaacttttaggttcatggggtacatgtgcacgtttgtcacatcggtagattgtgtgtcatgaggtttagggtacgaatgatcctgtcatccaggtagtgagcatagtggccaataggtagtttttcaactcaggactcggagcccagcaaggtggtcctgggtgtactagggtgtaagcttttaagctgggggtggggtggggaaatagttctcacctttcatttatgggtgaaaacaatgggggcttgtgtctgggttttccctcagttcatgtgctctgaaagaagcatgcctcctgtgaaaggggccaagtcactcagctttaccactctgttgttctaccaccattatcctagatcctgcccaaaggggaaactgtaacatgtagatcatttgtcccaagtgacacagtttattgctgccacctctttgtaccccatgtgtttcttctataaaatggggctaacaataatacccaataatacctaccctatggggttgttgcgagtgttaagagttgataaaaataaggtacttagaagaatggccaggccacaataggcattcaacacatattagctatctcattattattttttattattattctttgtatcagatagtgcagtggaaaaaaatgggctttgaaaagagttcaggttctgattattccatttactatgattgggagcttgggcaagtcacttactctttcagcttagagttctcatccgaagtgagaaaaacaccaacttcacagggctgtttaaaggaatagtcacaaaataattaacatctatcaatttcatttgcaaactgtaaagcttcatgttcattatcatcattaattccctaaaactggttcttctattgaattctcttttgtattaacccaatgacacaactattaaactaggagtcatcttaagctcttttttcccattagttggcccttaagatttgttgatatctctagcatctggccacttcttcctattccgttgcaacttccttaagatagggctttagcagcctcctaattggcctcctgcctccagtctctagtctgctggcaggatgattgttcaaaagtacaaattcagtcttgccattccctttcttaaaactccctagtggttcctcattgccttcagtgtaaagttctgatgtcttagcatggcaagcaaggccttccatgccatggcttccattaacttccttagggttgctgataccttttacctttgtcacaccaaattaaatatagctcccagaatatatctgttacggttcacttcatgtgtccacttgactaggatatgagatgcccagatattttgctaaacgttattctgggtgtgtctgtgagtgtgtttctagacaagattcacatttgaattgtggactgagtctagcaggttgcctccccaatgtgggtggacctcatctaatttgtccaaggcacccgtagaataaaaaggctgagtaagggagaaattgctctttccgccttactgtctctgagttggcgacatccatcttctcctgcctttgcattcaggctagacctttcccatcggctccctcgggtctgcagcttgctgactgcagatcttgtgatttctcagcctctataatcacatgagcgaattccttattaaaaatctctctctccctcatatatatttcctattggtttcatttctctggagaaccctgctgatacagtgtccttgtctctttcttgtgctttctggccttttccttcccatcctcttctacttacccttcaagattactctagcatcttacatctagcacctactccaaagaaaccttctctggcagtccctttcaacaccctggctgagttaaatgtccctcctctttgctcccattgcacccagcccagtatttgctctgatctgatcacatggtactgtagctgctcctttatgcttctgtccctttatggaggaaaccttcaggattctacttatttctggattcctagtgggttgggaaaaaaaacaataaacattgattgaatgaaaaaataaacattataattaataaaaaataagattatgtagttgcctttcaagaactatgtccaaattgccaatttgctctactcaacaagaagagaccctacttgagatttattactaaataaatgactttgagcaaatgacacaacctctctctgcataagttttgtcaacttgtaaaatgggactacaaatagtatctgccttataggacagtatctgccttccttatttttggaaaacctaaatgaaatatgcatattaaacttttaaatcaatgctttgctgcttggtatcctgtaaacacccagtgaatgtgaatttctactgtcttattagctccaaaattggagtaaacttaatccttcattcaagatagttgctattagacgtggtcagtgaaattggtgggagagctggtctatggattcccttgaccccactgaagtagctcataatagaatgcatttactaaaatccaacaaggtaaatataaggtaaaacaatggaactcacagccttaaagagtcctggcatgacccagaggaaaaaaaaatgttgatctcctctccctctgtctgatggttttctctgccctgcagttcacagtgaaatacaaggtttttaattcccatgcacattttctaatctttctccctttctgcttatgccttttaggaatatttttgtctttttaatattcaaaaccagaaaagaataactgatatataaaagacagggaggtcaaataaggagagatgctagttggcatgtcactgtcagtcacatgctcagtgcaaggcacctgtctagagttcctgtgtcacctcatttgccatggccacctgcagtgctgtgatcaacagtcttttaaagcataagtacaataaataaaataccagcgatcctttacatcttaaactggggcatgaacgctgatgaagattaatcagcaaaagggcaagatagggtcttagaaagagcatggattttggaggcagacagctggatttcaatcctttctctaccacttttctttttctttttcttttttgagatggagtctcactccgttgcccaggctggagtgcagtggcgcaacctcagctcactgcaacctccacttcccgggttcaagcgattcttctgcctcagcctcccgagcagctgagactacaggcatgcaccaccatgcctggctaattttggtaattttagtagggggtgggtttcatcatattggccaggctgatcttgaactcctgaccttgtgatccatccggttcggcctcccaaagtgctgggattacaggtgtgagccactgcacccggccccatttttcttaattactttgaacatatttactttctttgaacttcattttctgtgtccatataatggacttaacagcatcactctttaagggttgttgtgaatagcatgggttttagcaacaaataagagctgttctttcttctatgtgcaagggaagtatcatgtgcaagggaagtatcaggtgccatctttggcaatcttctcatgttctccttgaatctgaaaagcattgaaagatagtatcatggctacatatttgttgagagcttagagataaaaagagtttagaaatactgttgattgtgtaagtaaatgttcctccctgcctccaacctttccctccttgctcccttcttccctcccttccttccttcctttctttcctttcttttcctttcccttcccttcccttcccttctcctcccttcccctcccctcccttcccctcccttcccctcccctcccctccccttcccttccttcccctcaatatgtttcccaaataacaacccttagtcaaagaagctcatctttttgcatgttattgatgccatcatcaatgcctctaggaagcaacacttacttcttttatgtgtctccaggtctaccatgtaattttgtagttaaaatcttcatttcatctattgctattggttctacattcttcattttatagtaaaagtatgatatccttctatgacacaagtcaaaggctcttttgatgttgaacaagtggttcgggggaaaaagaatcttagcaggaaagactcagccactatatcattgtgcataatgattaggctaagccatcttatataaaatccatacttaaaatcttaacaggtaccactgtacactgtttagagtaaataaataaaagggtttcaaattttatgtagactcttagtttgggaagagatttgagtgcagtggatctataataatcatccattccaaaccagtcatttaatcatgtgaacactcacagatacacatgtcttgttcatggataagctaattaaagacagaggtggaaacagcacttggggcttcaaagtggatcacactgcccagggccttgggagaggtcagtgaaaatgacacatgaacatagtttcaaccccaatgtaactcataccttctctttaataactagctggcagaccctcatttatttttcaagattctattcaaatcccctttcctttggaaagttgtccatgaacttcccagaagggctaagtgatcccttcctttgtacctcaagttctttttttttttttcttctctttttgagagggagtcttgctctgtcacccaggctggagtcagtggcacaatctcagctccctgcaacctctgcctcttgagttcaagcaattctcctgcctcagcctcctgagtagttgggactacaggtgcgtgccaccacacccaactaatttttgtatttttagtagaaacagggattcaccatattggccaggctggtctcgaactcctgacctcacgatccgcctgcctcagcctcccaaagtgctgggattacaggcatgagccaccgtgccaggcccatacctcaagttcttttatagctcttgtttctctgtgtttccagaccagttcttttgggtctacttttccaatgagaccatttatagctgagggcagaaactacgtgccatttatctctaaatcatcacccttagcctggagtctggcacataataactgctcaaatggatatttgtggagtgataatgaacaaactgtgcttctcacatatttggaccagatgtggagtcacagggctcacttgtgaaggaaagctgctcatatcccctccgcccctgacattcctgacgaatgatgttcagcctaaatgtatgtcaaatgctctcctgtctttccagggctgcacagttgcattgcttctttttcttttcaggaagactggagggttttgtatgcgatgttggagtctccagagtttaggaggagagatatatatcatggctcttattctgaggcctataaggagttttattttctgaataagtattgatcgcagcttacaaaatactgcaaacccatataattaaaaataatgagaccagtcatttgtgggcagtgcatggctaaatataagagaagacaaattcttcaggtgcctgagattttataattgtacttggttgggaagcttattaaagccttgcaggtgcaatgtttcctcacagagtagtgaacctttgaaagatatgcataataaacagagtttgaaatatgtttttattccaggccatatggtcctgtctggagctttcctggatctttgggtcagttcattgttgaaagatgggcttgcaaggacccacctctcggagcagctgtcagagccctatcagaacgaatctgcttttgcatgattatttattttatgtggctctctgaaatgagcccagccctgctcagtagctgaaatgtgctgagcaaagtctcttccctgaacagcttgtggccatatcaccaagcagtgtccttccttgtccttaaaaagcagactagcgagacttgtacattaggtcaggatggacagtctgggtgaggtttgcccacctgggcttgaacttggtgccagcaatatgaaaacttacacggtagcattttaaagaggtgtcattgctctttcttctcagctgtactaattttcctatctctctcaactctaggcaattactgtgacagctgtccataagtacttgaggtgtttttgtggtgtagtggtgagaacaatgctaacacagcctctccttttgtaacagagggtggcattgactcctctgagaatgtcttttaagaggcatttaatataatttattcagtatttattgcacatatatatatatgtatatatacacaaatagcagttattgacaagagacttggttttgaagtccagtgatcacaagaagatgttctgtttcctaacatagaaaatgggcagtgagttgatcagaatggaagaaggttaaatctcatatctctttatggttatttgaaaaagttgaagttgaattttgtcatcttggtcaaggggaaaatcttgccgttttaggaagcgtctttcatctactcttatactgctgacattatattcaatatcatatatatttgtagccatttgttcatttggactatattcagtaagcacctgtcctttactagccactgtgctaagacttgagaatgcaagagccccagaattcttgcactcctggaacttagaatctgaagtagaagacagacattgaaaatatagttaattatgtcttacatatgttacaaaaagaaagtgaaagatattgaatgaatgtacatagcaagaaaacctatgtgtggtctttggagtctacttgccttaaaggaaaagtctatgtcaaatttctttcctcctatataggagtcactctgcctgaaacaataaattgtatatagtactagatgcttattttggtccattttctgctgttataacagaatatctcagactggttaatgtataaagaatagagacttatttcttacagtcctggtggatgggaagtccaagatagaggaccttcttgctatgtcataacatggcagaagccatcatgtagtgagggttgggggggagagagagagagagagagagagagagaatgatataaatatcttccattaggccccatctcccaatactgaggcattcgggatcaagtttccaacaaatgctttttggggaacatgtggaaaccatagcattacttaataaaaatttgtggatataatggagaatgaaagtaagaagaagaaagtgtaaagattattttgttaattcaggctacagtttaataaattataatttgaaatacctaaattagttttatggtaaaactacatatttttcttttgccgccacattcagtgttgccattttaaaatttacccatggtaactatttttccatttctggagtcatagaacctagaacttaacttcttacttgagtacagaaatatgagactctgatatttctctccagggtatcagctactttcttttggggatattcttaggtgtctttggttggtagaaatgagctatttctttttttcttttttttcttttttctttctttcttttttttcttttttttttttgagatggagtctcactctgtggcccatgctggaatgcagtggcttgatctcggctcactgcaacctccacctcccgagttcaagcaattctcctgcctcagcctcacgagtagctgggactacaggtgcatgccaccacacccagctaatttttaattttttagtagagatggggtttcaccatgttagccaggctggtctcgagctcccgacctcaggtgatccacccgccttggcctcccaaagtgctgggattaccgcagtgagccaccgtgcctggccaaaatgaactatttctatatacaagtagatcaatattcttatggactaaaaagtggtagctatttcaaagtgtgtatcttaggcctagggataaaatcacatgatggaaaatgttttcttccatctgtactatggtaacctaagggactcccaggaccagggagacaccattcaagtttcaggctgtgcccaggagagtgtggtgctattaccccagaatatctgaagctttcagagttaacagatcaagaggaaaacactcaagaggactgcccagaaatgcagccaagggccaaatagagagttcttgagaagcattgggaatcagagttggaagtgtggtagcagccactgagacagtggaggagcttttaggcagtgtcataaagtagaaggacagtggtaagcgatggggaatacttggtctgaatggatggagagttgaaatcatcaggttgggactggaagcagaggctggttgtgatgggagacggagactaccggcagtggtagtccatcttaatccagagattaagatgctggataaggacttgaaatcaatggccaccgaagcctttgttgttcagcctggagatgctgtgattccaccacccagatgggaatagtgagaccagagtcctattaaagtcatgttaagatgatccctctttgctccttccctttcttccttcctctctccctccctccctgctttctttcattccttctcctctcatatctctttccctccctctcccacttgttccttcagcaagtgtttacttagcctctactatgtgctacttattgttctcagggtggggtatattaaaaagaatagatgaatatgatctctttttctcatgagcctttccatcttctgggggaaaataatacaacatgagtaaatacatgaagaaaacactttattttaatggtaagggccacaaagaaaacgatacatgatgacatgagagagaatgggttggttaggaatagaattttaaactggagagttagaaaagactaactaaggttgaattggaactaagaccttaatggcaacaaaggatcataaagtgattgatccagaatgatccaggcagatggaaaagctagtgtaaaggccatgagatggtcaagagctggcacattccaagaagaaaaaggatctcagtgtccctggaaaatggcaagtagagagcagtgcctcatcatataggactttgaaggtcatagaaggatttttgctattaggggtctggtgttccaggtgcttctcccacttccaaccacttcatgctctccacttggtctagcattgttcctcccatagtggctttgactcttgcttgtcacttctagtccttgtattctagatttgcaatctttcaatgttatccatatggaaagatcatgggctttggagtcagacagcctttggttctatcctcagattctccttgtattggctgtgtgacttctgtaaaatcatatccacagaaagcatctcttgtgattttatcagcttaagggtctgggggtatttctggccctctttctctgtctcccttttccagcctgtctttaaaagctggaatgctgtaaggcttgtaccaaagtcttgttttcttattctctaaattctattcaacatccatgatttcaattaccatctccccatcattatccaaagtttccacctccatctcggactctactttgagctctttatctgtttatgcaattaccttttcagctctttctttggaggtcaaaaaaggtaacgtaaagtcatcataaccaaagtttgattcattatcttccctgccactcccctaaaacttatctgtgttcaatattttctaattcagacattgacaatattcattaaattgtgctaactttgctttcttatctccttctgcactgatagtcagtgaattgctgaatcttgttgatttttatctgaatatctcctctgttgaatccatctggtttgctccatcttcacttaagccacccaagaccaacctctcatcatctccgttgtgatttactgtaatcactcctaaatgctctctttgattccattcttgctacactcaaatctgttttccacagaggtcacagtaatcttttaaaaatacaaattagctaaagtaactcccctgcttaaaacccttcgatttttgttgttgttgttgttgctgttgggataaagatcaaaatttttaaaatctttaaagggagctgaatgtctcaggcactactttgcgactttctccccataaattttttataatatatcctgctgaactgtcttttttaagttccttaaatgtgttgtgaccccttcccatagctgagctttcagatatgctattttgttttcttggattgctcttgtcgttcttcatctagtgctgtagacatctgtcatgttttcggctgtctagcgtttgttgaacacattggttacatttgaaagatatccagcattatgagttttgtctagccaaggtagagagtgagattccccaggtttctctggagcaagggaacagacatgtgtcccaccagtcagactcatctgtgtgtgaatttaattcaaggggaacagcttgacaaaggcaaaacctattgtgctggtaaggatggcagaagagacatccagcttttgagaatgatagtccttgtaaggtctagtttctggtacagaagttgccaagatgttggtgtctgctaggattgcaagaaagttggatgtggggagccacatgaactgcagaagctcacgctcattgggtcattagcagttgaggcagtttctttctttttttttctttgagatggagtcttagtctgtcgcccaggctggagtgcagtgacgtgatctcggctcactgcaagctctgcctcctgggctcaagcaattctcctgcctcaacctcccaagtagctgggactataggtgcctgccaccactcccggctaattttttgtgtttttagtagagatggggtttcacgctgttagccaggatggtcttgatctcctgacctcatgatccgcctgcctcagcctcccaaagtgctgggattacaggagtgagccaccgcacctggcccaaggctgtttctttaaccaactagttctgtggtgtgcttctgagcactgttcctgagagctttatttgagcttgttttttcagcccaacactttctatgcttcaatagccaacttcagcttctgttgcttacaaccgagaaagagccctgctggttagtgctaggtaatccaactcatttgtgggcactcagctctagtttactccaggaaactgttccattagccttattctgccacttttgctgattaaggcagatcttccactctcgtgtgctgtcaagactcagtatggcatgatggcttcacctgctgctgctgttgttactctgcctgggtttctatgtcaactctcctacttgcttgatgtatgaattttgcaaaggttacctaaccgctctgtgtatcaattcctttacctataaaatagcgacactgataataactatctaactcataggttgattgtaaagactaaatggatgaatgcatacatgaaatccttaaagtggtaactaaatgttcaataattgttaactaaaatgttctcacattacccacttctttcttttcacactacttttcacagacagtaatttgatactcacagagtgataatttgatttagatataccttccacataagctgtaaatgaagggctgcttattttgttcatcattgtattcgcagttcctagcacaacgtatatttacttaatggatgtaggatggatgttgcaggatcccaaaaaccttgagtgatgccatctccatctcccagcacactaaagcaggggagcttcagcagtatccagtgttcctggcagaatcaccccgagctccttgtttttgctgattatttcttgtgacccacaactgacccgttctcacagagcacaaaccctgtcccagatgctgaacttgccctctatgccctgatttctctgcttctcagcaccgatcattttgtgctgactctataccctctgaaagctgtttgaagccagatgggagaaagagataaaacagatttcattcattgccctcccagactctgagggaaataaaaacaatagcaacaacgaggtagtttatattgggtgtttactaggcattattcattatttaatacgcaccacaatcctatgaaaatgatactataaccccattttgcagaagaggaaagtaagtcccagaggagaaaaacaaaagaaagaaaggaaagtagagagaaagggagggaacggggtaaggaaggcagcttttccaatagaagagaaattcccttgctgagaagaaatttcattcccataaaagaaacttctctactggaggataagatactgtaaaaataatattgatagagaagttatagaagatgacccagaacatgaacctagcctcagatcagctttaacatttagatttttaaaatataattcctttcaactacttgctatttgcagccttttctctccaaagtctaatgtaagtagtaggaataatactgataattaagaaatctgtgcagtttttttctggttaattggcattttcctataaaatatttaaaaattagcttttggttttcaaagactctcttttcagaaagtcatagtttttgctattaagagttcccgtctgcaggtggggcttcctgcactgggattatttgggcattttcacagatgttgtccagccactgatattcagctggagttggagtggggggcttatgatgcattttctatgtttagatcttcctgatgttgttttatttttttttccaatgaaaagagaaaacagccaacatgccagttttcttgtaaaaactgttatccagctagagatgccctccaattgtaatgctcttgtgcatttcaaccaaactcaaagaaacacattttcaaagtgagtgtgggtgcaattgccagaaaattggcttcaagctgggtccccggaaggctttctttctccagctttgacaggccttgagagaggttctcataagaccccaggaagatcaggtgggtggtttgggactcagagcccagttggcaaccactctaaaagagcatggtgcattagtttcccgtggctgctgtgagaaattaccacaaacctggtggctttaaacaacagaaatttattctctcacagttgtggaggccagaagtctaaaattaaggtgtcagcaggaccggttccttttggaggctctaagggagaatttactccatgcttctatactggcttctggtggctgctggcaacccttggtgttccttggcttgcagatgtatcactccaatctctgcctctgtctccacgttgtcttctttcctgcgtgtctttgccctttctcttatcttctgaggacacttgccattggatttagggcacactgtcttccaggatgatctcatcttgagatccttaatttaattacattctcaaagacccttttcccaaataaggccacattcacaagttttgggtagacagacttatcctttgcaggggccaccattaatccacacacatggtgaactgagagaactttcctgatccactggggatgaagctggatttcagctaagcagtgggctaaaaaggcatttggccctgctgagccaaagcatcttcttagtttctcagtgatcgccatacatttctgaaaggagatacggcatttttcagcagaggctaacttctcgctatgtcctcacatggtctttcctctgtccatgtgccttcctggtgtttattttaccttgggttcggccttccttattatttcatttactctttttaacatcactaggagtagataatagtgtctccattgtattcatgagaaatgagaggctccttccagctagcaactggtgcagctgggattaaaatgtaagcctgtagaggttccctttccaaacatgtcacctcagtgtttctgggttcctaaccttgaagatatttcaggcttgtctgttttccttaagcatggtaaatgtggttgttgtacagtctgtatgacagttctaataactaagtgctttgtggatttgtttctgttgtctgttgattgtggttatttatttttctttatgtcataattttccatgtctttctggttatatatgattatgtgctgatgattatacttaaaatattgtaataactattggagttttagaatatacagatcactcttttcaaaaataacttgaatgtccatctgccaggtacttgggggtactaccagtatgccatcacctcaaaccaagatccagactttacacttgttgaaccaccggggattaaactcaagactttccaatgactagtttgtctctggcactctctcaccattacacggagtgttttatcttttgagtgtgtagtcttctctgggtggggtctcatactagacttcccacctgctatgactctgagttttgacatctagctttaccccaggaaacagaaaaagatttagattttctaagattggaacatgccatcaggcaaaagtagctctcatgtctaccaacctcaaattccactttcaaatttgacttgttaattctctactaacttgtcagatttccattgttttgaagatttatttttaaaaactatattcagccttctttacttactttccttaggaaggtttccttgaatattatagcttgccattagctaaacagaaaaatctagaggcctatatattttttctccctgctcattcctggcactttactcctctcttttttttcctttgtgaggcggctgctttttgcactgtcctgaatttttccattgattcttgacatggcagcttgggtctatggatgagtggtttttttttgatagcttgatagttttgtcacatccacaggtatcttatatataagtcctagaccatcgtgaaaacaaagactacctctgtttataaattgtggaaaaataaattccattgatgctgagcttccaatttctagagttttgtaatgtgacaaacacaagcataattaggatgtttcataaaccagcaacttaaaaagattctgccccttgtcataaaataatgagtttctaaaataatgtctctatgtatatgagtatgcacacacgtgtagtgaagaattaaattttgtccaaagagcggtttggtttttgcactcagcttctaagaggcaatctatatcataattgaaaaaaatctctttgtttaggttgggagctcatcacatcaggaagaccaatcacatttaatgtgggggctttaggttcctggcatcagttaaccaggaaactgagttaatccacttgggcaatcaattgatcaatcatgcctctataataaagcccttgtgatggttaatactgagtgtcaacttgattgaattgaaaaatgcaacattgatccttggtgtgtctgtgagggtgttgccaaaggagattaacatttgagtcagtgggctggggaaggcagacccacctttaattgggtgggcaccatctaatcagctgccagtgagtataaagcaagcagaaattgggtgggcaccatctaatcagctgccagtgaatacaaagcaagcagaaaaacatgaagagacaagacaggcctagcctcccagcctacgtctctctcccatgttggatgcttcctgccctcaaacattggactccaagttcttcagttttgggactcagactggctctccttgctcctcagcctgcagacagcctattgtgggaccttgtgatcatgtaagttaatactttatatataaagcgtagtttatatacatatatatcctatatacataatatatcctattagttctgtccctctaagagaaccctaatacagcccccaataaaaactctgtacactaaaactcaggtgtgctttcctagttggcaattctctatgtgtattgtgcacgttaataccaggaagacaatgcatttgactcccaggggagtcatatggaaacttcatgtttggaacccctcaggtcctgtgctatgcatttatttctttagccaatctctatctcttcctgtaataaatcagaactgtgactataacagttttctgtgaattttgtgagtctttttagcaaattaccaaaactgaaggtttggcaaacccttgatcttgtggttggtgtcacagtgaggacagtcttatggttgatgttatgccctcaaccttttcagtctggctaactgggcagtgcatttatgtgtgcatgtgtgtgtgagagagtgtgtgtgtgtgcgtgtgtgcgcgcatgtgtagagtacaacactagcatagggttttttttttttttggcagagtgtcactctgtcacccaggctagagtgcagtggtgcgatcttgtctcactgcaacctctgcctcctgggttcaagaaagtcttctgcctcagcctcccatgtagatgggactacaggcacatgccaccatgcctggctaatttttgtatttttagtagagatggtttttcaccatgttggccaggctggtctcgaactcctgacctcaggtgatctgccgcccgttttggcctcccaaagtgctaggattacaggtgtgagccaccgtgcctagcctgcatagggtatttataattagaacagcccgaaagaagctataacatattagcaaggcttagatacttctcttacacttttatttccaacctgcttactgtgagacgttttccactgatcttgtagtccaaacccataccctgactttgtgatgcatgtcatttttatcctagtgtgctccatactcacccaaagctcctgtgtttattttgactccaactctggaaacagaaagtgaactcatagaagtgttttttttccccctggcaagatttaagacctcataaatcatggtggcaagaaatgtaatgatggtctcttttggttcttgaggagattggaagaggagaggcatgcaggttccagtgtggttttgtaatttttcccagtggtggcaagtgaggaagattccagcaggctagttcctcagtcttaactaagtaattctctacttcaatgttcctgcaatgaaaatgcacagacattcaccagtgtcactcgggcagtttagtgcctgctgcagaactcctggcagttaacaatgaaattgtcaagatttcctttttgttcccttccaagcaggcaaggcatcgtttttgtccagtggtttagcacatgaatcaatccttttatatgtgatcagtgggaccatgtgtgttttcagaaactgtctggctttatacctggcagggtttcttgttgggcagtggttctgcaaatgagaaagaaaatatgcaaattctcacatgtccccaggttgaattacaaggcaaaagagactattgctttctggcctggtatttggctttgagataaatatatatatatatatatatatatatatatatatatatatatatatatatttttttttttttttttttttttttttttttttgagttagagtctcactctgttgcccagactggagtgcagtggcatgatgtcggctcactgcaacctctgcctcccaggtaaaagtgattctcctgcttcagcctctcaagtagctgggactacaggtgcccgccaccacgcccagctaatttttgtaattttggtagagatagggtttcaccatgttggccaggctggtcccaaactcctgacctcaggtgatccagccacctcggcctcccaaagtgctgggattaaaggcatgagtcaccacgcctggccagaccattttgattcttagagatatgccatccagtacttaaactgggttcttaaaaaaataaattatataaaacattgatatttccagattataactgacatagcaaatgtggacaggtaggagaaaaagggatatctagtaatgcttttattcatgcacagcttaatgtgcttattgctatatttcttatttctcaacaatatttatttaaaaagagctaatatgtaaatctgtacaaccactatggagtacagtgtggaggttcctcaaaaaactaagaatagagctaccatccagccatcccactgctgggtatgtaccccaaagaaaggaaatcagtgtattgaaggaatatctgcatggccatgtttgttacagcactgttcacaatagccaagatttggaagcaacctaagtgttcatcaatcaatgaatagataaagaaaatgtggtacatatacacaatggagtactatttggccataaaaaagagtgagatccagttatttgcaacaacatggatggaactgaaggacattatgttaagtgaaataagccaggcatagaaagacaaacttcacatgttctcacttatttgtgggagctaaaatttaaaacaattgaactcatggagatagagagtaaaatgttagttaccagaagctgggaagggtagtggagggtttgtaggagggggcaaagtgggaatggttaatggttataaaaaatagagagaatgaataaaacctagtatttgatagcacaacagggtgactacagtcaataataatataattgtacattaaaaaataattaaaagtataattggattgtttacaacacaaaggataatgcttaaggggatggatacatgagatacttcgatatagacatgcaatgtgtaataataacatcatgataaatcacatcagttaccgtgtggtcgtggttggtgtcacagtgaggacagccttatggttgacactgtaccccgtgccatttaccatgatgtggttattacacattgcatggctatatcaaaatatctcaggtaccccataaatatatacacctactatgcactcacaaaaattgaaaattaaaaaaaaattaaaggagtcaatccagcttggcttaattcctgcctcaaggctatttataaaaaactctctaagcaaagcagatcttacgcctccaggcacaaatgttgagggggttatacgttagactgttgggggctttttgtctacggaatatccatagaaaaaaattccaagaatgtttggagagcaacgcatgtgtagtggaatatagatatagtgcttttaagagacctgaaatacaaaatggacaccaatgaaaaaattaaaggttaggtattattttgctgaatatttagaggagtcattttggttgaaagcaatctctgaaacaattaaaatatgatttagtatatgaatgtttattctcacctagcttatttagacatatatccaccttataaagcaactggccttttcatttaatttctctactgagaaatggatatttggtgttttaggaagtgcatcccataggttgggtttatttattctggttttaaaaaagaaaatgcgcaatgcaaggactcacaagacctcagagttttgccaagcttaaaatgctaagaaaatgtaagctaaattccctgaataaagtgatggaaatcagtgtgaaactatgtggagaatagttatatgtgttgaatctacattttgatgtcttaacatggagtctgtggatgggcttctgggcatccacaaataaaatcataccaaatatttatgaatgtatacacttagtggagagatgctccattgctttggctcttaaagggcttaagcaccattttgagtttagatatggggcaaagaggatgtgctatggatggaaagttttgtcccctccaaccccgcacaaattcatattgacaccttagctcccggtatcccaaaggtggggcctttgggtggtgattaagtcatgtggatggagcccccataaatggaatatgtgcccttataagtagagtatgagagcgctccctggccccttctgccatatgaggacacagcaagaagacactcatctgtgaacaggatacagtcccacacaagacagcaaatctgttgccaccttgatcttggacttcccagccttcagaactgtgagaaataaattttttctttttataagccacccagtgtatggtgtgctgttatagccaccctatcagactaagagaggatgccatagcatttctgtactccctcggtctaggatatagtcatggctgaagctgcgtgctgacccttgactcttttcattttggaggctctgtctccagaattataagacatgtctcagtttgaccatggggacagcaggtaagctctgaggcttcctcaggcatgctactgttatctcttccaattttctagtggactttctggaatacctggaggctgtacttacaaacggaacagtgtctttactgaatatccttctaggtaccagagaggaacttgtgtgtgtatctttgtgcctaaaaagtgataggtactgaaaaattgttcattgagtaaatgaatgaagtaaattcgaaatgaatgaattgccgaataattagaataatatataacaacttattgaattaagcccctgcttgattcaagcagaaaactggaaaaggggatttttaaaatagacaaataaaagttggatatatttaaggtgtacagcatgatgctttgatatatgtacagcattgtagaatggctaaatcaagcgaattagaatgcattaccttacatacttatctcttttttgtggaaaagggggatagagaacaggttttgtcttctcccactgtgatctcctgcagagaaggagaaagagacccagactgctcatcagtgattttgtctgtgttctcatcaggccttcccagaaatgataattttctttttttttaaatttcagctatccaacttgataaagtcaatcttcaagtatattgtgcatggtctcttctggataactttgagtggaaccagggatacagcagccggtttggtctcttccacgttgattttgaagacccagctagaccccgagtcccttacacatcggccaaggaataagccaagatcatccgaaacaatggccttgaagcacatctgtaggcaagatggctgagaaatacaggagaggcgtctgcttttggaaaggaaatctgctttggtgatgatctttcaggcaatctcaacttacttctttaatcaacatttaatatcaatggatctgtgattaaatgtctgaatatgtaatgcctcgtgaagtatttaataatggcctttatttgtatttggatcaatgaggtttttaaaaaaaatggaagagaaaaccactaaccttgatttttgtattgcaaaatcagatagacctggaaacataaatttaaatccttagacatttttctagaaaaaaatgcaaagtttataaagatgatacaaccatgatttgcaactgtaacaggagaccatttattataagcgtacctgtttgtgaacttaattattctgattccataagctgtttttgcttaggtgatccactgccatgtgatccataatttttctacataaaaaatcaaagttaaaagtcacattatacagttatgcattcatttcaacaaaatagtgaattgataatctacttgttaatatattcggcccatattttgtgtgtttggacaagtacatctcccttttgcctaatgaacttttgaaaaataataaaataatagaataaattagactttgaatggc

SEQ ID NO: 66 - DNA, 67883 bp, Homo sapiens
actcacaaagcctgatggcccgtttcctgaacatgcgcaatcactttctagcctttccacaccatcggaatattgcacagaagtatgtcagtcacaggagtgtaaagaataacatttaaactatggtaatattttcattcagtaagtttctcccctttccttccttgggttagattcagtgcctgatttttttaggccctggggcgcaagcatccactttctcagaatcccattcaccagaaaccacccatttaacttgctctgggtgcgagcagcgcttgtgactgggcaacctgtgcgtcagcgtccccggtgcttcggcgctccggccagtgacggcgaccaaacccagctaggtcagacgaggtactgatcagcccaatgagcgcctggtgattctcgtagttaatcactctggttcattccgttcgatcccggaggcgggagtgtttggcttgtccctgcgtgtcacggcagggtgaccctagccccgagggagggcggtggtaccagtcctgctggcggctcagcgcggcaggacacgtgtgcgctttcagccgggtcgcagggcgcttatcgcggcccggcagtcggggccacgcctcacccccgcccgcgaaccccgacctggggaaacccggggcgctggggaggggccactgcgttcagctctggcggtccacagcccgaagcgcggcttaggaagttcgtgtcagcgctgcctgagctcgtcccctggatgtccgggtctccccaggcggccacccgccggctcccatcgtgacctccagccgcagcgcctcccacgccggccgccgcgcgaggggagcgctcgggcgcgccgggtgtggttgggggaaggggttgtgccgcgcgcgggctgcgtgctgtgcccactcaaaaggttccgggcgcgcaggagggaagaggcagtgcccgccactcccactgagattgagagacgcggcaaggaggcagcctgtggaggaactgggtaggatttaggaacgcaccgtgcacatgcttggtggtcttgttaagtggaaactgctgctttagagtttgtttggaaggtccgggtgactcatcccaacatttacatccttaattgttaaagcgctgcctccgagcgcacgcatcctgagatcctgagcctttggttaagaccgagctctattaagctgagtgagtaaattgtaaaaccagtttcgctgagagtgtgtgtctggaaaggttggtgggcgttgtgtatatatttgttagaaaatcggtaaccgttcaaacgagacgactgagttttttagcctttcgcagtttcatttgaaagtgggtatgcagtttaaaactgacagttcaaagtggtttttcagaaaatgatgccctggtgcaaactgattctgggtcccatagtgtgttaagtgtgggttggtaaaaactcttggcctttctccaaatgtatgaaattaaagttgatattggaaggataaaaacccactgagcacagaagttactataggtggaggaaacatttgttgatgttaatattttaaaggggttgaccaatataggaattggtcaatgacaattgggaataggtaaatgacaaattattggtcaatccctttaaagctttggatggtttgctaaagaattattgaactcccttttgtaattttctgtggatagttgagtgctcttactcccttctcagtcctagagatatcccctaaagcttggtttttaggaggatcttacagctctcttatcatttgaatgtcagctagtcataaataaatacaccagagtagtaaggaagagatgttttttattgatattctttacaaaacagtgctttcagagtacagctttgactggattgtatagatcttgatgagatcttgatgagaaaggtttcaacgacaaagatggcatgttaagtctaacattacccttccattataaacattgaaagatgttggttattttattatttattttataataacttttaattgtgaaataatttgagagttactgaaaatttgcaaaaaatagtacagagagttcccataatatcatgcataacaagggccaaaactaataacatgggcatgctactataatacaatgaactaaactacagactttatttggatttcacttgtctttccactgtcctttttctgcccaggatccaatcgatgatctcactttgcatttaactgctaaatatccttaattttctctgatctgtgacagttcctcagcctttcattgttttttcatggaccttgacactagtgaagaagacccggtcagttaatttgtagaatgcccctcaatttgtgtttgcttgatgtttagtgtcatgattagatgaatgttctgcattttggggaaaaatgtcacagaagtaaagtttccatctcagtatgtcatattgggtacatgatgtcaatacttttttttgagactgagtcttgctttattgcccagactggagtgcagtggcacgatctcagctcattgcaacctttgcctcccaggttctagcgattctcctgcctcagcctcctgagtagctgggattataggcgcctgccaccatgcccagataattttttgtatttttagtagagacaggtttcatgttggccaggctggtctcgaactcctgacctctagtgatcctcctgccttggcctcccaaagtgctgggattacaggcgtgagccactgtgccctagccgatacttcttattacctatgatgttaatctgtttgccagattccctttgtatttgagatcttgggagagaaacctgcactgccatttttccttaaacttttattcattaatttaagcatccatttgtggaacatgttgtttagcgggttttttttcctaatggttaaacaaaacccctattttcttccttctacattttttaattaaaattcccttctgtagggaagagttgacccttctctcctgttcattgattcagttatttgtatcagtatgggctcatggatatttgttttgttatatgggttataatccaatattatcagtatttaatttgctgctcaaattgttctggctttcaccactgggacctttttcaggttggcgcctgtgccactttgacatacacttgctttttctttttccttcttttttttttttttttttttttgagacggagtctttgtcgcccaggctggagtgcagtggcacgatctcggctcactgcaccctccgcctcccaggctcaagcgattcttgtgcctcagcctaccaagtagctgggattacaggtacgtagcaccacacttggctactttttgtattttttagtagagacggggttttccatgttggccaggctggtctcaaactcctggcctcaagtgatctgcccgcctcggcctcccaaagtgctgggattacaggtgtgagctatcatgcccggactctttttcttttttaatgcatttcttgatttctggcatcagagaatgctcaggcttattttgtattttccatgtcccaaccttggaatgatccatttctccaaggcactgtgattattttgctttagaatggtattagaagctaatatctggacactggatgttctattagagttacttctttttttttttgagatggagtcttgctccaggccagagtgcaatggtgggatctcagctgactgcaacctcctccgcttcctgggttcaagcaattctcctgcctcagcctcctgagtagcagggattacaggcatgtgccaccacgcccagctaatttttaatgtttttagtaaagacgaggttttgccatgttggccaggctggtctcgaactcctgactttgggtgatccacccgcctcggcctccccaagtgctgggaatacaggcatgagccaccgtgcccggcctagagttacttttgaactttttatgtataataaaaagtttgtgacttagcaaatgctaagtctgaaaagattggtgtcaggcctctgagcccaagctaagccatcatatcctctgtgacctacacttacacatccagatggctggttcctgccttaactgatgacattaccttgtgaaattcctccttctggctcatcctggctctgtactgcctcaaggcttcacagacagcccccattacttcagtcaaacccaaatttcttcctcatctgttacctatcttgtcataattcttcataaaaacacacgtgctctccctgccaatcgtgtctgactgatctctcaaaccccaacaccttctacaaaacaactcctttccttcctaggcatggttggatactttcgactttggatacctggtttcgccatcctaacaaagccattatataaactcacaaaaggaaacctagctgaccccatagatcctaaatcctttccccactcctctttccattccttcaagacagctttagagactgccccccaccctagctctccctgactcatcccaacccttttcattacacacagccgaagtgcagggctgtgcagtcagaattcttacacaaggaccaggatcgcgtcctgtagcctttttgtccaaacaacttgaccttactgttttagcctagccatcatgtctccgtgcagtggctgccgccgccctaatacttttagaggccctcaaaatcacaaactatgctcaactcactctctacagctctcataacttccaaaatctattttcttcctcacacctgacacatatactttctgctccccggctcctccagctatactcactctttgttgcgtctcccacaattaccattgttcctggcccagacttcaatccggcctcccacattattcctgataccacacctgacccccatgactatctctctgatccaccgggcattcaccccatttccgcatatttccttctttcctgttcctcaccctgaacacttggtttactgatggcagttccaccagtcctaattgccactcaccagcaaaggcaggctatgctatagtatcttccacatctatcattgaggctaccactctgcccccctccactaccgctcagcaagccgaactcattgcctgaagtcaagcccttgctcttgcaaagggactacacatcaatatttatactgactctaaatatgccttccatatcctgcaccactatgcaagaggtttcctcactacacaagggtcctctatcattaatgcttctttaataaaaacgcttctcaaagccgctttacttccaaaggaagctggagtcattcactgcaagggccatcaaaaaggtatcatatcccatcgctcaggacaatgcttatgctgataagttagctaaaaaagcaactagtgttccaacttctgtccctcagggtcagtttttcttcttcgcattggtcactcccacctactcccccactgaaacttccacctatcaatctcttcccacacaaagcaaatggttcttagaccaaggaaaatatctccttccagcctcacaggcccattctattctgtcatcatttcataacctcttccatgtaggttacaagccgctagcctgcctcttagaacatttcctttccatcgtggaaatctgtcctcaaggaaatcacttctcagtgttccatctgctattctactactcctcaggaatttctcatgccccctcccttccctacacatcaagctcggggttttgctcctgcccaggactggcaaattagctttactcacatgccccgagtcaggaaactaaaatacttcttggtctgggtagacactttcactggataggtagaggcctttcccacagggtctgagaaggccacgacggtcatatcttcccttctgtcagacataattccttggtttggccttcccacctctatacggttcaatagaggaccggcctttattagtcaaatcagccaagcagtttttcgggctcttggtattcagtgaaacatttatatcccttaccatcctcaatcttcaggaaaggtagaacggactactggtcttttaaaaacacacctcaccaagctcagccaccaacttaaaaaggactggataatacttttaccacttgcccttctcagaattcgggcctgtcttcggaatgcgacaaaatacagcccatttgagctcctgtatagatgctcctttttattaggccccagtctcattccagacaccagaccaacttggactgcgcccccaaaaacttgtcatccctactatcttctgtctagtcatactcctattcaccattctcaactactcatacatgcccgctcttgtttacactgccggtttacactgtttctccaagccaccacagctgatatctcctggtgctatccccaaaccgccactctcaactcttaaagtaaataaatcatctttgctggcagggctatgctgaacctccttaggcactctctaattggatgtcctgggtcctcccaattcttagtcctttaatacctgtttttctccttgtcttattccgttcttttttcaattcatacaaaattgtatccaggccatcaccaatacttatataggacaattgtttcttctaacaaccccacaatatcaccccttaccacaaaatcttccttcagcttaatctctcccactttaggttcccacgccgcccctaatcccacttgaagcagccctgagaaacatcacccattctctctccataccaccccccaaaaattttcaccaccccaacactttaccactattttgttttatttttcttattaatataagaagacaggaatgtcaggcctctgagcccaagctaagccatcatatcccctgtgacctgcacatatacatccagatggttggttcctgccttaactgatgacattccaccacaaaagaactgaaaatggcctgttcctgccttaactgatgacattaccttgtgaaattccttctcctggctcattctggctcaaaagctcccccgctgagcaccctgtgacgccccacccctgcccaccagagaacaaaccccctttaccctttacctacccaaatcttatgaaatggccccatccctatctccctttgctgactttcttttcggactcagcccgcctgcatccaggtgattaaaaagctttattgctcacacgaagcctgtttggtggtctcttcacacggacgcgagtgaaaattcatattgccttaaagtttaaacattatagaggacctgactgtatttgccaacttggattcagtctcttatgggaaagaagtaaaattggtagtatttagtaattttttaaagctcccatttttttctcaaatgaaaccctgccagtgcttccaaaacaaataatgcatatgtgagcttctatctattaggctctggtaagaaaccaggatcattttattagctgagtagcttaaactacatcctaatattataattttggtatctgttgattgaattcacagtgagaaaaggatttgagacccatatttatgttagtcatactagcaatgaagaagtactgtgtttatgatgagacattatttggtctgagatggtaactgtacccgtggattagagagaggatcccttgcaataattaatgagcccttctatgattttggagtacacacacattacatgctccttcttttatatctttgtatactggatcatgatgttttttattgtaggtctcagaattttgagaagtaatgccgctgctcacatttaattttctgttaataattctttttttttttttttgagatggagtctcactctgtcgcccaggctggagtgcagtggcgccatctcggctcactgcaagctccacctcccgggttcacgccattctcctgcctcagcctccccagcagctgggactaccggcgcccctccaccacgcccagctacttttttgtatttttagtagagatggggtttcaccgtgttagccaggatggtcttgatctcctgacctcgtgatccacctgcctcggcctcccaaagtgctgggattacaggcatgagccactgcacccagcctctgttcataatttttactgcaattccgatgattgaattataaactggaagggagcagggatattgatcttcatgtagttgacatgtactagactcacggagaacaaggactgggttgtaggcacaatgctgtgtggttttgggtaaatctaactcacactcaacttgattttgtttccccctggggacttaggatcccaaaatgttctaatgacccacctcactgctgctaatcttcccacagtgccaatttggtggagtcaaccttgcaaagggagaagagaaagggtgatgactttcccagagcttctgccgctgtcctccctatgtcttctagccccagtcactactccttttatttaaattcataggggcttctcagtcagtcccctcttaaatgtaaatgagttattcacttcctgtgggcctgaagctgaaccactgtcatttatttttgaccttgttttcccagtttgggcagtgtaagaggaggtcaggaaatggaattgtttggggcaggcgattttgcagaacatgcacagataataggtttcagggagctctcataggctatggagggaggggtgcaggacagtgtcctcatcttggctcttgatattattatggtggactcttatgtggtctccctgcattgtccctacccatgaccaaagtcagagtgatcctttaaaccaagcttgtccaacgtgcatgtggcccaagatggctttgaatgaagcccaacacaaattagtaaactttcttaaaacattatgtgatttttgtttttaatttagctcatcagctgttgttaatgttagtgtgttttatatgtggcccaagacaattcttcttccagtgtggcccagggaagccaaaagattggacactcctgctttaaatatagatatcatttcttcactcagaactttcctgtgccttccagtgccattcagatcaaagccaaagtccttcctgtggtcagtggtagatacaacccgagttcctgctctcttatcctccctcactctgcttcagcctcactggcctctttgctgttccttcgaccagcacttggacatatactgctcctccagaaggccaccctcagagctctgcttgagggcctcactggaaaggccttccgtgaccacctctgttgcccaggttggagtgcattggtgtgaccttggctcactgcaatctctgcctcccgggttcaagcaattcttgtgcctcagtctcccaagtagcaggaattacaggtatgcgccaccacacccggataatttttgtatgtttaatagagataaggatttcaccatattgtccaggctggtctccaaattccgggcctcaagcaatccacccacctcggcctcccaaagtgctgggattacaggcgtgagccaccatttctggcccacccttcctcttttgctttaattttttttctccgtagcactgttgactgatatttttcatatgtaacctcactgagggccgggatgtttatctgttgttttgttttgttcactcctgtaagtccagtgcctgccagataatagaagtctagtaaatatcgaattattattattattttttgagacagagtttcgctcttgttgcccagaatggagtgcaatggtgcgagctcagctcaccgcaacctctgcctcccaggttcaagcagttctcctgcctcagcctcccgagtggctggggttacaggcatgcgctaccatgcccaactaattttgtatttttagtagagacagggtttctccatgttggtcaggctggtctcgaactcccgacctcatgtgatccgcctgcctcggcctcccaaagtgctggcattacaggcatgaaccaccatgcccggccgaattaattttataggtgagaaacaggcttggagaggctaagcagtttctccagggttctgtggctaggaagtttaaggggagaaggagctgaaaccccacacattctgtgatggattggatagcattttatgggcagccttaggatttgaacatctccgttccctctgggaaactgctggccaaattgcagattagattaagaaaatttgggatgtaacacgcatgtaaattgcacttggtctaatttcatttatgatttgacgattttctagactgaagttttggctttctaatcacagattaaaaccaatttggacagaattcttttatttatttatttatttttatattttagagaaaggatcttgctctcacccagacgggagtatagtggcgtgatcttgactcactgcagcctggaactccctgggctcaagggatcccccttcctcagcctcacaagtagctaggtctacaggcatgtgccaccacacccggctaatttttcaattttattttttgtacagacgagcagaattcctgcagatttttgtgggaatgtaaatgaaaaaacagtagccttgtagggtcttatgttcatttgtttctattcaaagagaggatttagattaagctgaaaaattaaggggacagaaaactgattagtggttgtcaggggctctggtaaggagaggggatttctttgggttaacatgaatgatctgtcttgattgtagtggttacaggactgtgtacactttacaatgtcagaaaactgtgctcttaaaaaggatgaattttactgtttacaatactgtttcctgttgacgggtttccaataaacatgattaaaaaaaccaaagattaggcagaaccgtgtgtacagttggcataggatcccttccaaaacagtttttccttagtaataagtattaatttctgtaagttattaatttcctatagataccttgctggctttactgaaaatcttgtaggatcaggatatataggagtgaggagagggtagagctgggaccttgcagtcagggaccctccagaattccagggtcaagtcttagctcctgatcaggcacgctgcacccttttgatggtctttgcttacctttttagcctcattttgttactgcccccctctgaaaactaaactccagcctcatgaatggtatacatgacccaacatatctctttcgattaaggattttgcattcctttactagaacagctttttctcttctcctttcttcttttccatctacaggggtcccttggggtacagtggtccctttgggtgcatatacccaaatccctgcatactcaagtcccacaagcagccctgtggaaccagtgtataggcagagtcagccctctgtatacatgggtttggcattcttccatctgcgtataagtggaccatgtacttcaaacctgtgctgttcaagattcagctgtacttggtctgtcttctctaggaacttgcttctaaaccctcccacctcgcaggtcttgtgctccctcagggatggaactgtcttaatctctcagttatcaaaggaatgtgaggttgtagaaattcaggtggggaaggacattcctggctggaagtatgtcctgcattgaaacaggataattgtagtttttgtgaactacagctgtgttaatcatactgcgttcttagataggtttgcttcggatttgtgcttacctttcacaaatttcatgctcagtctattctgtatgtgtgtttttgctctctaaattttataggcagttcagtaatcttaccagaatctaaattctgtagaagagttgtcaaaatctactccttaacatggttagtgactttatcttgctagtgctaacatctttattaagctaccttgcaacagagtgtgacacattgatttaatctttcacttaataggaataattgagaacagagtctgaagaactctgcaggaaacaaaaatagttccctgcttttatgatagccagcctctgtagagaaattcagttttcaaatccaaatatgacttttagaaattgcagatttgcaaggaattctaaaggaaatactttcataaatatcatttttctgtgtacttagtgtaggatagacacaagggcaaagagcatgaagaagaagaaagttcatgctctgtgacccaagcttgcagaacgttttaatgctgaattgttaaagctgttatctaaatactggtatatattgctagagagtttaggtacgtttttttgagacagggtcttgtcatgttgcccaagctgatctcctgtgctcaagagatcctcctgcctcagcctcacagctggaatttcaggcacaatagtgccaggctctttgggactttcatagggaagcctgtgagggtgcctggaagagttcaatggattcttttagttttcttttttactttctttccttccttttctctcttcttttttcttttcttttcttttcctttcctttcctttacctttcttttctttctttctttctttctttctttctttccttttctttctctttcttctttctttctttttccttcctttctttctcctgttccctccctccctcccttcctccctcccttccttccttcttccttccttccttccttccttccttctttctcctttttctttgcttttctttctttttgacagggttacgctgttgcttaggctggattccagtggcacaatcacgattcactgcagcctccgtctcatggaccctcaagggatcctcccacctcagcctccccagtaggtgggatcacaggtgtggaccaccacgcctggctaaatttgctataaaaattaacaggttttagccaagcacggtgactcatgcctgtaatcccagcactttgggaggctgaggcaggtggatcacctgaggttgggagttcaagaccagcctggccaacatggtgaaaccccatctctactaaaaatacaaaaatcgccaagtgtggtggtgggcgcctgtagtcccagctacttgggaggctgatgcaggagaattgcttgaacctgggaggcagagcttgcagtgagccaagatccacaccactgcactacgtcctcggcaacagagtgagactctgtcttgaaaaaagaaaaaaaaaagcctcagtcatatggatttgtcctagactctgatttgtttatgaaactcccaccttacttatgtaaggaaactttttttttttggtcatattaacctgtctattgccagtttaatttctaggaacccagctagggaacccacaggggagatggaaaaggattttttcttctctaaagtaacatttaagaaaacctaacagcgatacgttgttgcaaactgaagacccaaggagggtgggcaggtttgtcatccatgagtcttggttggttctgatttaacaaaagttcatccctctcaaagccttaacctttgatgtccccactgtcattgcctctgttatccaagcatggctcccctggatttttgcagttacctccccgctagtccttgcttccacacttgcctctccctcctcctgttgttctccacacagcagagtgttcctttatttatttattgagacagggtcttgctctgttgcccaagctggagtgcagcagcacaatcttagcacactgcaatctctgccttctgaattcaagcgattctcctgccgtcccgagtagctgggatcaaaaatgcacaccaccacgcccggctaatttttgtatttttagtagagacggggtttcaccatgttggccagggtggtcttgaactcctgacctcaagtaatctgctcacctcagccttccaaagtgctgagattacaggcaagagccaccgcacctggcctggcccagagtgttcctttataaacatcattagggttgtgagcctttcctgattaaaaggcctcagtggcttctcactgaccatacagccctttggtgatggggtctcttcctgtctgtcgggaattaggccgcgttctccagatcactgtgctgccatgatgtggggtcctagagcacctagccagtttaactctgaaaccaccatacaagcaggctttgggcctgaatataatcaacactggacctctcaggacaaatctgtcaaatcggatataacatgaaagcccatggatcaaccttttaaaggcaataaaataccatgataccttttaaagacaagggacaatttatgtaagttaaacttcagattttgtgttccttttcctttccactgctaagtttgtagcaatcgcctgacagtgatttgattgctcaggattgttatcttttgagattaacctcagtaaacactttaaagaggtatgtaatttatgcagcatgccctatggctatgaggtagagtgcaactccatatactagcgtcatcctaggaaaaaaaaaaggaagagtagagtctggaattctcaacttgaggctatcttggcttctaccaacaaatgcagtagttccagctgggcaggtggcaggctgaagactttaggctctacctgtgcacttttttttttttcctcttctcagttttcattgtatgaaaatgttgttttgagttgcgcaatttgagctttccaattgtaaagagtgttctatacaattaagagtttgataaagagtaaaaaaattgagaaatacggtatctgtaatgcagattatcatttttataatagagtaccagcatatattgaagacaaatggttaaacttctcaaaaaagtaaaaatgtgctgggcgcagtggctcacacctataatcccagcacttttggaggccgacgtgggcggatcacctgaggtcaggagtttgaaaccagccttgaccaccatggtgaaacttcgtctctactaaaaatacaaaaattagttgggcgttgtggcatcggcctgtaatcccagctactagggagactgaggcaggagaatcacttgaacccgggaggcggaggttgcagtgagcctagatcatgccattgcactccagcctgggcaacaagagtgaaactccatctcaaaaaaaaaaaaaaaaaaaaaaagtaaaaatgtggccttgctagttaggaagcaacaagaaaggcgaggtatgaatgacataggtagaccagcacgaaagaggcagcagagctggggaaagaatctccatatgcaaatcccttctgtcttatttgaaagggctttttgagttggctaagatacataatcaggccaaataacatgaatcggctgggatcaggtaaagtgtaaagccatttgaaggcttcctttcacttaaggctttgcagggggtctaggacacagaaagagaaaaagaaatggattagccttagcaggtaatctgcaaataaggaaacggcaacaggtgggaggttgatttttgttgtagggacatctcgttgtgtgatgggtattttccttgatataaaaagatgatgctaatccaatgagatcagcacacatgtccagaaagcttctgaccatggggaaagactggtgtttgcttaaaggtagttgttacttttagagagttccctaaacccagaatactatattcattagagatcgggcactttgagatgagtctggtgctgagttggtatattttatttatttaatccttactatgttttttttcttagagtaagtgtattgctccatattggtgttagaattaaagtttgttttttttcctttctttttgatgtaacgtgcttcagcttgatggtgtgccttggttatacctgtctaatcacttggtttgtgactcatgaatgactaaggccctgtatctcccgaggaagattgttagaatcctagccaggaatgaaacagctcctgagtaatgtgaattacacatttaatcctatcacaggaaaggcaaactctttctctgcaggcacttctaagattgtgattgtatttataagtgttaccctctgtcttgtatgggcatgggtgatcactctttcttgggtactttagctctagttgttgccttttatttgtggaaacctcacaaaagtgtctttaaaatttccgtcttgagtcagtgagctatttaaattcaagcaataagttatttgatactcttaagaagtcttttcctcagtggctgaaggaacatcaaatggggatggcagtagaagaagtgattgctagtgttggaattggtgtattttggtttctgaatacatggggagatggtttaaaacctttttgaagtaaaggtgtgaagtccatacattacagttatctctagagatccctggggaattggttccaagactcccctcagacacccaaatccacatatgctcaagttcctgatataacatggcatagtatttgcatataatgtacacgcattgttccatatactttaaatcatctctagattacttgtaatacctaatacaatgtaaatgttatggtaatagttgtgatactatattgtataggaaataatgatgaaaaaattctgtatatgttgtgtacaggcacagccatccatttatatttatttttaaatattaatttttttgagatggggtattactctgttacccaggctagagtgcagtggcatgatctcggctcactgcaatctctgcctcctgggctcaagtgatcctcctgcctcagcctcccgagtagccgaaaccatgggtgtgcaccagcatactcggctacttttttgtatttttgatagagatggggtttcaccatgttgtgcaggctggcctcgaattcctgcgttcaagtgatctgcctgccttgacctcccaaagtgctgggactacaggtgtgaaccaccacgcctgtcctattttttaatattttcgatttgcgactggttgaatcttcagatgcagaactcaaggacagggctgctgactgtacttgtgccttctctttcactgcttcaagagaacagaattttggctaattattaccattcattgtgttcacagattaaaacccagccatgtaccttgaatttgctgggtgtcagtctttaaatggtttctacttttccagactccaaatgaatagacttgtaaatatgattatgtttctggattacagaaacagttattaggagataactttggtttttggcagttttattatgatatgcctagatttgtctttttttgtattcatcctctttggtgttcctagagtttcttcaatctgtggcttgatacctttgtcagttttggaaaatactggccagtatttcttcaaatactgattctgtctaagtacccattttgctgcattttcccttctctctcaggttgcctgttatgcgtatgacagacctttttcatcttatcccatatgtttgttatgctcttttatgtagttctcattctttttaattaggagattttttccccctttcatggtaataattttcatcattcataattttcatcctggatgttttctgtgtactagtcttccagttcactaaattctctttcctaatttgtgtctaaactaggaaagctgctgttaaactcatcgattgaattcttaatttttgtttgtttttgtagatctttgttccttggtgagagtctgtcttttaattttcttaaacacatcaatcttttgttttaatgtcaatgtctgttaactccagtctagattacttgtgggtctgtttccattttctcatttccggaacatcaggttctgttttttggcatgcctggcaattttaaaaatttttttcattatttttaaacttatgattcgtgaatcaggcagccttcagaatcacagcagattcagagagattcctgatgcctggcaattttttattgaaaatttggatgatatcttcatagagagtggatttaaccttcttctagcagtctgagcagatcgccatgattgagtagactggttttttggtttgtccacattcccagagcataatgcttttgggatctctttccagggctcctcctctgttaggcactcaacaccaacaaaattttgtctccctagtgctgacagactgctgaaatatctgctcagaaatagtagaggcttcagtaagccgactcatttcttctagcagcttcttcctgcttggtttgtctgagctgtgccccaggtgtgtacaatttttgtgtgcaaatacccaccttaagaggaaagggcacgcggaatgcagagtttgtttcagtgcttcagtcccgccattccgtgattttggttcctcatgtcctggccgctttggttgcttttatcagacagaactcttcaacagtttcttcttactttttttggtctacttttgtcgttgtgcttaggaggactgtttgggaacagcaactcaatcataggcagagagaaagttcgtcatggattactttgacttttaaaaattaaaactacatttattgaagttaacatttcaaacctgtttcacaagttgttaagctcatcttaaggtcttactcaaataaatcttttttgaggccttttgtaatttgtttaatgaaatagttcacattttattgatacatttaatattcttttttgttttaaatttttgctcaacttttggtttgatttacttaatgattttcgtacctaactttaaatctccctagaatttaaatatacttattaattaaggaaattattatgtaattgcaaacaattttggagtttaccttctttgctgattgaaggtgcataacaacttccgacataaagtctggagctataaattcagagaaatgtctcctgttcctgactgcttggctaagccccttttgataataatgatgctataaactccgcaattaaaaaaaatagagtttcttttttttccctttgtttttgagatggagtctcgctctatcgctcaggctggagtacagtggcacgatctctgctcaccgcaacctctgcctccctggttcaagccattctcctgcctcagcctcccaagtagctgggattacaggcacacgccaccacacctggctaacttttgtattattagtagagacagggtttcaccatgttggccaggctggtcttgaaaaaaaatacagagattctgatgatgagcatgtagtctgtccctgcacttgacttatatcataatatgcttttcaagccagacaagtctaaccctcatccatccttttcctgctttatcagttttttgtaattttcatactcttcctatttacttattaggacccatttacttattagggatgtatttgacatctaattggagtttatgcattccaagttgtgcctgtcttcccatttaggtttttaggatgttcttatcacaatggtatgggccattcattggaaatgaagctgctcattgccgcacatttaaaaatggacttgttttaaatgtattgtcacctagtgtttgcaatctcatttatctggactatcaacttactattgcttttctgtctgcagaaagataaaaactctccagatgtcttccagtaatgtcgaagtttttatcccagtgtcacaaggaaacaccaatggcttccccgcgacagcttccaatgacctgaaggcatttactgaaggagctgtgttaagttttcataacatctgctatcgagtaaaactgaagagtggctttctaccttgtcgaaaaccagttgagaaagaaatattatcgaatatcaagtatgtacatgaacttgtaaaaagacagctttttaatttacctacagtgaacctcacaggttttggctatttccaagaaactggctatgaacatttttgtacaagtctttgcacagatatacagacacatgctttcatttgttttagctaaactaggagtgaaataactgggccacattttaggtatatgtttgactctcaaagtaactgccagacttttttaaaaaatgcaccacatgtggctggatatggtggctcatgcctgtaatcccagcactttgggaggccgaggcaggcagatcatgaagtcaagagatcgagaacatcctggccgacatagtgaaaccctgtctctactgaaaatacaaaaaattagctgggcgtggtggtgtgtacctgtgatcccagctacttgggaggctgaggcaggagtatggcttgaatctgggatatcaagtctgcagtgggcgatgattgtcccactgtacaaataggtggcaaagtgagagcctatcttaaaagaaaaagaaaaagcgtactttgtgagggtgcatttattttgcttattttatcttttaaagttagtagatgagtaacttgatgcactagaagtctcgtctgctcaaggcttcacacttttttttttttttttgagagggagtctcgctctatcacccaggctggagtgcagcagcacaatctcggctcactgcaacctccacctcccgggttcaagtgattctcctgcctcagcctcccgagtagctgggattacaggtgtgtgccaccatgcctggctaatttttgtatttttagtcaagatggggtttcaccatgttggccaggctggtcttgaactcctgacctcatgatccacccgcctcagcctcccaaagcactggggtgtgagccactgtgccaggccacgcatttttttttatggtcaaatggcatgcatttcagcaatagatgagttcatctttactgcatgaatagaactgtgttccttactaggctcataaaaatgcagtcagatcttgcaattctttcacattttagtggaaaggtcatcaggggttggtgtttttgctgctggcatttcctgtttaagtatccatgagaaaggcctttttggctgtagtatttccagtctttctcctatctgctggctccaactctaaatacagtttctggaggtagaggaagggctgctgtcatttatcttacttttgatttgtgtttgatagcagcatcaccattcagatagtcatctacattccaaaaaagctgatgagaattttgattttggtttttcctctggacattttgtaatttcacttctagaactaagtcactataacctgatttcctctgcagggggaagaagataaaaacagtctgaccatgagaatttaaaaagttgtgattcttctgacttaggacaaatctttctcttatgcttgtttgtctccatacccagcatttgagctttccctcaccaacgctgaagatcttatggaaaaaaaaattcattcccatagatatgtggatgtcctgttattttaagagaaattcattatactcttggaacatttttaattaataacttactttgaaatgatttcaaatttatttatttattttttagagatggagtcctgctgcatcacctaagctggagtgtggtgctgcaatcatagctcactctaagctccaactcctgggctcaagtgattctcccgcctcagcctctggagtagctagatgccacaatgcctggctaattaaaaattttctgtgtgtggagatggggtcttcctacgttgcccaggctggccttgaactcctgggcttaagtgatcctcccaccttggcctcccaaagcactggggttataagcatgagccactgcacctggcctgatgttaaatttaaacgtttcaggaacataacccttttcattcaggttctcagccaacatttcactgcatttgttctcatcactttgtctcttcatgttcccatggtcattactgttttttctgaaccgtgtgagtgcaggctgtccacatggtgcttccttctccttaactcctttgtgtgtgttcttgaaaaaacgaccctctcctatataaccactcagacattgtccaggaggagccaaggggaaatgtagccttgtaatgaaggtcgtggtaggtcctcagggccttgggtcaaccatgcccctcacatatttgactgccaccatatcctgtctcttcagtctcattcaacgtggtattttcttatctcatcccacccctggtgatgttaaaattgatcacttggtcatgttgatgtctgccaaacttggctataatgtcaccctttccccttggtaattgattagtgttatgaggagagataaactgacattattccagaactccattctacattaaacttcaccaacttcagtccccactggatgactcctgcctgagtcagccaccactatcatagtcgccaaacagtgattttctattatcattatctcttagtttgttttactaaaaggaaaaaccttcatctatcaccagtatagagtcagggatttgtattttattcaattaacgcattattatgttttaccttcatactcttattgttcctgatttggtgggagatctttcaaggtgggttcttccctctctccgtctctcattctttggatatatctcctcattcttattttattttattttattttattttattttattttattttattttattgagatggaggtttgctcttgttgcccaggctggagtgcagtggcatgatcttggctcactgcaacttccggctcctgggttcaagagattctcctgcctcagcctcctagctgggactacaggtgcccaccaccatgcccagctaattttttgtatcttagtaaagacggggtttcatcatattggccaggctggtctcaaactcctgacctcaggtgatccacctgccttggcctcccaaaatgtagggattacaggcataagccaccgtgcccagcctctttttgtaattaaacaaattttattagagacaaggtcttacgttgttgcccaggctggagtgcagtggcatgatcatagctcactgcagcctcaatctcttgggctcaagtgatcctatcacctcagcctcctgagtagctgggaccaccggcacatgccaccacttccagctaacttttaagttttttgtagagatagggtttcactatgtttcccaggcacatctcaaactcctgggctcaagtgtttctcccaccttgcctcattctttgaatatttgcttggcacagcgagcagttccagactcactgtgtacttaccctgcctcagacctagaatcagctgttgatttttatggaggagatatttacaaaaccaaaatctaggtgtttaaaatgctcattgctattgggatgtcattgtttctaggctttctcagtggagtgagacctagagaagatatgtatgtgtatacgtctacacacatacgcatacacatacatgcataactttttaaaaaactacctcccacgtgcaggtgcatacagatctggccaaagcgggcgggagaagagctgggggagcagtggtgaccattcccgcagcaccctgggagtttccatctttatgtttctatagctgtctttgtatatggattaaaacctatggcttctcattaatttctccaattctcatctgaaccctcaagattctgtctatatttccatgttagtaaaatttcaaaaagtgacaaatctagctctaattggctagagagggtgggagattgtttatattatggaataagaaaatcagcaagtacattaaggatgtacgttaaggatatacttcctaattttcctattccataatataaacaatctccccaccctccagctatctcttctcaacgttttttaaaaggtgaaaacatttttccttgtctttttagaagtaatcccatttataaaaatgcagaaatttatttattcaacaaattttgaatgcctgctagtgcaggacattgtgcaagatgctagtgacacaggtaaatcctcagttcagggaagccttaaagcctagtgggggattcagaacacactttcacgctgataaaaggattgattagaagacccaatgggagccccaaccctaaattggagggcccgggcgtggtgattgagaaagtgaagattttgtgtgtgtagggatgggagggtgggagggaggtgagcattgacctctcttgtccataaacaaaacaagaccaagggattaatcattatccactaaaatgtaatagaggtgacaggaaattttggggtaaattttattccctgtgttccaggttcatgttcagtggtttacaacaactgtgctgtatgtcatgggcaggagggtgtgagaggtggtagcaatgtggcatgctgttcttgttgacagacttttatagtgagggacactgacctgcatgcaaatgctgtaaagcaataaataagggtggggaatgcagtttcagggatgatagaagggtggagggtggggtgggcaggccagtgaattgtagaccatagactagaacagaggtcagcaggctgtttccataaagggcagatagtattaataaacattttcagctttgtgggccatgcgtctgtgttgcagctactcagctgtggtgtagcatgaaagcagccctaggtaatatgtaagggaatgagcacggccctgttccaacaaccctttgtctaagaaaactgctgatccctggactagaatgtaaactccacaagggctcagactttgtttttcgtttgtttgtttgttttgttctcaactctcccatgccctagaagaatatcttgtatgtacacagtaaatacttgatcattgtgttgagtggatggagttggaattagccactgctccaaatggaaactcttggcatttatgactggacattgttgttgttttctgtaatgccagggtttcatcccaaagtagtaagccaagctctttgtcttagaacattcatgttgaggtttgggttaatcatttaggattgcttggtctttatttgagtaggtattttagaaacctggaaagcttttctgacagtggagccttagtgaataacaagcttatggtgattttagaggcagttattagggacctgtttataaagaagatgcatcaagagctatagataaatgcaccttgaaaatttgcccaatcattagtatgttgttttacacatttagagggaagagtccactgaaagagtaagagatttttctgttagatcttgctcctggtttacctaactcccattgtctttgtgcagcgtttcactgagagataccccagttaatgagcaaagtgaaagctacatttcactcttgtacccaccagccattgtacaattgtgatagttcaagtacaacaggcagtaaatgctcagggagtcttgggtttaagcactgtggtgcagttgcttatcactcataattgtataggatcataggattggcctctgtgctaatcattatttgagaatgaaatagtctttggctttgaccttccatttggaatagatattactttctctgtggaatatattgtaacttacttatcaattctaaggagagaatgggcatagatacctgtgttttgaaaggaacaagccaggccccaccctgaagtctcctttcttcttcttctttttttttttctgagacggagtcttgctctgttgcccaggctggagtacaatgacgtgatctcggctcactgcaacctccacctcctgggttcaagtgattctcctgcctcagcctcccgagtagctgggattgcaggcacccaccaccgtgtctggctaatttttgtatttttagtagagacggggttttgccatgttggccaggctggtctagaactcctgacctcaagtgatccacccgcctcggcttcccgaagtgctgggattacaggcatgagccaccacacccggccaaattctcctttctccagttccttcacttatcattctacttgctatctttaggagaaaatcaaactatttgctgtcttcttgggtctcagcacagtcaacactgccataattttttccaccttccttctctatctgaatattcactaccctcagacatccactttgtttgaaacgtgcttatgtatgtaccacgtcttcatattcttaaaggatgaccctaccaaagtgatgtcttctccttctaaacttggaattttccagtgtatttatctgactcttaacaaggaagaaaatgatatatcttgaggatatatcttttacttttctaaatggattaaggctttttttttctttcggtcatgttttctttttatcctgaagtgctttatcccagcctcgatttctacttagatgtttcttgggctgattagattttagcagtgagaatacttctaccggtattccacaaattagcgacttattaattgtgtagaatttgactaggtagcaaatgtgaccacttgaagatacagtactgatcatcaaacagtactcagaacacgccatgtatttcgtttcacactgtgttaagagcagtaagtgtaacggagatgtttcacaagaatctgttagttatttcaaggaacgttaaatgttgaatgtcattttccagaaaatataaatgggttagagaataagtgaaaggaatttagaggaatctatgccatttttcttgtaggacttgaccagtgattaacatccattatatattacacatcaaatcaacaatcttttttttttttctttaagtagagacagtgtctccctatgttgcccaggctggtctcaaactcctggcctcaggcaatcctgctttggtctcccagagtgctgggattacaggcctgagccaccatgcatgacctgttttgtttgtttgttttctttaagagttggtttgtgcttgtgttctatttgtaatttcatcaaccttcattgagtatattcagtgcctaccctaaattaatagaacctgacttaaaatggaatagtaaatcagtctgtttttgtgtttacagtgggatcatgaaacctggtctcaacgccatcctgggacccacaggtggaggcaaatcttcgtgagtataagagagtataagtaagcgttttctgtgcacttttaatgtgcttttaaaagccacttttttttgtgtgcgagcaggtatttattgagcatttgcaacgcatgtcaggtctggttctaggtgctgtggataactgtagttgcgtggttttttcccaaagaccaggtagtcttattaggttagctttactaataggatttgataaggtgattgacatgtagcagttgaccatgttatcagctaatagggaggaaaaagaatgggagaatattaaaagtagggaaaggaagcagaagatgtaagtaaaggcatgagtcttagataaaagagcacattgcctgtgttagtacctccaaggtcagacagctggaagggccatttgggagatctgtacttgatcagccaatggtgtcttgctttatgttttggggctttattgtaatgtacaatgaaaagagaaaggtgagaatttttaaaagcataattttagttaaaccatagaatttcttgaccagttaattttctaactaaagtagaatttggattcaaagtagccatgagatatatagcatgtgttggagggaaaaaaaccccacaacatatatattctcttataggttattagacccacaacatatatgtcctcttataggttattagatgtcttagctgcaaggaaagatccaagtggattatctggagatgttctgataaatggagcaccgcgacctgccaatttcaaatgtaattcaggttacgtggtacaagtaagtattagtgggtttgcattttctgtttcctctgtttctatatgggtaagtgctttggctgatagttcaatgtgcttccagttgattatgtgacatggtcctagaactgacgttctttacagcagcttttcttaatttctcatagacacttatgtgaaaaggcagggagaatctggaatatggcccttgtaaggacagtgataccaattctagtttttgtatcatttctaaaatgatacatactactgttatccttttttgcctttccttcacctttcttttcccctagcttagaaagatattttggcaaatccttgtatgaagcagtttggaaatgtctgctggtagttaacataattacttgcattctatttgggtgtacagatagggggtgaaaaatgattatagcaggctttgcagacatctatggagttaactgtcatttgcagaactgcaggttcatcattagctagaactttaccttagttatgttatctttgtggattatgttatgtatactaaacagtcatggtcttagaaaagactcattatcattatgtctcattaaaatgctatttgccttaaggatgatgttgtgatgggcactctgacggtgagagaaaacttacagttctcagcagctcttcggcttgcaacaactatgacgaatcatgaaaaaaacgaacggattaacagggtcattcaagagttaggtctggataaagtggcagactccaaggtaatgtggaaaaactgaaagcatcatgatcagcataagtaggactttccctgtgtggataaaatgactctgattcagaagtttcctgtaatgtgtatggtcaaaaatggttgctttccataacaatgagaaaagtggcttgttacataatatgaacgtggaaattaacctggaaaaaaaatcttcacattggttgaattctgcacctgaagtgaggcaatgtggtgttgtacgtgaaagtgttcatcacctggcctttccttatgctcctcccccacctcatggtttaagtcacgtctcattccgtgtctgcactaacttttcttcttcctctttttctcttcctccttttagtcactcttcctccaagggactttgttccattgctattgaggtatatttctgggattgataagtgatgagagtccaaggattcttgctctgtatcagcagtccccaacttttgccaccagggaccagttttatggaagacagtttttctatggaccagggtaggggggatggttttgggataattcaagtgcattacatttattgtacactttatttctattattatttcattgtaatatataatgaaataattatacaactcatcataatatagaatcagtgggagccctaagcttgttttcctgcaactagatggtcccatttgggggtgatgggaaacggtgacacatcatcaggcattagattctcataaggaacacacaatttagatcctcgtacatgcagttcacaatagggttcatgctcctatgagaatctaatgccgccactgacctgacaggtggagctcaggtggtaatgcaagcattggggagcggctgtaaataccgatgaagctttgctcacttgcctgctgtgcatcctggttccccagaagttggggacccctgctctatatgtttcagtttcctataatttggcttccaaaattatatttggtcaaattaggatttatttctcatttatgtagtgtctgttttttttaatagcctttcttttaatagttttgtctctcattccctcccttctctgcctctttttcttctgccaaatgtttacagacttttgtatgctaagctgtcttttaggttctagagatacaattgtgggcaagagagacaaagtaactcctcctcttgtgggttggagaggatcgtgaagaaaaaaatgacatgaatgaatgaactttacaattgattaatatgtttggaagatttgctgagaagatatttgaagctttgggtgaaaatgagctttttgcattgtaatggctatagtgtaatcccctgtgatatcccttacttagaagcaatgaagaatgagatgttctaatggtgtatacttcatattatgctttctgacagtcctttctgttcagggtgttttactgtattttgtttggaagagtaactctgagatgccaccattcactacttatttccgctttatgagtgattgggttttctttgctttggttctgtttgattttatcttaccagtaaggtgttttgttccactctattctttaccttcaggcagccattgccctatgttgcttgttaggatatctagggaaaatagactgtgaaggcacagctattgacttcctagtttatttatctaaataattgaagcaatacatttaaaatatgttactttttgtgaaattttaaacataacagaaatgtagagtgaattgtctgattactatagtaatgatatggctatagtataattaatataataatgagacaattaatatcatttacatagatttcccagttattaaccttaggtatatatggggtcaatttggggagcctcatggtaattgaaaaggtgttaatatcatatgagagaaagtgaactctcctagctgcagagcccatgctcttattgtaagtccacctggaggctgggaggggagagagtgttagaagactaataattatagttgcattcacattttcttctcctgactttatctccctttttagactgtgatttcaccatgtcacctatcttttagtgttctgaacttcaaactacatatttgacttggtgaagaacaaactgttaaaagcaggtgctttttttaaaaaattttatctttcactaaagttctgggatacatgtgcagaacgtgcaggtttgttacatagtatacatgtgctatggtggtttgctgcacccttcaacccatcatctacattcggtatttctcctaatgctatcccatccctagcccctgacaccctgacaggccccagtgtgtgatgttccactccctgtgtccatgtgttctcattgttcaactcccacttatgagtgagaacatgcagtgtttcgttttctgttcctgtgttagtttgctgagaatgatggtttccagcttcatccatgtccctgcaaaggacatgaactcattcttttttatggctgcatagtattccatggtgtatatatgccacattttctttattcagtctatcattatgggcatttgggttggttccaagtctttgctattgtgaatagtgctgcaataaatacatgtgtgcatgtgtctttatagtagaatgatttataatcctttgcgtatatacccagtaatgggattgctgggtcaaatggtatttctggttctagatccttgaggaatcaccacactgtcttgcacaatggttgaactaatttacactcccatcaacagtgtaaaagcattcttatttctccacatcctctccagcatctgttgtttcctgactttttaatcatcgctattctaactggcatgagatggtatcttattgtggttttgatttgcatttctctaatgaccagtgatgatgaagtttttttcatatgtttgctggctacataaatgtcttcttttgagaagtgtctgttcatatcctttgcccaatttttgatggggttgtgtttttctcataaatttgtttaaggtctttgtagtttctggatattagccctttgtcagatagattgcaaaatttttctcccattctgtaggttgcctgttcactctgaagatagtttttttttttctttctttttttttgctgtgcagaagctctttagtgtaattagatcccatttgtcaattttggcttttgttgcaattgccttcagtgttttagtcatgaagtctttgcccatgcctatgtcctgaagggtattgcctaggttttcttctggggtttttacagttttaggtcttacatttaagtctttaatccatcttgagtagaggtgtaaggaagtggtccagtttcagttttctgcatatggctagccagttttcccagcaccatttattaaatacagaatcctttccccgttgcttgtttttgtcaggtatgtcaaagatcagatggttgtagatgtgtggcattatttctgaggcctctgttctgttccattggtctatatatctgttttggtaccagtaccatgctgttttggctactgtagccttgtagtatagtttaaagtcaggtcacgtgatgcctccagctttgttctttttgcataggattgtcttggctatacaggcttttttttgggttccatatgaaatttaaagtagttttttttctaattctgtgaagaaagtcaatggtagcttgatggagatagcattgaatctctatattactttgggcagtatggccattctcatgatattgattcttcctatccatgagcatgaaatgtttttccatttgtttgtgtactctcttatttcctttgtggtttgtagttctccttgaggaggtttttcacatcttttgtaagttgtattcctaggtattttattctctttgtaccaattgtgaatggaagttcatgatttggctctctgtttgtctattattggtgtataggaatgcttgtgatttttgcacattgattttgtatcctgagactttgctgaagttgcttatcagccttcagagattttgggctgagacaaggggcttatctaaatatacaatcatgtcatctgcaaacagagacaatttgacttcctctcttcctatttgaatacactttatttctttctcttgcctgattgccctggccagaacttccaatattatgttgaataggagtggtgagagagtgcgtccttgtcttgtgccggttttcaaagggaatgcttccagcttttgcccattcagtatgatattggctgtgggtttgtcataaatagctcttattattttgagatacattccatcaatacctagtttattgagagtttttagcatgaaggggtgttgaattttatcgaaggccttactgcatctattgagttaatcatgtggttttcgtcatttgttctatttatgtgatggattacatttattgatttctatatgttgaagcagccttgcatcccagggatgaagctgacttgatcatggtggataaggtttttgatatgctgctggattcagtttgccagtagtttattgaggatattcacattgatgttgatcagggatattggcctgaaattttctttttttgttgtgtctctgccaggttttggtattagaatgatgctggcctcataaaatgagttagggagaagttcctctttttctattgtttggaatagtttcagaaggaatggtaccagctcctctttgtacctctggtagaattcggctgtgaatctgtctggtcctggaccttttttggttggtaggctattaattattgcctcaatttcagaacttgctattggtccactcagtgattcgacttcttcctggattagtcttgggagggtgtgtgtgtacaggaaaatccatttcttctagattttctagtttatttgcgtagaggtgtttatagtattctttgatggtagtttgtatttctgtgggatcagtgattatatcccctttatcattatttattgtgtctatttgattcttctctcttctttattagtctagcttgaggtctatgtattctattaaacttttcaaaaaaccagccctggattcgttgatttgtttgaagggttttttcctgtctctatctccttcagttctgctctgatattagttatttcttgtcttctgctagctttttgaacttgtttgctattgcttctctagttcttttaattgtgatgttagggtgtcgattttacatctttcccactttctcctgtgggcatttagtgctataaatttccctctaaacactgctttagttatgtcccagagattctagtacgttgtgtctttgttctcattggtttcaaagaatttatttatttctgccttcatttcattatttatccaatagtcattcaggagcaggttgttcagtttccgtgtagttctacagtttttttttttttttttttttttttttttgagacagagtcttgctctgttgcccaggctggagtgcagtggtgcagtctcagctcactgcaagctccacctcctgggttcacgccattcttctgcctcagcctcccaagtagctgggactacaggcttccaccacttagcccggctaattttttgtatttttattagagatggcatttcaccacgttagccaggatggtcttgatctcctgacctcatgatccgcctgcctcggcctcccaaagtgctgggattacaggcatgagccaccacgcccagtcatagttgtgcagttttgagtgagttttttttttttgagacagagtctcgctctgttgcccaggcttgaatgcagtggcgcgatcttggctcactgcaagttcagcctcccaggttcacaccattctcctgcctcagtctcctgagtagctgggactacaggtgcccgccaccacgcccagctaattttttgtatttttagtagagacggggtttcaccgtgttagccaggatggtcttgatctcctgacttcaagatccacctgcctcagccttccgaagtgctgggattacaggcatgagccaccacgcctggccttgagtgagtttcttaatcctgagttctaatttgattgcaatgtggtctgacagactgttggttatgatttccgttcttttgcatgtgatgaggagtgttttacttccaattatgtgataaattttagaataagtgctgtgtggtgctgagaagaatgtatattctattgctttggggtagagagttctgtaggtgtctgttaggttcacttggtccagagctgagttcaagtcctgaatatccttgttgatgtcgatgatctgtctaatattgacagtggggtgttaaaagtttcccactattattgtgtgggagtctgaagtctccttgtaggtctctaaggacttgctttatgagtctgcatgctcctgtattgggtgcatatagattttagatagttagctcttcttgttgaattgatctctttaccattatgtaatactcttctttctcttttttgatctttgttggttttaagtctgttttatcagagactgggattgcaacccctgctttttttgctttccatttgcttgacagatcttcctccatctctttattttgagcctatgtgtatctttcatgtgagatgggtctcctgaatacagcacaccgatgggtcttgactctttatccaatttgctagtctgtgtcttttaactggggcatttagcccatttacatttcaggttaatattgttatgtgtgaatttgatcctgtcattatgatgttagctggttattttgcccattaattgatgcagtttcttcatagtgttgatggtctttacaatttggtatgtttttgcagtcactggtaccagtttttctgttctatatttagtgcttccttgaggaactcttgaaaggcaggcctggtggtgacaaaatccctcagcacttgcttgtctgtaaaggaatttatttctccttcacttatgaagcttagtttggctggatatgaaattctgggtgaaaaattcttttctttaagaattttgaatattggtccccactctcttctgacttatagggtttctgcagagagatctgctgttagtctgataggcttccctttgttggtaacacaacctttctctctggctgcccttaacattttttccttcatttcaaccttcatgaatctgatgattatgtgtcttggggttgctcttgaggagtatctttgtgctgttctctttatttcctgaattagaatgttggcctgtcttgctaggttggggaagttcttctggataatatcctgaagaatgttttccaacttggttccattctccctgtcactttcaggtacaccaataaaacgtaggttttgtcctttcacatagtcccatatttcttgaaggctttgtttgttccttttcattcttttttctctaatcttgtcttcacgctttatttcattaagtttatttcattaatctcttatatcctttcttccgcttgattgattcagctattgatacttgtgtttgcttcacgaagttcttgtgctgtgtttttcagcttcatcaggtcatttatgttcttctataaactggttattctaattagcaattcctctatccttttttcagtgttcttagcttccttgcattgggttagaatatgcacctttagcttggaggagtttgttattacccaccttctgaagcctacttctgtctattcatcaaactcattctccatccagttttgttcccttgctggcgaggagctgtgatcctttggaggagaagaggcattctgcctttttgcacaggtttttcctcatcttcatagatttatctacctttggtctttgatgctggtgacctttggatggggttttggtgtggatttcctttttgttgatgttgatgctattcctttctgtttgttagttttccttctaacagtcaggcctctctgctgcaggtctgctggagtttgctgcaggtccactccagaccctgtttgcctgggtatcaccagcagaggctatagaacagcaaagataccccaaagattgctgcctgttttttttctctggaagctttgttcccagaggggcacccgccagatgccagctggagctctcctgtatgaagtgtctgtcgacccctgctgggaggtgtctcccaatcaggaggcacaggggtcaaggacccatttgaggaggcaatctgtcccttagcagagctctagcgctgtgctgggagattcactgctgtcttcaaagccagcaggcaggaacgtttaagtctgctgaagctgtgcccacagcctccccttacctcagctgctctgtcccagggaggtgggagttttatctatatacccctgactggggctgctgcctttctttcagagatgccctgcatagagaggaggaatctagagaggcagtctggctacagtggctttgccaagctgtggtcggctctacccagttcgaatttcccagaggctttgtttacactgtgagggcctactcaagcctcagtaatggtggatgcccctccccccaccaagctcaagcttcccaggttgactttagactgctgtgctggcagtaagaatttcaagccagtggatcttagcttgctgggctctgtggggctgggatccgctgagctaggctagaccacttggttccctggcttcagccccttttccaggggagtgaacagttttgtcgcgctggcattccaggcaccactggggtatgaaaaaaaaactcctgcagctgtctcagtgtctgcccaaatggccacccagttttgtgtttgaaacccagggccctggtgatgtaggcacctgcgggaatctcctggtctgcgggttgtgaataccatgggaaaagtacagtatgtgggccggaatacaccatccctcgtggcacagtccctcacggcttctcttggctaggggagggacttcccccaccccttgtgcttcctgggtgaggcatagcctcacccaaggaggtgctttgtatcaggcttagttactgaccagctgtgacctgaacctaagtttactcatctgataaaagagatacctactttttctaccaggtatccacttatttgctgttcagaataaatgaacttaatgagataaagtgtctcttacaggactggcacacgttaggagctcaccaaatgataatgactggttgttatcattgacaattataatatttgtgatttaggttggaactcagtttatccgtggtgtgtctggaggagaaagaaaaaggactagtataggaatggagcttatcactgatccttccatcttgttcttggatgagcctacaactggcttagactcaagcacagcaaatgctgtccttttgctcctgaaaaggtaaatgctctggaaacattattctttagttaatatcttatcactactatgtcccagatattcttggggcagggggttcagaaatgatcaaagtaatttcttcctcttctgttggagtgaaagtcagttaacaaatgaaaagcattatcaagaaaaacaaagcaggtaagaatgtagggaaggatgtctgtgatgagggtgtaggggggttgggcctgttttgctgctgtctctttagcttctttactcaacaccaacagacacacacatacacattttttctccctctctctgctctataacactgaacattttgtagttttctgagtagacctttttatttcacacctttttcatcttattcttccaccttcagtactttttctttttcttcttagcttcctcctgttgggccttttttactctacttatatcatcttcagactgggttgtgagtctcccattttgcttatgaggaatccttagcatcttctatttcatattgtactgaaattgttgacctactggcctgatcctctttgaggcagaatgtttttgtgtacactgctagcatacagtaagttcttagaaaatgttaaaattgaagtgactcttcacataaaatattttgaatagtaacagttttgaacagtgattttggcccttcttccacctgtgtattgttattataattattacaaatgttattacaattcaaggtgagatttgggtggggacacatatcattctgcccctggcccctccctcccaaatctcatgtcctcacattttaaaaccaatcatgccttcccaacagtctcccagagtcttaactcatttcatcattaactcaaaagttcacattctaaagtctcatctgagacagggcaagttccatccacctatgggcctgtaaaatcaaaagcaagttagtaacttcctagatacaataggagtacaggcattgggtaaatacacctgttccaaatgggagaaattggccaaaacgaaggggctacaggtcccacgcaagtccgaaatccaaaggggcagtcaaatcttaaagctctgaaattatcttctttgattccatatctcacgtccaagtcacactgatgcaagaggtgggctcccagggccttgggaggctctggccttgtggatttgcagggcacagccccttttgtggctgatttcacaggctggtattgagtgtctgtggcttttccagatgcacaattcaagctgttggtggatctaccattctggggtcttaaggatgatggccctcttctcactactgcactaagcagtgcctcagtgggggccctgtgtaggggctcccacccaacatttcccatctgcagtgccctagcagaggttctccatgagggctccacccctaaagttgacttttgcctggacatccaggtatttccatacatcctctgaaatctaggtgaagggcaggcctaacaccacatggaagctgccaactctctgttggtcccctttaaccatggctgaaacatagggtaccaagtctcgagactgtacaaagcagcaaggccctgggcctggcctaggaaaccattttttcctcctaggcctctgggcctgtgatgggaggagctgctgtaaagacgtctgacattccctggagacattttccccattgtcttggtgattaacatttggttccctattacttatgcaaatttctgtagcaggcttgaatttctcttcagaaaatgggtttttcttttttatcgcatcatcaggctgcaaattttctgagcttgtatgctccgcttcccttttaaacataagttccaatttcaaaccatatctttgtgaatgaataaaactgaatgcttttaacagcacccgagtcacctcttgaatgctttgttgcttagaaatttcttctaccagatgctctaaatcatctctctcaagttcatagttccacagatctctagggcaggggcaaaatgccaccagtctctttgctaaaacatagcaagagtcacttttattccagttcccaacaagttcctcatctccatctgagaccacctcaacctggacttcattgtccatatcactgtcagcatttcagccaaagccaatcaacaagtctctaggaggttccaaactttcccacatcttcctgtcttcttcttagccctccaaactgttccagcctctgcctgttacccagttccaaagtggcttccagatttttgggtatcttacagcagcatcctgctctaccagtaccaatttactgtattagtttgttctcacactgctaataaagacatacctgaggctgggtaatttataagggaaagaagtttcatggacttacagttgcacatggctggggagatctcacaattttcgtggaaggcaaagaagaaaaggcatgttgtacatggcagcaggcaagagagcttgtgcaggggaactcccatttataaaaccatcagatctcgtgagagtttttcagtaccacgagaacagtatgggggaacttcccccatgattcaattatctccacctggccccatccttgatatgtggggattgttacaattgaaggtgagatttgggtgggcacacagccaaaccttatcaacctgtaagtcataactcctgtgaaaaggtactttagcactattttggtcatggacttagaccagagattaaatcccagccttgcctcttactaactgtgatcccttggccagttgcttgatcctttaagacatatttataaaatgagggtaataataataatattggaactgcctcatgacaatattgtgaaaattgaaatgaagttatctctaaattatttagcaaagacatagtaagtactcagttatgttaattgcattattagggcagaagagtgaaaaccaatttttaaagagccagaagacctaaatgataagtcagaatgagatatatgaccattgttttaatatgcagtccatagttagttctcaaacttgtaaatacttgcagattacctgggttgcttcttaaaatatggattccctagacctactgccagagattctaattcaatgtctgggaagactgtcctagaatctgcatttttaataactattctagttgattctagattgtcaatacaacacactgaaaattcctattctgttttaataaaagcattgaatttaggtttgctaactatagctaaataatatgagatgaaaagttagtaagacaaagtcaggctgaactagagcaaacaatctaaaggcaagaatagagtattttactgagaaatacaagtttcagatatttaatgacttagtattgtctcacttttaacttaggatgtctaagcagggacgaacaatcatcttctccattcatcagcctcgatattccatcttcaagttgtttgatagcctcaccttattggcctcaggaagacttatgttccacgggcctgctcaggaggccttgggatactttgaatcagctggtatggttgacttttttatgctgtaaaatgcttcattaatagaatcctgaaggagagcaaagggggtctgcaggagtgctgtttggtctttgggtagacataccatgagaatctatcacttcaaaatgtgtttgttccatttggtgctagtatttttcttcatttttgtagcaccagcttgttatttaggtatctttcttgtcttatttcaatgtgcatgcatgtgtgtatttctactgggcctatattctgcttcctagttacagtgaccatttcttaaaagctcagtaattaatatgttggccttatagccatttattctgtcacttgaacatttttgggaaggcctaatatgattgtcttcttgaccatataacagatgaggccttaaaattttttccccttgcacatgttggtctgccttgatgagcactcatggaaatgctacttaattttgtttatttttatttttgagatggagtcttgctctattgcccaggctggagtgcagtgacgtgatcttggctcactgcaagctctgcctctcgggttcacaccattctcctgcctcagcctcctgagtagctgggactgcaggcgcccacaaccatgcccggctaatttttttgtatttttttagtagagacagggtttcaccctgttagccaggaggatggtcttgatctcctgaccttgtgatctgccacctcggcctcccaacgtgctgggattataggtgtgagccactgcacccagcaaattttatttaaggttttttttttttcttttgagataggatctcactgtgtcacccaggctggagtgcagtggcacaatcttgactcactgcagcctcaaccccccgcgctcaagccatcctcccacctcacccaagcagctgggactatagacacatgccaccatggctatctaatttttgtattttttgtagagtcggggtcttgccatgttgcccaggatggtctcaaactcctgagctaaagcaatctgctgtggcctcccaaagtgttgggattacaggtgtgagccactgtgaccggcagacactacttaattttctggtaactatagattgcagctttagcccttgagtgggtatcggtcaatagagtggttagtcctaaacctgacttagatgggccaaaatttctaacaatcttggacagcatggttctttttatttcaaattgaaatgtgtgatttttaaaattttagatagaaatgtgtgattttttggccgggcgcggtggctcacgcctgtaatcccagcactttgggaggccgaggcgggcggatcacgaggtcaggagatcgagaccatcctggctaacacggtgaaaccccgtctctactaaaaatacaaaaaattagccgggcgtggtggcgggcgcctgtagtcccagctactcgggaggctgaggcaggtgaatggcgtgaacccgggaggcggagcttgcagtgagccgagatcgcgccactgcactccagcctgggtgacagagcgagactccgtctcaaaaaaaaaaaaaaaaaaaaaaaaaaaaaaaaaaaaaagaaatgtgtgattttttttaatggcttgtgcggtctgcatcattttagatatatttggatatgattacaaatgattccctatgatcctaaatataattttagatattcattggccatgtttcttaattaggttttaataaaggggatgaactaagagtcagacttcaggccacgctgagttcagatgatctcatcatccaaagctgaatggttcaggtgtgctgtgctggccatgttctatcgagaatactgctcaggggatttgttctctatttggaattacagcagcacagcagttgatttggatttctgaattaattaattaattaatttacctttgagacagagtctcactctgtcgcccaggctagagtgcagtggtgctttcagagctcactgcaacctccacctcccaggttcaagcaattcttgtgcctcagcctccttagtagctgggattatagtcataagccaatgcacctggctaatttttgtgtttttagtagagatggggttttgccatgttggctaggttggtctggaagtcctgggctcaagtggtttgctggtctcggcctcccgaagtgctagtattacagatgtgagccattgcacccagcgctggacctctgaatttagtatgtggggaagtagtcattgctaatgtgggttctatcattctggcattctgtcggtgaactcagagagcagaacacacctgggcttttggatttttttcttgggtctatatttagatttttgaggaagtactgttaagcaccagagcatactgatagctatttcaggtctcatgaattatgataggtaaggaccaagcactaatgcaaaatgccctgcaaatccaaggttggcttggagtgttttcttttctttctttttttttttttttttggcccagagacaaagaattgccgaaatattgtgtgataggctgggaacagtagctcatgcctgtaatcccagcactttgggaggccgaggcgggtggatcacttgaggccaggagttcgagaccagcctggccgacatggcaaagctgtgtctctactgaaaatacaaaaattagctggacgtggtcatgcgtgcttctaatcccagctacttgggaggctgaggcaggagaatcacttgaactcgggaggcagaggtttcagtgaaccaagattgccccaccacattccagcctgggtgacagagggagaccctgtctcaaaataaataaataaattatatatatatatatatatatatatatagagagagagagagagagagagagactgaatatataaaaagaaagggtaaaattacgtgggaagaagagagaaagaaagttaaggaaaagtcattagattctgtcttctctagccttacctccctcaccctctgaaagtgagttctctttgttttccaagaccatcaagtttgtgtttttgagctgccttctttcataggttatcactgtgaggcctataataaccctgcagacttcttcttggacatcattaatggagattccactgctgtggcattaaacagagaagaagactttaaaggtatatgaatctgttacagtcccagatttttgcctaattgaattggctgaagtttagcaatgtggtggctaattaaaatgtggctttgtgaatttctgttgatgcagtcttctgataccagtcaacacaaatattttgttgtctgtgagtgctgttggtgtttttgattaatttataaatgagaatttatatggtgttgtcagttccaagaggagttaacattttaaaaaatgctcagtgtttatatagtgtttttaaaataagaaacttggcaatatatgcatttgcatatagtaggaagcaacaaccagatttttttttttttttttgagaaggaatctagctcttgtcacccaggctggagtgcaatggtgctatttcggctcactgacccctccgcctcccaggttcaagccactctcctgcctcagcttactgagcaactagaattacaagcctgtgccaccaggcccggctaattttcgtatatttagtagagatggagtttcaccatgttggccaggctggtttcaaactcctgacctcaagtgatcctcccgccttggcctcccaaagtgttgggattacaggtgtgagccaccgcccctggccacgaccagaattttatattaagaattagaactatatggtaagaagtctattttaaaagaattaaggtcaaatagaaaacgtcagtttgtttgctatattcataagactatggcaatagacaggctatttctctgtagttttctttttctttctttttctctttttaaatatacattttaatttattacttactttatttatttttatagagacagggtctcgtttcgttgctcaggctggtcttgaattcctggcctcgcatgatcctcctgcctctgccctgcaaaatactgggattacaggagtgagccactgtgcctggcctgttatacttttctaatgacagagctaataattttttatttctattttttcttttttgagatggagtcttgctctcttgcacaggctggagtgcagtggtgtgatctcagctcactgcaacctccacctccctggttcaagcgattctcttgcctcagcctcctgagtggctgggattacaggcacgcaccaccacgccaggctaattttttttgtattttcagtagagacagggtttcaccatgttggtcaggctggtctcgaactcctgacctcgtaatccacccgcctcagcctcccaaagtgctgagattacagtcatgagccgccgtgcctggcctattttttctttctaaagctttagaatgaaggtgttagggaagcatccaagaaagggttcacagaaaaaatgggctaaatttgttgttatcttgtttgtgtttcctttttatccactgattgcaaagccacagagatcatagagccttccaagcaggataagccactcatagaaaaattagcggagatttatgtcaactcctccttctacaaagagacaaaagctgaattacatcaactttccgggggtgagaagaagaagaagatcacagtcttcaaggagatcagctacaccacctccttctgtcatcaactcagatgggtttccaagcgttcattcaaaaacttgctgggtaatccccaggcctctatagctcaggtaaccagcagattcttttgaaatactcaaatgggaacaatgtggttctgttatcatctgcttcaggatatgtttatcttctacccacccttccaattatttgttatcttcactccacctgggatatagaaccagtcagcagaacaaataaaggacaattaagttttacttttggaaagcttccctttttttgagacagagtctcactctgttgcccaggctggagtgtggtggcatgaactcagctcactgcagccctgacctccctgggctcaagtgatcctcacacctcagcctcttgaatagctgagactacaggcgtgtcccaccacgtccagctaatttttgtgttttgtgtagagatggggtttcgctgtgttgcccaggctggtcttgaactcgtgggttcaagcgattctcctgcctcagtctcccagagtgctaggattacaggtgtgagccaccacatctggccaggttcttttttttagtggtttcttagactacctaactcagaatttttgttgatttagacaagctgtaatgaataatctgagtagaaaaattttttttttgggaaattgtgaaagaagtgtcagccagttttggggttttctggtagctgttcacttttgttcactgattcattcaacttgttcttatagggcctgtgctgtgctttagggatgtgaattcagtagtgaacaaaatgggcaaaaataaaactctgctcatggagctaattttttgaggaagacagttatgataaataataaagaaattaaatagatagcatgttagatggtagaagaaactatggggaaagtttaagcagagaaggggtggagaaaggggaggaagagagagaagtagggagaagaaggttgatttgcagttggaatcaggtgatcagggaaaccttcacctactgtcactgaatacacctgaaagggagtatgtgctggccactccaagggaagagcctgtgtgcaaagtgctgttccttgtcatttaccttccttagacagtttacaggtgaaacaaatgtagtaagcaaatttgagttcacagaacaaggctattcattgttagattaactttctgttaatcaaaatgagataatgtttctttgttccttggttggctctgtgatagttggtgattattactccttgtggtttttgttattcttttctttacacatttttttttttttagagactgggtctcactctgtcactcatactggagtgcagtggtgcaatcatagctcactgcaaccccaaactcttggctcaagcgatcctcacacttcagcctcccgagtagctgtgactacagccgtgcaccacaacacctggctgattttttaattttttgtagaaacagggtctcactatgttgtcctggtctggatctcctgggctcaagcgatcctcctgccttggcctcccaaagtgctgggatcacaggtgtgagccaccatgcctggccttttctgttattcttaacccctctgtcacccaaaacattagtactcccagttcattggtccattcttcaaagaagtcaatttagctggttattttggggctgttatttttattaacaatattgagtttctgttgagtactaaaagatggcacattgttggctctagtaaaatattactgacgtttaaacttgtgcatcataatttctatacttaagtatatataaaatatatctaagagcttgtatccctagttaagccatactgctaattatgtatatatatgtatatatgtatagccacatatatgtatgtatagccatactgctagttaagtatatatataaatttatctaagagcttgtatccctagttgaaccatattgctaatttctccaaatgtttttggtacgtataatttggtgtttctgtcagaacactggcacttttatatactatcaattaaaggcaaaattttattctttgagcatagatttgatatcatttggaaatcagtctggtaggatcaacctgggttacttattgtcaacagtgaaataatgtaatgaattgcttttttagtgtgatgtatgcattagatttttcttacttggaaaataacttgaattatcttgcttcaaaaaatggtttataaatgtcttgtccaaatcgcctatgtggcaatactggagagggcataattagaacacagagctgtttttcacacactgagattctgcatgttttgatactgggcttccttccaatgctaacacctggcctagtgcctctaggtttagcttccctgcctcatcagtgaactcactttcacaaaaggaattccagccatgttcagagcagtggcagtctcttagattaagaataggaccttgtatctccctgagcatctgcttagcaggacaagttttgtttcgatttgtgaaaaactggaatattagcttagggcaggagtaggcaatatatattttttttttttgtaaaggatcaggtagtaaatattttaggctttgcagatcaggtggtgtttgtctcaggtagtcagctctaccgttttagtgtgaaagcagccaagctcataacatgaataaatgaacatggcagtattccaataataaacgaaaggctggctagatgcagtggttcctgcctataaccccagcactttgggagaccaaggcagaaggatgcttgaggccaagagtgtgagaacagcttgggcaataaagcaagaccccctttttttttctgagacagagtcatgctctgtcgcccaggctggagtgcagtggtgctgtgtcggctcactgtaacctccgcctcccgggttcaagcaattctcctgcctcagcctcccgagtagctgggactacgggtgcccgccaccatgcccagctaatttttgtatttttagtatagacagggtcgcaccatgttggccaggctggcttcgaactcctgacctcaggtgggtccacccgcttcagtcccccacagtgctgggattacagatgtgagccactgtgcctggccaagaccctatcttaaaaaaaaaggtaactttcattttattccaatgaaacattatacattggcactgaaatttgaattttatataaattttatattgtgagaaatattattattcttgactttttattcaatgataaataaaatgagctaagtgtggtggtgcatgtctgtagtcctaactactcaaaaggctgaggtgggaggattgcttgagaccagaagtttgaggctgcagtgaactatgattacaccactgcactccagcctgagtgacagagtgagactttgtctctaaaaaataataaaaaataaagtaaaaaaccattcttagctcataggtgaacaaagataggtggctggccctatttgacctgtgggctatagcttaatgattcctgattcagggtttatgattttgtatgttgttttaattctgagttcttgaaaattgagttgttaaaatgttttatgactctctactgataaatcttgaatctgttgctttacagctgcactttggcttgaactagttatttctttacatgattcaaacttggcctctgataatgcatcttccaaaggttgtatttggaaaatcttagaatgaatggattatctgtatgagaagattgcatgttcatttaaggtgccaagggttttctgaacagctcaacttggaagcagatggggtctgtgcactccattgtgcactgtttagtttgcctgtttgttttcctttctttaatgccagaaagaataacacagacacaccttataaaagcatgccaaggttacgggattgattattttgtcaatatgtttgaaagctgactttgaaaacatttttagaactttgaaacttttaggaaacatcttaatcataatactcagtgttagtataagataacaagtttgaatgaaaacttgacaaagcatttggaatgtttagtttgaaaagtctgggccgggcatggtggctcatgcatgtaatcccagtgctttgggaggccaaggcgggcagatcatgaggtcaggagttcgagaccagcctggccaacatagtgaaaccctgtgtctactaaaagtacaaaaaattagctgggcttggtggtgggcgcatgtaatcccagttgcttgggaggctgaggcaggagagttgcttgaacctgggagctggaggttacagtgagccgagatcgcgccattgcactccagccagggcaacagtgcgagactgtctcaaaaaaaaaaaaaaaaatcctgaattgaatattcttaaaagttttactgtgtgaaaacgtagactcttgtatgcacattcatgcatgcctgttgatacagtcatctgcatttattttggaagcttggtctgttgaagtatattctgagggtaatgaaaatatgccagcataatggatttccccccaaaatttctaagtgaattttaaaagacagctcataagtagaaacattggaataatgttctttccagactaggttcttcacaaactagttatcacagatgatggtactgtttttgcagttcggtttgcttcatgccaaaagtgtccttgatcagttactttaaatcttgataccattagactgttgcagtattgagattttgtttttttaactttgaagattccaagatatggtaggatattttgtcttctttagattaccatttcttatttttttattcttatttatttatcaatttattttttgagacagtatcgctctgtcgcccaggctggagtgcagtggtatgatcttggctcgctgcaacctccacctctagggttcaagtgattcttgtgcctcagcctcccgagtagctgggactacaggcgtacaccaccatgcctggctaatttttttgtgtgtgtttttttttagtagagacggagtctcaccatgttgcccaggctggtctcaaactcctgagttcaggcaatctgccccctcggcctcccaaattgctgatattacaggcatgagccaccacgcccagcccatttcttgttttttaatatttaactcacgagtaaatataaataggattttctcagataaattatatcataacgtaacccttaaattaaccctttgcttattgaagtgtccttaagagaccctttatcctagaaacaagattggtgtttgtccagtctccttaggagctatagaaatcaattgagtggtgaagataggtgagaacagcaaagaattggcagcttaggtctgcagcattggctataggcctcactggctgaagcgatgaggaagcagtgacaggagatgggtagtggaagcatgcagtgtgtgcacagagaaagccggccaaatgctttggtgacagtgacaatgcacttttccagtgcaggcatggactccctagaggttggataggcaggctccatctcacccctatttcctcactgtgcaaaattccattgttagaatttttttaatgtgtgctttaaaatttttatttatttttaatgttaagaataaagatatcctgttttcactttaacctcttgaaatataaaatgactcatgttcattggcacaaaggttgagagttcagttcagggtcaaaactcttaggcacttggactttgctttgctacatacttgcattgctctgctatcctgtgtggtattcacaagctcagtaacctgaagcagaccctgaactgactgctgggtggtgcaatgggaggaagtccagcttttccagcagtgtgctttgtgtcctaccactctccccaaagcacagataacttaatttttaacttaggaagcagtctaaataatgtatgctgttttattttctcccagggacgttggccaagccattgagtgtttatcttaatggagagatctgattatgtaaccatatattatactaataaatggtgtgtataagtttttatctctaattgaaactcttcccctttttttgcatttttctttttgaaaagatcattgtcacagtcgtactgggactggttataggtgccatttactttgggctaaaaaatgattctactggaatccagaacaggtaagtaaatttggatcttgattttcagaaaatgctgttactttcttcaagcttattgaaatccattaagaatttgaatttaagacaagtatagtgtaaatgtcattcttttattgagggtaggatgagtcagtttatttttgagacagagtcatgctctgttgcccaggctggagtgcagtgacgcgatctcagctcactgcaatctccgcctcccgggttcaagcaattctcctgcctcagcttcccaagtagcctcgactacagacatccaccaccacgcccagctaatttttgtatttttagtagagacggggtcgcaccatgttggctagactggcttcgaactcctgacctcaggtgggtccacccaccttggcctcccaaagtgctgggattacaggcgtgagccactccacctggcccaattatttttaaatgtacagttcagtggcattaagtacatttacattgttatgcaactatcaccaccatccaactctagaattctttttgtcttctcaagtggaatatctgtacccattaagcaataacttcccatctcatatctgcctctcctaacccctggcagcaatcattctactttctgtctctgaacttgactactctaagaccctcatataagtggaatcatacagtagatattctttggtaactgactcatttcctttagcatgttgtctttatggctcattcatgtagcatgtgtcagatttctttccgttgtaaggttgaataatattccattgtatgtacataccacatttcgtttttccattcatctatagatggaaacttgggttgctttcaccttttggctgttgtaaacagtgctccctaggtgtacaaatatctctttcagccaggtgtggtggcatgtgtctgtagtcccagctactcgggaggctgaggtgggaggattgcttgagcccaggagttctaggttgcagtgagctatgattgcactactgcagtccagcctgggtgacagagttcgaccctgtctcttaaaaaaacaaacaaaaaaaaccctattttagttcctgctttcaattcttcggatatatacccagaattagaatttctgggtcatatagtaattctgttaatttttttgaggaactactataccgtcttccacagtggccgtaccattttacattcttaccagcagtgcacaagggttccagtttctccatatccttaccaacacttttctttttctcccttttaaatagtagagatccattggatctttggagaaatgtctattcaagtcctttgcccattttaaaattgaattgtttgtttttttgttgttgagttgtaggagtgctttatatttttgaggagatattaatcccttatcagatacataatttgcaaatatttttccccactctgtgggttgtcttttcagtattgatagtgtcctttgatgcataaacatttttaactttgatgtagtccaattgatcaatttcttcttttgttgcctgtgagctaatttctgtcactttttaaatatatatgtttgacttaggggtgtgatgggggtgggactcagcttttcctgttatatggttagcacttttgttagtgttgtgatccttacctagtttcagtcacagtggacccttaaaaacctcattttatgaggggactttttatcgactgtattgtgttctgaacataagcactcaggaatttcacagccctcagagttctggttatttcatgtatggagaacacttgtggcagatactgtgctccgtagtgcttgctgtccatagtctcaggttaccacccagtgatttagagggggtagatggtagtatccccattttactattgaggaaagttgaagacgcttatgtgcagcctattttgatgtctggaaaggctgattattttttaaagaataagcataaaagttggttcctcactcaagtaaaataaattcttttgtatggaatcagatagtgttactctacgatgagagtgttattaaacagcagtttaccagagtgatgtcattgttgtttttactttccctgagggctgaggtatctggattatttccagacttgctagtaattgatggtttgtgtgctgtgtagatgccatgtcttaacccagcacagaatatatcacaggatctaaaggcagtgggccttttatattgtgcagcaggaagcatttggagaggacatggagtaacctggtcctcaactggaactttgaagaggactggaaatctggccattaaagctcttggtagaaaaatccagagaaataaagaagaactttaggtgtttcttcagatgttttctggagaaatagggcattaatcttattttaatttgtttgtttttgaaacagaatctcacaatattgcccaggctggtgtgcagtagtgcagtcatagctcactgcagctttgaactcctgggctcataatttgtatttgtgacttaagcttgctatcttttttttttcccccaaagctctagggtacatgtgcaggatgtgcaggtttgctacatagttaaacgtgtgccatggtggtttgctacacctatcaatccatcactttggtgttaagcccagtatgcattagctatttttcctgatgttcttcctcccactgcttctcgttgaccccagtatcattttttaaataagcatttggactatgttaaagtggcctgtgtatatgatttaatccctcctgggatgattagtgatttattgatgaggaaaaaatgtttcagcatcatctctggaaacaggttctcaaagttttgttcaggggtgaatattagtacttcataatttaaaactgctcgaggccagtggtttagttctcttctttggggatgaattctctgagagaggaaagcactctctgctctttctctaacccgtgtaactgagaaactgggttttaatcatatgtagagtataagcatctttgaattaatagctacctctggaataactgctttacagagttgtggtgatagctaaacaaattagtgtgtattaagggaaaaggtatactttaaaaacagtattcagatccagtcatctcacttctagatatttaccccaaagatgtgaaatcagtttattgaagaaatttctgcaccctcatatttattgcagcattgttcacaatagccaagatacggaatcacccgaagggtctgatttgataaagaaaatgtggtatatatacacagtggaaaaacaaaagaaattttgtcatttgcaacaacatggatgtaattggagaatattatgccaagtgaaataagccaaacgcagaaagctaagcacagaaatgtcacataatctcacttaatgtggaatctgaaacaatggaactgaaagagacagtagaatggtggttgccagaggctagaggtgtgtggggaatggagagatgatggtcaaagggtacaaaacctcagttacacaggaggaataaggatttttctttggagatacattgcacaatgtggtgaacacagtaaataataatgtaaatttcagaattgctaaaatttaagatacttttaccacaaaaaataaatgtttgagacgatggatgtgttaattagcttgatttaattatttcacacttatgattcatgaattatataacttggtaccccacaaatatatacaaccataatatgccaatttataatttaaaaaatcaaaataaaaaatattcagaccaataagtagatataacagatgtggattaccaccttgaaagaattagaatgaattaacttccttaataagaaaaaactgtgtttaaaataaatcatcttagtatttagaaggaacgtttccattgtctactttttcagaatcattatggacattactgtactgatagatttaagacaacaaattgaattgaatctttgctatgttccatgttctgaaattagctttttacttgatattaggtttatttgtgtacagaaagtgagataactgcatgtctaccaggcctggctatttttcactcattttaattatatgtacatacttttaaaactgctctggctgggcaccgtggcttacatttgtaactgcagcactttgggaggccaagctgggaggattgcttgaggccaggagttcaactcagttgcagtgagtttatgatcatgccactatactctagcctgggtgaccgagggcagctctgtctctaaaaataaaataaaacaaaaaagaccctagcctgttcccttagatctttgttctttaggtatctatggactcttttttttcttttaatgtaattgtgttgttcacttgggtttgcattttttaaaatgttctcttgtttttacgccatttaaatgatgtgtcacttacctctttttcagtttcaactcacacccttactgtcaattatattgttttgttatggtgtttcagggatgttggcatgctttcataaaatgcatatttgtatcaaagtgtagattaacttagcattttcctttttatttatttattttttaatttttttttttttgagacagtgtctcgctctgtcacccaggctggagtgcagtggcgcgatctcagctcactgcaacctccacgtcccaggttcaagcgattctcctgcctcagcctcctgagtagctgggactacaggcacctgccaccacgcccagctaatttttgtatttttagtagagacagggtttcaccatgttggttaggctggtcttgaactcctgacctcatgatcctcccgacccggcctcccatagtgccgagattacaggcatgagccactgcacccggccaacattttcctttttaaatctagttacttcactgagaaacaagcactaatagtgttccttttcattacgatacacaaattagatttttctttatcagtaagtgtcacttggtttcctctgagcactctggaaacctcatagagggctggctgtcttagcgtggtcaaggataatgtcacggccctgctgatggtagtgtggtgcatgtagattatgcatataataaggggttgattgaaggttcccttcactgtctttcattttgcttccacatgacttacattctttgttcaactttaaaatcaaagtggctaattgaatttcttaatctttacagactttatttagcttaccacttttctgtttgtacattaggaatggtacttggcatttttgttagttaaaattatgtattggcctggctgccataccaaaataccatagagcaagtggcttaaacaacagaaatgtattttctctcagttctagtctgaaagtctgagatcaggatgccagcattgctgggttctggtgagggccctctacctggcttgcagacttgcctccttgctgttccttgtgtggcagagcaagagctctggtgtctcttcctattaggacgctcttcccattacactctccccacctccctatcctgtaacctcatctgaacctaattaccttccaaagggcccatcttcaaataccatcacattgggggttggggcttcaacatatgaattttggtggggggagacgcaattcattccacaacaatccaagactgtgagtttcaaaatgagtaccactgtggagacataagagatggggagaggcttgatggggttcacgcttccctgttccaaccagaacagtttccctttttttcctgcttaactttatacactgtcatttgtggaaagagttttgtgggtagaaaatctgtctaagaatgctgagttgactgcggtgatttggttccccttttcatggcagagctggggttctcttcttcctgacgaccaaccagtgtttcagcagtgtttcagccgtggaactctttgtggtagagaagaagctcttcatgtgagtaggtctttgttctgggaacggggctgtccagcagcaggggctattggttagactgattacatctggggttggggccaaggatgggatccggaggattaccagtactttttaaaatttatttttaaattgatgaataaaaattgtatatattgatcatatacaacatgatgttttgaaaatatgtataggggttaccaatattcattgagaaaaagcagccagaggtagggaagaaaatcctgagcctttgggacctgatatccagagaaaagagtttttctagatttgagtacagtcagaaaatccaaatgttggagagagcaagcaataaagggactgaaaagtatattttgtttttagtaaatactgatgaccttcacaagaaaagtttgaggggcttggtagagattaagcagcaacttggaagtggggagattaagtcgacaaagaacgtgaccatgcttagccctcggtggaccagggaagtggcacgagccggaaggcattcttacagtaaagagcagcctggtttaatttattgtattttcctatttatttatttatttattttttggagacagggtcttgctttgtcgcccaggctggagtccagagacatgatcatggctcattgctgccttgacctgcggggcttacgcagtcctcccatctcggcctcctgagtaactggcatgcctagcttttttttttttttttgacatagagtctcgctcgctctgtctcccaggctggagtgcaatggtgcaatcttggctcactgcaatctctacctcccgggttcaagcgattctcctccctcagcctcccaagtagctgggattacaggtgcccgccaccacacccagctaatttttttggtatttttagtagagatggggtttcgccatgttggccaggctggtctcaaactcctgacctcaggtgatccaccccctttggccgcccaaagcactgggattacaggcgtgagccactgcaccggggcgcctggctgtttttttttttttttttaatttttttgtagagagaaggtctcactatgtttcccaggctgggtatttttcaaggatggatcacattttcccaaatgtacatgtcacatataggaattattagaaagggaaataatgaaggaagtggaagagtttggaattgtgggagaaagatgtcaggaagaggaaagattacaatttggtagttgacagggatgtatggctggaagacatgatcattgaaagaagaagtctttttctttttttaacttgggagtagaagaagtaagaagagcttagtcatctgaagctgcactagggggcttggagaataacaggccaccttcctcatcagaaatagggaaaaagaaaagcttctattcctgccaaaatcggctactgaagtgctgttcttcaaggaaagcccccgtcaaagaaggaaaagaagcattctttgaagagagggaggatgtgtggaatctgtttccctggactgagtgttcaggagctagaaagagcagcaataggagggaacagtgtcatgagaagaggggctgtgcgcagagcttcatgggatgctttctcagggaggctggcacccaaggtattcatgggcatgcatagtgggtctagccctgaggatgtgggaagctggcttgttcaacccctgctgtcagcagaggtctgtaacagacaagtctagcctgccctgtggcttcttaaactaatcttggatgtatgatacgtatttttgttctatagacatgaatacatcagcggatactacagagtgtcatcttatttccttggaaaactgttatctgatttattacccatgaggatgttaccaagtattatatttacctgtatagtgtacttcatgttaggtaagtatgtaacaaaacaaaaaaggacatgtctttagtcttgcctatgggtgaagtcagttgcaccttgcaagcatatttttggttctcaaaactataaaccaaaccatgagataaggaaacacctgtccattttgcactctctgaaacagttgttcactgtcagctatttttgtcaagactgtttcccaactgaacttttttgtttgtttgctttgtttcgcttttttgagacagggtcttgctctgtcacccaggctggagtgcagtggtgatcatatctcactgcagcctcaacctcctgggctccagtgatcctcctacctcagcctctgggtagctaggactaccggcacacagaaagatggagtttttggtaaagattgggtctcactgtgttgcccatgctggtcttatactcctggcctcaagtagtcctcctacctcagcctcccaaagtgctgggattataggaatgagcggatgtgcccagcctgaacttttaaaaccacttataaaactacactttactgagagatgcttgtgttatacacaaacatggaaagaatttataaaactttgagactatgctggagaagctgggatatttatagcctatctatgttttctatctgtctatctatctatctatctatctatctatctatctatctatctctccctgtctctctctatatatgtatatatatatacacacacacacttagagatatatagaatgattaaatatatttaatctcttagagatacataaaatgattaaatatatatatatgtatttatttaatatatattacccatccctgcttctttaatgagagaaagacggtgccttttggggcttgttaattaaaaaaaaaatacttgtttggtagatgtggagactcatttgtgcattatgctcaggcttcactccaggctccttgcatctgatttccatatatttcactgataaacacatgcacacacacaaaacccccggaaatatctattttgacactacaagataagaactaccgattgagtttaaaccttccatttgacaaataataggtgtgtcctaaacaatcagggttaggatctagatctccagactcctgattgttgttcttgtggctgtttcaaatcttcagattgtattacctgtagtattagctcactacagtttagaaagcagtttatgaaacgtaatttagtctcatttcaatccagagtgatgtggtgatctgtctggggaggcttgggttatggaggccccctccccctcccccagatactacaaccactgtgaggtcatggcatcccgatcgtcccagtcccttcactcacaaagttacagcacacaatgagtaatgtgaggatgtatgggcaaatgaatgtgctattgatgagtttcctgtgaaaagagaaggcagttgaattttggttagttgtactgcctgtagctcttcatctcaggaactcagaaattgtctgtaattatacataatggcacataagtgttataagagaactttatgcagttacatggacagacacaacattggagaccgagggtggttggagagtggatgactttttttcattctaatattagtttctcaaaatattagtgttaaatttgcacaataagcaatcccaaacatacggtgacctaggcagttgggttaactacttcttctctttctgactaaggattgaagccaaaggcagatgccttcttcgttatgatgtttacccttatgatggtggcttattcagccagttccatggcactggccatagcagcaggtcagagtgtggtttctgtagcaacacttctcatgaccatctgttttgtgtttatgatggtgagtctgaactgtgtttgctctgataaggaattgtttttttccttcatttcttcctgcacattcacttgtcatgtaaaacctgttttgaggattctgtaaatggggctctgctttacttaaggccatctactggaatagattatgttagagaatatactaactttcctctttgcccttatccaaccttttttgctactgttctaatgaagttccaataattttagttaatattgttactaatgagcttttaaaaggcgtttctttgtgacctattatgaaaccttaataaattggaatttcaaaaatcagaagacatttgatcggcagattctcttgagaattacagattatttgcccgactttcatgctggcattagagaactgctagtttattttttttttaacatttttaatttatgttttaaagttcccacatacagcattgaactgctagcttgtttacccaccagcagagatagtttggttggatttataatactgttttccaagacacatattaagcctcataagaagcagaacagagtatggtttgagtagtctattttggttccctctcgtattttgaaaaagagtgttttaaaaatattggaaaattgcagagttcacacactactaagtacctcctttctgggtttcgttcctgacattcaatatgtttctgcttatctttttttttttaatggttacttaatcctaatcttacatgcccctaaattttgcacatagaggaatcaacaggtgaatgaaaccagttacatttttttccccttcaacatcatacttgacaggaacatgtcctgtctgctagagtaggagtagatgcctttaaataaaaataattagcacaaactcttgccatagtttaattcttccatttctggatttgaaaactaccaatgcaaacattaatgaggaagtgataggcttgtttatatttcccatactgtcatccagcaaatacaaatgttttgtttgatttattattatttaaagatttctacacagaacattaaaaactagtcataaaactgtattttactcagagatgctgtgttatatgctaagcacttggtcaggtcaagtctgaatatatattgtcataccagcaacatcatcattgttatgcatataccagtatgcttgtggtggcaattagttctcttgtcaatcttcagcaggtcttcctggcatctccattgcgctattgctttttggcagctttaaatgatagcactgatcctgcttatgctctacctctcactacattatactctgtatcagttctagactttgggttatgttaagcctgcattcagaacctcatatccttgctaaagtcatatggatatagactgcaaacctttgtaaataacaaatcttatgtgaggtgcagtgggcatgtgacgctcaggatttatctggtatagattcttccaatgccaggtgtattggtgagcacacatagtggttgtgtcattagaatagtcagtgcttcttgaccttccattatttgcagttacaaataaagttgagtacatagtcttgacaattgaggatcttacgattaaatggaatatctaatatgtattagatattttgttcttcctttaaaaccgtaaatgacttcagctatatagagatgtgcacatgcagaggagaagagtttagtgagtgtcttgagtaagtggagagaacttcaagaaagagttggttttaaaagaaatacttacaaagtggtagggacttgaagagggtattctctagaattctgcatgaaattactcaagcaggcctgacttttagtatttgctttttgtagattttttcaggtctgttggtcaatctcacaaccattgcatcttggctgtcatggcttcagtacttcagcattccacgatatggatttacggtatgtcttccttgtctgtcactgtgactgcattcccaagctaggaacaatggaaatcaagtgtcctcatctcatttccctgaccatgagctgtgaaagtctcccatccagaaactcccttttaggagcaaggaatgagaatttcctgttagccttggttaacacaaggctggggagtcatttgctattttcctcagtcatcctttaaagggctaggggagatacctcctagtaaaggagaaagattggctaattgatgaaaaacacattgttgcatttcagttcaataaggaagtaaatgagaggatgggacactagaatacatatgtttataatgaaaggaaaattagaagagcaaagaccatataataagcatagtcatattggcttttgcaagctcattaactccaaagtaaactatctgtgtcttaatatagtataaccaagcttctaacatccaagaattacaactggttctaatgaaaacaaacaagaacgaaagattgtcactgtaaattaacaatactcattgagcaccactgtatcattttaattagaatgtttatggagttacaaaattggggagagaaggaggaaggagctatggtgtagtatagccagaggtctcccgctttggcaaaatactttacttcttttgtattggaagccaaaatcccaaccctaggtttcttgattgccagggaaaataacattagttggtttggtgagacaaagactgtgaatatgtttttagaaataacaataaagattaaactcagagggcatgattgtgataactctttggaaacttcttgaaatttaaaactgtttaccttgccctgctcccacttgtgttataggctttgcagcataatgaatttttgggacaaaacttctgcccaggactcaatgcaacaggaaacaatccttgtaactatgcaacgtaagtttttgttcagtgtcaaaatgggttttgttactaccatggtgtgatgtataaaggctactgggcttagatctgtatgagtccttccaggggcactgaatttttccgagcctacgttttctcatccataaagtgagttgtgcgcgaatgcatgtgaacatgtggcacaacccctcagtattctgctgcagtaaaaattgtctttaacatgcagcaatgtttcttacgtttgtttcttattgttttgggccttttaaaagatccttttgatattttgattgtgggtttgaattcttggttttcagagcatttgagattgaagtgaggtgctttgatattttatcaagggcttatggttcctgaactgtatggattatatgaaatctatgggtccctgaactcacggatacttctgagcccaacccacggacagtagtaagaatgaaataggcagcaatagcacaaagaaagtaaacatttccctgccaagatcctggcacttccactgcctcatgcatttggaagacatcatgaaatcaaaggccgcatagtcatgtgttgttgtttttaaattaacttggaatactccctatcaatcgatttatcctctaaaaaaacaagaaacacttgaataagttgagaaaaaaaccccgttttcacataatgttaaaacagattctaataacactggataatattgttttaagaatttagtaacacgtgccttttctatgattgctaatggtttgattttgatacataaattaatgagagaaaagagaatgttgatattatcctcaatctcctgaatgttcaagtagaatataaataattctgaataacaggacaaattactcttttgaattgtccacaggaaatcctctgtacagagaggttttctttattctgtccctctcttttggcttgatcagggtggtcaggatgaagtggatgggaaaaatgggaccagataaggaggaaccaccatgggcttcatggtaacggaagatgaggcttcatcctcagtagacaaaggaggaagatattcctttttttttttttttttttttgaaatggagtctcgctctgtcaccgaggctggagtgcagtggcacgatgtccgctcactgcaagctccacctcccgggttgacgccattctcctgcctcagcctcctgagtagctgggattacaggtgcccaccaccacacctggctaattttttgtatttttagtagagatggagtttcaccatgttagccaggatggtctcgtctcctgacctcgtgatccacctgccttggcctcccaaagtgctgggattacaggcatgagccactgcagccggccaggaggaagctattcttatagtaaaagagaggctatgtatgtttttggaattgctgaattcccaagagttgcacaaaaatggtatcaggcagtaactgtggctgtccaaggtctttttagtacaagatgatttcctaacctgtggcaaggagttcatcctactctactctagctgccacttaaggcttaaacctgatagctgagtctgctgggaatgtcttgtacctgagtatctgtgatgctcctcacagtcttggtgcaagagctgacagaacatgactttggcaggaaacccatgcacacctcttttcctggttttggaattcttaacctgtgttgttttttatggctatttgtaagcgtaaagagtactgtaagagctttgatcatcttagtaagggtcacaggtgtcatctgtttaagcagatattttctttatcagggataagggaactattacttgataaatatttctgccctttggagagagcagcattacagatttggaaaccaataaatttgagtaggctaaaaacttggtgattcaaagtatgactctgtaaacctggtcaagttccttaaacgttagtcccctcatcttttaagtgtgtacaatgtctatcacattggattgttttaggaattaactaagttaggtccatgttgtttgttagtgtctagcaaaattgtaaacacacaatgactgttagctatgatatctgaaggggtaattattaaaggcttggttcaattttaggctcctttaaggaacagtggatatactgagtaacatttgacggatgctaggaatgaagttatattctttttctgtttaatttcagatgtactggcgaagaatatttggtaaagcagggcatcgatctctcaccctggggcttgtggaagaatcacgtggccttggcttgtatgattgttattttcctcacaattgcctacctgaaattgttatttcttaaaaaatattcttaaatttccccttaattcagtatgatttatcctcacataaaaaagaagcactttgattgaagtattcaatcaagtttttttgttgttttctgttcccttgccatcacactgttgcacagcagcaattgttttaaagagatacatttttagaaatcacaacaaactgaattaaacatgaaagaacccaagacatcatgtatcgcatattagttaatctcctcagacagtaaccatggggaagaaatctggtctaatttattaatctaaaaaaggagaattgaattctggaaactcctgacaagttattactgtctctggcatttgtttcctcatctttaaaatgaataggtaggttagtagcccttcagtcttaatactttatgatgctatggtttgccattatttaataaatgacaaatgtattaatgctatactggaaatgtaaaattgaaaatatgttggaaaaaagattctgtcttatagggtaaaaaaagccaccgtgatagaaaaaaaatctttttgataagcacattaaagttaatagaactt

SEQ ID NO: 67 - DNA, 5202 bp, Homo sapiens
ctggtgctgcgggtgcagcacggaaaccccggcttctactgtacaggacactggcccctctcaggtcagaagacatgcctggagggatgtctggctgcaaagactatttttatcctgcaactcttgataaagggctgttttgccatggagcctcgttgtgtgttgtgtgtctcagctgggtcgctgtcccacagtggggagtgggttgtgctgtttggctggggtgccacccgtgcctgtgagcatgaaagcctgtaggtgcgcgctggggcatgtggcagccctggctgtgtgggagtgaggctcacagccactgggctggaagcctgggcctcacccactccctcccatgctcagcctcctggagcctcctccgtaaccctttgctctcctgagaggagccaggtgctttgaaggagcctccatgggggccagggcctagggtgtctgtgctgaggggcggaaggtgggggtcccagggaccatggcttggaaagggaggtggtgttttccacaagactcttgtgtcagagccagaggggcaaaacaagcacaaggctgtgtcagaagctccctgggggggttgtgggtccccagttcctggcacgcagccttaatcctggggcctggctgccagcttccgcctgggctggcataggggacacgcagttggccactctggctctgagctggcttggcacaatgtgtcagggtgagggggccccttaggggcctcaagcaggagggctgagggcaccgctggttcgtctgttcatggtgggcggctttgtgtggccaccagtgctgggtggtgtgggtttgggctgttctccctcctggctcagcacgggcccgtcagcccagtgtcctttgggcctgcccttcccctagcatccctggttggaagggtgtcctcacagggctgtgggcgggccagggctggctgctggttaaatttagtgtggggggtggggcagctgcccaaggtccacctgccaccagggctgccacttggactcccttgccagggggcgggcaggggctggctctgcctggggccaggcccatgttaacctgtgccccggcctgggggccagaggggcaggcctgcgcacggggaggctgttgtggcagcggaacagagacgtgcacggtgagaggcctgggggccggctgtccagggctcccgatggcttttctcccagccagcaggatcagaggagccaaggtccgacttgggcctggctggttgcccacagccctgctcagagggccggctccctgacccccatggttcaggtttcggtgcccgacgctggggtgggccagcgtggagcctggcctttcagctcagcaggcctgtggaggtggggctctgacggcctatcccagctcgtttcctactctctcctccaatcgggaacaagagggctggagagctcaggtcacccctagcctcgggtgtgtcccaagggcaacccccagctggtgcctggtgaaagggcatgacagcagccacggtgtgagctgtcccagggctcagggctggactgcctggctccagccccctcccccagcccctcgcagtgctcatcagggaccaaggtccagctacagagctcttgcagcctctgggccatagctgccagctctggagggtccagatggaacccagagcctgaacacccctcccctccccccagcaccccctggattcctgaggcctggctcagttaataggagacaggtccgctggcccaagcaaagatgcgggtgccacgagggccaggcctcggccaagccctgctggggtaaatcccagcagcccaggctccagtctcgcctcgggggtccctccttgccagctctgccagcccctcagggctgctgggcaccccttcacctcctgagcaccccaggtgctcagccctctccccctccccccatgtctagtccctcagagctgtccggactgacgtctgtacctaccccccatgtgggtctcctgctctcccttcgtggggacactaggcaggcactgggccttgccccaagccccgcctgccacctcacccactgcctctgcctccctggggcagagctgttcccagacgggtggggcggggcccaactgtccccagctccttcagccctttctgtccctcccagtgaggccagctgcggtgaagagggtgctctcttgcctggagttccctctgctacggctgccccctcccagccctggcccactaagccagacccagctgtcgccattcccacttctggtcctgccacctcctgagctgccttcccgcctggtctgggtagagtcatggcctcgagcacaggtgaccggagccaggcggtgaggcatggactgagggcgaaggtgctgacgctggacggcatgaacccgcgtgtgcggagagtggagtacgcagtgcgtggccccatagtgcagcgagccttggagctggagcaggagctgcgccaggtatggcccagggcccctcgctgccctccaggtcacaatggggtggccgagttggccccagccccactggcacatgggacaagggctgaggggttaggtagggcacagtctccctgcctgctcccctcccctcccagggtgtgaagaagcctttcaccgaggtcatccgtgccaacatcggggacgcacaggctatggggcagaggcccatcaccttcctgcgccaggtgaggctcctgcactgcccggagcacccccccacccccagcccatgtgccctggcctcagcactccgtcttcccaggtcttggccctctgtgttaaccctgatcttctgagcagccccaacttccctgacgatgccaagaaaagggcggagcgcatcttgcaggcgtgtgggggccacagtctgggtgagagccagggccaggaggaagcagagggccgccctgccactggaggagggaagtcccttgggagggctgaggagaacttcacctgtacttcccatcctgtcctgcccgagtccaggggcctacagcgtcagctccggcatccagctgatccgggaggacgtggcgcggtacattgagaggcgtgacggaggcatccctgcggaccccaacaacgtcttcctgtccacaggggccagcgatgccatcgtggtaggctgggcatgggcaccaagacattcctgacactgcagagggggcgcccagggtgggggacaggtgcggccccaggcctcgccaaccctgccttccccttcctttccgcagacggtgctgaagctgctggtggccggcgagggccacacacgcacgggtgtgctcatccccatcccccagtacccactctactcggccacgctggcagagctgggcgcagtgcaggtggattactacctggacgaggagcgtgcctgggcgctggacgtggccgagcttcaccgtgcactgggccaggcgcgtgaccactgccgccctcgtgcgctctgtgtcatcaaccctggcaaccccaccggtgcgttccccgccgccccgccccactccccccgcgcccacgttgcgttccccgccgccccgccccactccccccgcgcccacggtgcgttccccgccgccccgccccactccccccgcgcccacggtgcgttccccgccgccccgccccactccccccgcgcccacggtgcgttccccgccgccccgccccactccctccgcgcccacggtgcgttccccgccgccccgccccactcctcccgcacccacgtgcgccctggcccaggcagtgccgggtccgctggaccccggctgcccagcggagggcagtgcgcccccttggctcacccagcactgctgcctccccggcaccccagggcaggtgcagacccgcgagtgcatcgaggccgtgatccgcttcgccttcgaagagcggctctttctgctggcggacgaggtgcgcggcgcgggggagcgggaagccgggcaacagtccgcccccgtgacgccttgcgcccttccaggtgtaccaggacaacgtgtacgccgcgggttcgcagttccactcattcaagaaggtgctcatggagatggggccgccctacgccgggcagcaggagcttgcctccttccactccacctccaagggctacatgggcgagtgcgtgcgtacgaggcgggtgggggctcgcgggccatggccaggccctcctcgcccgatgggccaccccctcctccgcacctgacctggccgtgcgcaggtgcgggttccgcggcggctatgtggaggtggtgaacatggacgctgcagtgcagcagcagatgctgaagctgatgagtgtgcggctgtgcccgccggtgccaggacaggccctgctggacctggtggtcagcccgcccgcgcccaccgacccctcctttgcgcagttccaggctgtgagttgggggcaggagggggtccaggtgacctaatcaggggtgggggatgccgagtgccgtgccctgatgggccctccctccgcggccacaggagaagcaggcagtgctggcagagctggcggccaaggccaagctcaccgagcaggtcttcaatgaggctcctggcatcagctgcaacccagtgcagggcgccatgtactccttcccgcgcgtgcagctgcccccgcgggcggtggagcgcgctcaggtcaggcgggggcggggcctgcggggtgggcagggggggccgggcatccctctctgacggctctccgtccacaggagctgggcctggcccccgatatgttcttctgcctgcgcctcctggaggagaccggcatctgcgtggtgccagggagcggctttgggcagcgggaaggcacctaccacttccggtgaggcctggccctcactccctgtcccgccaccctggcccttcactcactgtcaactcctttcaggatgaccattctgccccccttggagaaactgcggctgctgctggagaagctgagcaggttccatgccaagttcaccctcgagtactcctgagcaccccagctggggccaggctgggtcgccctggactgtgtgctcaggagccctgggaggctctggagcccactgtacttgctcttgatgcctggcggggtggggtggggggggtgctgggcccctgcctctctgcaggtccctaataaagctgtgtggcagtctgactccagg

SEQ ID NO: 68 - DNA, 22140 bp, Homo sapiens
tccagggggagacattgcacacagacaacactcaggaaacattcccctggtcatgaacctggctttgctaaggaggtgaaggtagagcccactttccatcccttgctccaaaacacccttccaggccctcccatgtacctgctctgtcccttcctgggtcctctgaggaccctgttctgtgaggggtccctgtgcagctccccattccctcctggcaccacctgtggggaaggtgcggtgaccacaggacaatcagcctcgcagaggacagagaccacccaggatggtcagggagaacatggacaggccttgagcctcagctcaagggagggagggtccccctgaagtcttccccaaggacagtagagcccagagccacccacctccctctatcacagtcctctcttcccaggacacacaggacacctccccctccatatccgggagctgcagctccacctgagacccctggacttgggtctctgtccctgggttagaggccaggctggtgacactagagacagagggctggtccctccccagtcatcccccagtgagcccctttccatcccccagagccacctctgtcaccttcctgctgggtgtcttcctaccttcccagcacactgaagagcatggggagacctggcagctcactgtgttgcaaagaaaataattaccacatttggatatgccagggttctctgtgtgctgctgacagacccatagccaggacacaatagaggtcagtgctggagaggggggatcctcctcccctgatggggacagaggtctcatcagccttgattctcaaagtgtggtctgggaaaccaaaatgtagacagaaaggaaagagaaagtaaggacaaaggtaggaatgagaggagaggaaacagagcttcctggacaaaccccgccccagcacacatgatcagacaaagctctgggccccagggaggaggctcagcacagagagtggaaaacagcagaggtgacagagcagccgtgctcgaagcgttcctggagcccaagctctcctccacaggtgaagacagggccagcaggagacaccatggggcacctctcagccccacttcacagagtgcgtgtaccctggcaggggcttctgctcacaggtgaggggaggacaccctgggaaggggcggaaagagggcgcacagagaatggctagggtcctctggggaggatggagctctaagaggggacagagggcttctcttggagccaaataggagagaggacatgaaagggatagagatcataaaaggaaagtctcagtgatctgaaactgttagtgaataaacaatctcccattttttaccttttccaactgaatcatcaatgagcaataaatttcaaaaactgctgacaataatcacaatttaagtcagcgtgacaattaaggaaaacattttaaaaggggcattaaacagagccctgagccaccaacctcagatattggcaaataaaccccaggacatgaagagccctgggaatgctcactaactcatccacaggagtctgcagcctatcccaggcactggggtgcaaccaacatcacacaaatccctgccctcacggagctcacgctctcatgggtggggaagacagacaagcaaagagatctagaatgtgaggtcaggtgttgacaagagccctggagggaacagagcagaaaaaggtcagaaagggaatacccagggtctctaggggaggtgtcagggaaaggatctcccaagagcaccctgatgtgatcaagatctgagggcagtggggagggagccatgcggatccctggggaagggcattccagagaaatgacaaggtcagaggcactaagggaatgggagtcacactgctgaccttgacccagtaggacacacacacacacacacacacacacacacacacacacacacactccaaggtggaggggtgaagacacctgctcaggacccaaggccccatttttctaccctaatgcataggtcccaatattgactgatgctctctcctctctcctagcctcacttctaaccttctggaacccgcccaccactgcccagctcactactgaatccatgccattcaatgttgcagaggggaaggaggttcttctccttgtccacaatctgccccagcaactttttggctacagctggtacaaaggggaaagagtggatggcaaccgtcaaattgtaggatatgcaataggaactcaacaagctaccccagggcccgcaaacagcggtcgagagacaatataccccaatgcatccctgctgatccagaacgtcacccagaatgacacaggattctacaccctacaagtcataaagtcagatcttgtgaatgaagaagcaactggacagttccatgtataccgtgagtatttccccatgacctctgggtgttggggggttagttctacttcccacacatgggattgtcaggcctgggctgtgcctgtgtcctcctctgcattataccccatgttaaggtttgagcatctagtgcaggacacactatgggacagacatcaaaataccgaatgtcttactctggagtcctgatcctgcagacatttgcttcagaggaaggacaatctgatgtgggtaacttatcgaggggagaccagtctcaatctagccccccgggaccctcctggtgaacatgtccctaagaaagacccagtaggactcagtcagggtctggcctgaagggccttctgggatcctcacagacaagctcagccctgggaatcccctgctccaaaacactatcccaaggttctcaactcctggtgaccctgaggagcctgggccagggctagattgtggcctcctgggcagggctgactaggaacaagaatttgagctatccgagggctgtggctcctggagctggtaaccagccagggttcaggcactagagcctcatttgggcaaggatggagcctcatccttcaccttagtctcagcctggagaggacagatggacaagctccccaggccatcagccaactgccctgggggcttaggagatgccataggaagtttaccatccccaggaggaggaacagaggagacaggatgctcctgaaagctccttgtccaccagggatcaggctgagaggcactctcagggaatccaacaacaatagatgctgcggccgggagcggtggctcacgcctgtaatcccagtactttgggaggccgaggtggatggactatgaggtcaggagttcaagaccagcctgaccaacatggtgaaatgccgtctctactaaaaatacaaaaaaattagccgggcatggtggtgcgtgcctgtaatcccagctactcaggaggctgaggcaggagaattgcttgaacctgggaggcagaggttgcagtgagccaagatcacaccactgcaccctagcctgggtgacagagcgagactccatctcaaaaaaataaaataaaataagattgtttatttgggcagctcccctatgcagagctgaggtcaaataattataaatattttaaggttaattcacagaccacaagataagccaaaaccattaaccatttatactatttcactgaggggaaactgagccacatggcaataaatacagtcactatatcaaggtcacacagaccgtaactggaagatcagttacaggagatttgtcttcagccacagtcttaacctctcctctactccaggggccttatttggcatctgtggaccccaataccagagttggttcagttcctttcttcttaggcatctgcagcccagaggggagatcctggtctggggagtgagatcaaatggagaattaaccaagttttattctggaacttattcaacaattagagtcagtgtcagaaatgttcaggcctgggtcaggtgtggtggctcacacctgtaatcccagcactttgggatgccaaggtgggcggatcacttgaggtcaggagttcaagaccagcctggccaacatggtgaaaccccatctctactaaaaatacaaaaaaaattagtcgggcatggtggtgcgtgcctctaatcccagctacttgggatgctgaggtggtagaatcgcttgaacccaggaggcagaggttgcagtgagccaagatcatgtcactgtgctccagcctgggagacagagtgagactctatctcaaaaaaaaaaaaaaaaaatgttcaggcctatcccctcagacccacacctctgctccctggacttgaaatcctgtgtttcctgatgtgttggtgtcactcccacaggaggataaaggaaaggactttgctttctctcctcactcacaccctgcaccagccagggcccaatatgaaacacacactcagtagttctctcacgaatgaatgaatgattgaatgatccataacctctttagagactggatctggttgcagaatcctgggaggttcttgccatacctgctccccatccctccagagactgagacccatgttccatcccctgaccatctacccctaaagccaccccaagtaccatatttcatgtgactctggggctgctcggctgtgggaaggttttcagggctccctggtcttggttctgggacaccagaggctcctggttgctggggtctctaaggtcacttagcccccactgctcactgtcatgggcatctctgactctctctgctcctccatgtcctcattttcctctccttttatcccagctgaactgcacagtttcctccacccttaggcctttcccagacactccgtctaacaaggttgactgtcctgttcccttcccgctcacactgtggccaggcccacctcccaggcaataggaaaggcacagaaatgagcccagagcagccacccctgccaggtccatcataagccactgtccccacgtccctcagtgaggctgacatgtggaacaggccaggggacagggacgagcgactcctccatacactctctatactgactcaccaggggatcagaggcagaaggacaggtctgcagtccccaaagcccatgggctcatttcacccatttgactcctaactccatccctgttctgctgtgggctcacatcctctagtggttcctgggaccttccccaggtagagctagccaggcaggtgctgtctgatgggtttgctgcccattccacctacacctgtgtcctcatgatgacaccattgtcataaggtgggatctctcagacagggagatgcattagccactggtgtctcacttagactctgcccaatttggatgaatttggtcaaactctagttgtgtttcctgaggttgagagaaaaggaagaaagcatttcacatgactgttttgggttcctctttttacctgaatttccacaggaatttgtaacatagaactctttctaaatttactaacataacatacatcacttctcctcatatggcatcgtttctctcttaatgcaattgagaactctcagatatcctttctgacaagttctgtcttcctaacaggacccatgagtcccttctacccagggagtcactgatttcaaactgacttcagcatctttctttgatcataacatgatcctactggacttcagagcttggtttaagagtttatcacgctctctagagaatattcctcttattaattggtgttagatccagagtattaataacaattttcacaaatggaataatttaacttctcaaatttatatcccagatctaccaaacacacacggtccatgagggtcaggctttcagcaagttcatgctccttccgttccactagctggttattctgcatttgcaaaaaacccacatatttcagaaaagatccacagtgtcatcatctgctcttttcagggggaaaagggacattaaagaccaaagacaaggaacgtagatatgctgttaaatccaggcagcccctgcctgtcaccctcactcttttctagatcattccttggactctgctctatctttagggggtcactggctcaagtcagtcatcatcaaacacctgggaaaaactgccccaccttgtggttctgctgcctgacgactgagctaccttcaggcttgcccctggtgtcccctgttatttctgctgaaacatacagtcccaggccaggctgctcagtatcctcagggtttaaggacaataggaagtcccatcatcacccatctctaggatgtcctcagacagggaagctgcagagaaaacacacctagtggggcaaagtaggactgtgaagctggaagggacccagcacctgtatgttccaggtgaggacccacaggtgggtcaggcaggcatcagccagtcagggaaggaccagaagtgcctggggctgtgactcccagtcctcggtctgtccacgacccaacactgctgctcagttcacacttgagaaagtctgtgcttctctcacacagagcaggcggcctcacggtctctgagccctcagatcattgcacatctgtcttgtgaaacacacacttgccatgggcttttagggacttgggttggctgagaggtggggagatgccaactctgattgaaaaatgcccggacggaatcccagcactttgggaggccgaggcgggcagatcacgaggtcaggaggtcgagaccatcctggctaacagtgaccatcctggctaaaatacaaaaaactagccgggcatggtggcatgcacctgtagtcccagctactcaggaggctgaggcaggagaatcgcttgaacccgggaggaagaggttgcagtgagccaagatcgtgccactgcaccccagcctcagcaacaaagcgagactctgtctcaaaaaaaaaaagaaagaaagaaaaatgcccagccaggcacggtggctcaggcctgtaatcccagcactttgagaggccgaatcgggcggattgccagagctcaggagtttgagaccagcctgggcaacacggtgaaaccccgtcaggcatggtggcatgtgcctgtaatcccagctactcaggaagctgaggcaggagaattgcttgaatccaggaggtggaggttgcagtgagccgagatcgtgccattgcactccagcctgggtgacagagcgaggctccatctccaaaaaaaataaataaataagaaaagaaaaatgcctgtggaggaatcaaaggtgccacacagggcaatcttctctctgttttctgcatagcggagctgcccaagccctccatctccagcaacaactccaaccctgtggaggacaaggatgctgtggccttcacctgtgaacctgagactcaggacacaacctacctgtggtggataaacaatcagagcctcccggtcagtcccaggctgcagctgtccaatggcaacaggaccctcactctactcagtgtcacaaggaatgacacaggaccctatgagtgtgaaatacagaacccagtgagtgcgaaccgcagtgacccagtcaccttgaatgtcacctgtgagtatcttctgttcctctgtggcccaggctgccagcccaaatccacgcagccagaggccaggcctctcagtccctctcaggtctaaggacgcagacccttaaccctggacacccaggctggccatgacttcctttccccaggcaaacctgggcagccccagcctgaaccaagaataggaggggagaggctgctcctgtcctgggaggctcagggtccacagcctgtgatgggagaaacaggtgaatgtctcagacccagactcagtggacacaatggaggtttggttaggacttcagggttgtgacttagtagagaggaacactgtggcccttctccagaccagcagcttccccttccctctgatgacatcacctgtggctttattctctttgctccagatggcccggacacccccaccatttccccttcagacacctattaccgtccaggggcaaacctcagcctctcctgctatgcagcctctaacccacctgcacagtactcctggcttatcaatggaacattccagcaaagcacacaagagctctttatccctaacatcactgtgaataatagtggatcctatacctgccacgccaataactcagtcactggctgcaacaggaccacagtcaagacgatcatagtcactggtaagtaattcctggagcatcaacactaagatctggggtacaagctttctggttttcaaataggagcagagaagaaattttcttttgcagcctgtatccaacaggcacaaacaagtccaaattctcccctgaaccctctcaattcatctgtgcagactctcttccctttgtttttctgatttctcacagctgaccttaggtccagcctggaatgtggggagggggttctctcagccccagaaagccccgtgtagcaggaggggcttcacagagggggaagcagaaagggtcctcaaggtcaatttgcttctgtcactaacatgtccctttctgtaacttcttggccttcttttacctattccatgagatataaggaatatgtgaggttttaaaacagactcacaatagttttccctaaatgagagaaggaaatgcccttcatcagggatgagcagctcagactctgctccctgctctactcccggcttgcccggtgattggctctgccctgatcccatgtggggtaggacgcaggtgtgtgcagaaggtgtccaggtggcctgtcatgaatccagctaaatcaagatggcagtcaatggctgggcgctgtggttcatgcctgtgatcccagtactttggaaggccgaggtgagaggatcacctgaggtcaggagttcgagaccagcctgaccaacatggcaaaactccatctctactaaaaatacaaaaaaaaaaatttagccaggcatggttgcacatgccactaggcatgccactagggaggctgaggcacaagaatcacttgaacctgggaggcagaggttgcaatgagccgagatggcaccactgcactccagcctggacaacacagagagactctgtctcaaaaactaaataaataaataaataaaggcagtcaacacctgagcctcccctgggtcaggctgcctccctgagcttgtcctggctctgaagtcaccagctgtatgaggctgtgggcacagcacatgggatagcacagagcacagcgagtgacccacacttggagaaatcgggagattcagccacaggggctctgcattggagagaatgggcaatgccaaacagcgtgtatttgtagagaaggtaagaatatcagccttttgttaacactgtgcctactctaggaatctccttcaccgtgatattctatccacagaccaggaagtaaaactcctctttacagtgggaaatccttcggattggaactccagatagtaaggtcatgaagactggatggggcatcatcattccctaaaaaattatttaatgaaaaaaaacactaccttcccttttgtatgtaaagtgacagtcacaggaaggatgcctgatcacagctccaggaaagggtcagtgggaggccaggcacagtggctcacgcctgtaatcccagcactttgggaggctgaggcgggtggatcatgaggtcaggagatcaagaccatcctggctaacatggtgaaaccccgtctctactaaaaatacaaaaaattagctgggcatggtggcacatgcctttagtcccagctactcgggaggctgaggcaggagaatggcttgaacccgggaggcagagcttgcagtgagctgagatcatgccactgcattccggcctgggtgacagagcgagactccgtctgaaaaaaaaaaaaaaaaagtcagtgggaaaaacattctacctgatgatgaggttgctcggtctgtgcgctgagaagaagattccaagtggagatatagagatatccagagggtcactctgagacgatctggggtcaggagggaggtgcagccctctccttacaattcatcacctgaacaaagacactcgaccttctgcagagggtcagggctatcccctggttggtgacctttgcacagctcactgtgggacctgagagctggctaaaatctcagggaaaggagcatagccctaggccccaggccccaaccctattctcagtaggttatctcagatactctgcttgtccacagagctaagtccagtagtagcaaagccccaaatcaaagccagcaagaccacagtcacaggagataaggactctgtgaacctgacctgctccacaaatgacactggaatctccatccgttggttcttcaaaaaccagagtctcccgtcctcggagaggatgaagctgtcccagggcaacaccaccctcagcataaaccctgtcaagagggaggatgctgggacgtattggtgtgaggtcttcaacccaatcagtaagaaccaaagcgaccccatcatgctgaacgtaaactgtaagtgactcctcaccccttcctatatgtccctctaggattactctgtcaatggtgtgcaaaatggataaaactcacaggaggcagaatatcaatgaagagaccattatagcaaacagaattgcaaagtggttaagagctcagctcaggccgggcacagtggctcacgcctgtaatcccagcagtttgggaggccaaggcgggcggatcacgagggcaggagatcgagaccatcctggctaatatggtgaaaccccgtgtctactaaaaatacaaaaaaaaattagccgggcatggtggcgggcgcctgtagtcccagctactcgggaggctgaggcgggagaatggcgtgaacctgggaggcggagctttcagtgagccgagatggtgccactgcactccagtctaggcaacagagcaagactctgtctcaaaaaaaaaaaaaaaaaaagagctcaggctctgaatcaaatatacatatacttagttggttttttttggttggttgggtttttttgtttgttttgttgttttgagacagggtctcactctgtcacccaggctggagtgctgtggtgtgatcaaagctcactcccgcctcaatcccctgggttcaagcaatcctgccacctcagcctccagagtagctgggactacaggttgcaccaccatgcctggctaagtttttaagtttttttgtagagttggggtttcactgtgttgcccaggctggtctcaatctcctggtctcagcctcggcctcccaaagtgctgggattacaggaatgagccactctgcccaccccgtatttaactattctaagtacctctcatacagatggaagcatgcaatatttgtccttttgtgtctggcttacttcatttagcacaatgtcttcaagctccatctatgttgtagaatgtatcagaatttcattccttttggagactgaataatattatgctgtgtagatagatacatcacattttgcttatccactcatccatctatggacagttaggttgcttccaccttttggctattatgaataatgctattacaaacatgggtatacaaatatctgttcaaatccctgctttcagttcttttaaatagatactcagaagtggaattgctggatcaaatggtaatcctgtttaattttgaagaaccatcataccattttccacagtggctataccatttcacattcccaccagcaatgcactagagttccaatttctctacatcttcaaaaacatttgttgctttctggttttgttttgttttttataatggccatcctaatggttataaggtggtatatcattggagttttgatttgcacttccctaatgattagcaatatttagcatcttttcatgtgcttatttgccatttatcttctttggagaaatgtttattcaagtcctttgcccatgttttaattaggttgtttggggatttttggttgagttgcagtagttctttatatattttggatattaatcccttatcagatatatgattctcaaatattttctcccattctataagaagtcttttcacttttgtgataatgtgctttgatacacaaaagcttttaattttcattaagtccaatttctctacttcttctttcgttgcctatgcttttagtgtcatagccaagaaatcattgccaaattcaatgttccaaagttttcactctatcttccaagagctttatagttttagctcttacatttaggtcttttatgcattttgaattaatttttatatatggtgttacataaaggttcaatttcattcttttgcatggatatccagtttcttcaatgccatttgttgaaaagactatcctttccccactgaatgatcttggcacccttgtcaaaaaacatttggctatgtatgcaaacatttctttctgggctctatattttattccactggtttctatttctttttgccagtaccatactgttttgattactgtagcttttggattttgtttgtttgttttattgttgttgtttgggtttttttgttttgttttgtttttttgcttttctttgtagagatggcgtttcaccatgttgccaaggctggtctcaaactcctgagctcaagcaatccacccgcctccacctcccaaagtgctaagattacaggtgtgatgattaccatagctttgtaaaaaattttgaaaccaggaagtgtgagcccttcaactttgttctttttcaagattgctttggctatccatggtcccttcagagtctatataaattttagaatgaatttttctatttctgcaaaaaatattactggaattttgatagagattgcactgaatctgtagatcactttgggtagtactgtcatcttaacaatattaagtcttctaatccatgaaaatggggtgtcttttcaatttatgtcttatttaatttcttttggcaatgttttgtattttcagggtacaaatctttcacctctttggttaagtttatttctaagtatttttaaagctcttataaatagaatttttttcttaattttcctttgaattgttattagtatacaaaaatacaactgatttttgcatgtggattttgtatcctgccactttgctaaatttattattctaacagtttttttgtggaatctctagggttttctatatataagttagtgtattctgcaaacaggtataattttacttctttccaatctagatgctttttttttcttgcctaattgttctgtctaggtcttccaatactacattgaatagaaatggcaaaagcaggcatccttgtcttgttcttgatcttaaaggaaaagttttcaatctttcaccattgactatgatggtagctgggggttttcacatgtagcatttattatgttgagaatttccttctattcctagtttcagtgttttttagcatgaaagaatgttgaattttgtcaaatgcttttatcgactcattttcattactggttataggtctattcagattttctatttattcatgattctatcatggcaggttttgtgtttctaggaatttgttcatttcatccaggttatccaatttgttggcattcaattactcatagtactcttataatccttattatttctgcagaattagtagtaatgttttactttcatttctgactttagtaatttgaatcttctttctttcttagtcaatctaattaacagttgtcaattatagtgatcttttttgaagaacaacttttttttttcggtttgagacaggttctcactctgtcaccgaggctgatcatggctcaccacagcctcaacttcccgggttcaagcaatcctcctgcttcagcctcctgggtagctgaaactacagacaagcactaccacctccggctaatttttgtaattttttgtagagacagggtttcaccatcttgcccagctggtctcaaattcctgagctcaagtgatacacctgcctcagcctcccaaattgctgggattacagtcatacaccactgtacctggcctacagttataaatttctttcttgcacaagattcttaactactctgagcctcggattcctcaaccgaaaattgcactgtgaatgcctgctccatagtattgcacgggtttggggtttttgttttgtttttgagacagggtgtcactctgtcacccagactggagtgcagtggtgcaaacacagctcactgcagcctcaacctcctgggctcaagcaattccctcaccttagcctcctaagtagtacatactaccacatctggctaatttatttttatttttgttttcagagagacagaatctcaccatgttacccaggctggactcgaactcctgggctcaagcaatcctcccatctgtttcccaaagtgctgagattacaggtgtgagccaccacgcctggccccatagtgttattttaaagatttaatgtaataataaaccttcagcaaaacaccacacacagaggaaatgtttcataaatgttagctgctattactactactattatcattagccttgaaatcaggtagtcctagggtcaaatctcagatccacctctcactagccatctgactttaggtaagccttttaccactctaagcttccattttttcatgtttaaaatggaaataatgtctacctgacagcactattttatggatcaaataagatacatgtaaagcatttagcagcacagggcctggcacacaggaagtactccacaaaagtagctaacatagcattagtcaccagcctgagttgactggtgagggttaagccccaaatagttgcaacagatataaacaagaaataggctagacacagtggctcacacctgtaatcccaacatttgggaggccgaggctggaggatctcttgagcccaggaatccaagaccagcctaggcaatatagtggaaccctatctctacaaaaattatttttttttaattagccaggtgggtgggcgtggtggctcacgcctgtaatcccaacactttgggaggttgaggcaggcgggtcacctgaggtcgggagttcaagaccagcctgaccaggatggagaaaccccgtctctactaaaaatacaaaattagccaggcgtggtggcgcatgcctgtaatcccagcaattcaggaggctgaggtaggagaatcgcttgaacctgggaggcagaggttgcagtgagccgagatcacgccattgcactctagcctaggcaacaagagcaaaactcggtctcaaaaaaaaaaaaaagaaagaaaaaaattagccaggtgtggtggcatgtgcttatagtctcagctactgaggagactgaggtgggaggatcacttgatcccaagaggctacaatgagccatgattgtgccactgcactccagcctgggtgatagagtgagaacctgcctcaaaaaaaaaaaaaaaaaaaaagaagaagaagaaatagatgcaaaaggtattatttatatattatatatatatatatatatatatatggagggagaagcattatacaagaaacccactgggacatggctatgatcaaatatgggaaagggggaaaaaaggaggtaaagcaaagtctcaagcctggtatgttagtttccatctactgagatacagtgaagatgggattaaacatacgagataatttattggggaaaatgcctgtgagggaaagtaaggcgagagtgagaggaacctcagaccatgatgcagatctgattcctgtggaagagaaagagaggaaggaagttttagattgaagtgcagtttttgtttgtttgttttttgagacagagtctcactctgttgcccaggcttgagtgcagtagtgtgatctcggctcactgaaacctctgccccccgggttcaagcgattctcctgcctcagcctctcaagtagctgggattataggcacctgccaccgcacccagctaaattttgtatttttagtagagatagggtttcaccatcttggccaggctggtcttgaactcctgacctcgtgatccacccgcctcagcctcccaaagttctgggattacaggcgtcagccaccgcgcccggcctgcagtgcagttctaagagcatttctgcaaggctgacagggagtcctccagccattcacacttcagaataaaacagtcacacaaaactgggctagctttcatacccctgctgggagcctgtgggaagccagttctctatgcaaaagaggtggtgaattcagaatgcaccaactgccacaactgagacactgagaaaaagatgcaaccacgaaaaaggtggaaagttctaatcacatacaaaatagcaatcagcctttctcatatttcaaagccttaaaaatggctgagcgcagaaaagccagggtggaattggcagaagagagatcatcaacctagaaacatggtgactggggttgggcgcagtggctcacgcctataatccaagcactttgggaggccgaggcaggcggatcatgaggtcaggagttcaagaccagtctgaccaatatggtgaaaccccgtctctactaaaaaaatacagaaattagccaggtgtggtggcacgtgcctgtagtccagcctgaggcaggagaatcgcttgaacctgggaggcggaggttgcagtgagccaagatcatgctactgcactccagcctgagagacagagcaagactctgtctcaaaaaaaaaaaagaaaagaaaaaaagaaacatggtgattgaaaaaaaaaaattgcaaggatatagttagctaatcaccttccagcaaccttcccacaacgaaactgtattccttgaaggaacaattagaaactacttcattctgagagttgtttcccagcccccattgtaaaataatttcactttcatttcttctcctcttttctctccatgacagataatgctctaccacaagaaaatggcctctcacctggggccattgctggcattgtgattggagtagtggccctggttgctctgatagcagtagccctggcatgttttctgcatttcgggaagaccggcaggtatgatggcctttcctcttgttctgtttcctccaaggctgactgccatgcttgggagagggaaagaattctttgcctgtctctgggcctggatctcatactcctcccactaaactcctgcttctcggcactaattcccacaggtttcctcttccctggtcttcgtgctccctgtctcccattatctcttggacatgggtattccaatccccatctaatctagaggaagagactcaagtatgttcctctgtcccctagtcagggaaagcaaggtctaagaaggaaaacaaatgaaaaaatgaaagaagcagcaggagaaagcaagtcatgtgctctgttgaccacattggaagaggagggagaaatagcataggaagagaacctaagagaaagcaaaaacaaccaaagtcctcttgaacaataaatagagaaaaaaaaaaaagtatctaccccggaaaacaaaatgggaaaggttttaaggatagaagtaggcacagaagcagctgataaagaatgaaatgaaatgtgaacatccagcaaacaggaaaagagtaaacactagaagggattgtagttagactgaagaacgaggccctcagaagaaaggcagtatgaacatcaaggactctaaggaattacctgctcacagtgtccttcctaacttacggaacaaagatcctgtgcttgggaatagcagtcacagtttctgatatttatttagggcaagcgaccagcgtgatctcacagagcacaaaccctcagtctccaaccacagtaagtaaagccacttaccccagtgagaactggtatgttccaccacgtgccctcccctggcagggaatcctggattcccaaaccactccctcccttctgaattttcacagaaaggatctctatttcccaaccctaaggtggcataggtcttcccacccttcctagccacaggagtcccctgagacacatctgaggagagaggctcactctgcctaggccaggcaggcctgaggaagatcccatgtttccaggagccatttcctcagccttactccttccgcctcctgcctctattacggatgtgggcactctcccttggtgagactttccttatcttgtgggtgctgtgggtgctacaagtctcaatgcccctccttgccactggagcatgttgctgagaaacacatctgggcaaaaatcaaggccttgtgaactggtagaactcttcacaagtggattgtggcctcctgtggttctgcccctgccccctctctggtactaacatgctgggtctggaccatacactctgagggaagtaaattccttaactgatccttaaactccccaccctccaactgccacctccttcagctagaatcacctgaagtcagctttgcatttccatggatcgctaactcttcttttgcttctccagctcaggaccactccaatgacccacctaacaaggtaagcatagccggttttcatgggcttattttctcatggaaatgattctgtgtagaattgattattcatgaagacacaatgtaacatcaagtttgggttaatgttcctcagtgcaacaacaaagacgtatttgtaatcactcccatgagtctactttgcagcaagaacatgcattttggaattattcccatcctgtgtctgaatactggatgtgactcttagtagctctgtgacccttgtcaagtaacttaacctctttgatcatcagctttgtcatctgtaaaatgggcattctgcctacttcaaagagaagttgaagggattaaacgagataacctacaaagagcacccagcacaatggcctaaaaaaggaaggcactgaatcattctcactcccctaccttcagtctgatcctgctcttattgtcaaaaggataatttcaattttaatagatctgagatcctgttttttaataataattttatagaatttttcattttatggccaggcacagtggctcatgcctgtaatcccagcactttgggaggccaaggcaggtgaaacacaaggtcaggagatcgagaccattctggctaacatggtgaaaccccagctctactaaaaatacaaaaaaattagccagctgtggtggcgggcgcctgtagtcccagctacttgggaggctgaggcaggagaatggcgtgaacccaggaggtggagtttgcagtgagccaagattgcgccattgcgctccagcctgggcgacagagggaaactctgtctcaaaaaaaaaagaagttttcattttaccttttcaatagagcaaacatacatactgaaaagtgctaaatcataattatactttcacaatgtatgaactttcacaagttgaacacacccaggtaagcagcacccaaatcatgaaatactacatgacctccccttaaaaagagacccttccagccaggtgcagtggctcacacctgtaatcccagcactctgggaggccaaggcaggtggatcactagaagtcaggagttctaaaccagcctggccaacatagtgaaaccttgttctactaaaaatacaaaaaattagccgggcgtggtagtggatgcctgtaatcccagctacttgggaggctgagacaggagcatcgcttgaacccgggaggcagagcttgcagtgagccgagatcgtgccattgcactccagcctgggcgacagagcgagactccgtcgcaaaaaaaaaaaactctaccagtcacttccctccaaagaggagtaaccactatcctgacttctaatgctccagattagtattgcttggttttgttcctatctaaaggagaaataaaacatatccttatatgtggcttcttcaacattgctttgtgagactcatccatattgtatgtatttgtggtttgctggttctcattgctgcattatcctatcccattgcatatataccataatttctctcttctaatgatcattcatcaggaggtcagcaagcagagaatgggtaacaacaaaagcccttctccagagctaaaatttcaaaatggtaacagcttgtggtgctgaatcacaccaggcaaggtgaggccctgccctgtgtcactgacttaactgatcattatttgtgcttttcagatgaatgaagttacttattctaccctgaactttgaagcccagcaacccacacaaccaacttcagcctccccatccctaacagccacagaaataatttattcagaagtaaaaaagcagtaatgaaacctgtcctgctcactgcagtgctgatgtatttcaagtctctcaccctcatcactaggagattcctttcccctgtaggggtagaggggtggggacagaaacaactttctcctactcttccttcctaataggcatctccaggctgcctggtcactgcccctctctcagtgtcaatagatgaaagtacattgggagtctgtaggaaacccaaccttcttgtcattgaaatttggcaaagctgactttgggaaagagggaccagaacttcccctcccttccccttttcccaacctggacttgttttaaacttgcctgttcagagcactcattccttcccacccccagtcctgtcctatcactctaattcggatttgccatagccttgaggttatgtccttttccattaagtacatgtgccaggaaacaagagagagagaaagtaaaggcagtaatgccttctcctatttctccaaagccttgtgtgaactcaccaaacacaagaaaatcaaatatataaccaatagtgaaatgccacacctttgtccactgtcagggttgtctacctgtaggatcagggtctaagcaccttggtgcttagctagaataccacctaatccttctggcaagcctgtcttcagagaacccactagaagcaactaggaaaatcacttgccaaaatccaaggcaattcctgatggaaaatgcaaaagcacatatatgttttaatatctttatgggctctgttcaaggcagtgctgagagggaggggttatagcttcaggagggaaccagcttctgataaacacaatctgctaggaacttgggaaaggaatcagagagctgcccttcagcgattatttaaattattgttaaagaatacacaatttggggtattgggatttttctccttttctctgagacattccaccattttaatttttgtaactgcttatttatgtgaaaagggttatttttacttagcttagctatgtcagccaatccgattgccttaggtgaaagaaaccaccgaaatccctcaggtcccttggtcaggagcctctcaagattttttttgtcagaggctccaaatagaaaataagaaaaggttttcttcattcatggctagagctagatttaactcagtttctaggcacctcagaccaatcatcaactaccattctattccatgtttgcacctgtgcattttctgtttgcccccattcactttgtcaggaaaccttggcctctgctaaggtgtatttggtccttgagaagtgggagcaccctacagggacactatcactcatgctggtggcattgtttacagctagaaagctgcactggtgctaatgccccttggggaaatggggctgtgaggaggaggattataacttaggcctagcctcttttaacagcctctgaaatttatcttttcttctatggggtctataaatgtatcttataataaaaaggaaggacaggaggaagacaggcaaatgtacttctcacccagtcttctacacagatggaatctctttggggctaagagaaaggttttattctatattgcttacctgatctcatgttaggcctaagaggctttctccaggaggattagcttggagttctctatactcaggtacctctttcagggttttctaaccctgacacggactgtgcatactttccctcatccatgctgtgctgtgttatttaatttttcctggctaagatcatgtctgaattatgtatgaaaattattctatgtttttataataaaaataatatatcagacatcg

SEQ ID NO: 69 - DNA, 9966 bp, Homo sapiens
gtggctgcatttttaccttaaactctgattgaatgtgtgctagactacctttagttacaaatccacaaatagaagtgaagtatttatcaaagtactatataaatgcttttcaactatttgaagccacctgtcaagtgattgaatcagaaatgttcaaaactggtttgagtatgtgtgtgtgttggggatgagggtagaaaactaattctacattatgcaaagacttataaaagtgatgaggaaaatctttaaaaagaaaagacaattaaattccttgaggtatatagcctgacaacaatttattttttggatcatttgacacagtgtatgtaaaagtgcattgggaattgtgccattttatacaaatatgaaatagcactacttgtactgctttgtacaacagcgtgcatatcttactatcttagagactttctgaaacacttatcttggaattagtttcaacaaagacgaaatgtaataataggaaggtgaaaattatctctagagcttttaaagttaggatagatttcaagaaagattaaatctggaactatatgaatagcataaaaattaaaaatattaagagaattgatactttgtaataaagtataattatacttttataagcgtaatgaacataagtgtttgttgctttatgcatttgtttctacacatgaagtctttattttctgaaggaatcccaatggccctggctataacactacaatcattttcttattttacaattaattaaaggttaaaacatttcacattgagcttgctactttgtttgtttaaagaaaagtaaatttcctcttatcttacattttgaagttgctcactataaacttatataaattaggcataatgacaattaagtaagaacttcaagccctattcatcccatggccgtcatactgtgacgtctttcagagcactttgtgattgctcagtcctaagtataagccctataaaatgatgggctttgaaatgctggtcagggtagagtgagaagcaccagcaggcagtaacagccaacccttagccattgctaagggcagagaactggtggagcctttctcttactcccaggacttcagcacctaagacagctccaaaacaaaccagaacagtcagctccgggggagcacgactgggcgaggtaagtgaaaactttacctttcctcttctttttccctcctgcctctggaacttttctcacaaaataatgaatttttctctcttgaaaagaatttgatagtgctttgcttttgcaacagcaaaaaacaagtttctcaagtcacctggtaaggatagaaatacttcaatttctctcatatggatagattttctgaattcttttgtttgtaagatgctttaccctgcttgctcttttactgaatactgatttttacaaataattcattcaagtaaagtttacttgtatgtagatttttgactgaaaatttcagtgggaacatttgcttttgaaattttcaacttatttttaaagtgctttttttttcctatttcgtatgttggttaagtgaatctaagatgcatttattttttccttaagtttaaattccataatttttataggcagcaagagaaacagaccttactcctaggcttttaatctagaaactagaaatgaaatgtgtaagttgattaaatgcaagaaatgcaagctttgcttttaatatatattttcctcttatggaaaaatttatttcaatgacaacatatgattcagtaatattttgagtattaatattcactactgagttaagaagttcaaatccaggtgtaaggaaataagtttccgtaatatctacaattgaaagaggaaaaagtaatgtatatacaaaatcttttttaaaattatatgtatatatacacattatatttatacatttgcacacacacgagcagaataattattaaatagatgatactctagtcttatattagtcagatactgaaattttaaagcagaagaaaatcaatgtcttgaagctgtttccttcgtcaaaaaatacactaagcttgagtggtacatccctgttatgaaaagattgtccccagggttatttccagcactatagaagtatggcattcaatagatactggggccaaccatgtgcccagacagcaggtgaaaaggattctaatttttattcaagcacctgtcactgagagaaatactgatttttgaatgtatcatcttgcaatttaactctttctacaagatgaaaattactctttacaaactctgcaagagccattgaaaattactgctagacaatcagaattaccttgctggtgacatctttggctggaagaactgaggtgattctctctctttagaggcacagaaatggacaccagaaataaggcccagctccttgtgctcctgactcttctcagtgtgctcttctcacagacttcggcatggcctctttacagggcaccttctgctctcaggtaagttccctttcaattcaaacatctgaacattccttcctcatctaaatgggaatttcctatacattttgttggacaactaaatagtataaattatgtattatgtatttaaatttttccttgatgtgttgagtgagaggtgtttgtcaacatcaggtcattctgagtcctggaattcactttcagggcatgagagacactgtcagttattagttttatgggctgagtggatcacattcccaaacatggtgaaaggaggctttcactttctttttattcaaaaccatctttagataaataataagcttttatccattgttatctcaagtcagttcaatttctggtggaaaaaagctgtttagttgccaaccacatttgagtttattttcaagattaatcagtaaataatcataagactagtagttgattagtgaaacatgtataaaatcatgttgcacagaaatctatctaggcagagtcaatttgccaatattaaatatggggtaattgatctattgagatacactcccccaataggaaaattttgatatactttgtttggaccataaatccttagttttattgttctatatgttatattatatattccaaatccataaagtataacacaactcttatttaaaactttattaatgtatgctaaagaagtaaacaataaatgaaaactatattagcttgaattttcctttcagtttacgggcaccactgtatctccaaaggaaaaataataattgggttggtttccttctttgcttattaggtcattcttgattttttgcttaaggtagacttatgctcaacagagagaataacctcttagctattagtgttctctgtgaaatctgtttaaatacagctcctgcgttgctttgataactaaacaaaatggttctatctgaatagttctaccacagcagatgaacaatcacaagaatgtggacatttgtgttgattgctaagcttcagacccacagaggactagttgctagtgactcccaactcccaaatcactgaaagatacacaagtgtccaggagctgacacgctccttggatgtttgccctaacagtgaaaatctgcacacacaaaattataagagttgccggtgattgaaatatgcatgcatccataaatatagtcatattccatatatgcatttgactattcttagtctttcagtgtaacattgtacatcccttattaaagttgtgttaatacataagattagaaaaaagaaggccccataaaacttattgaattcaaattcatcttcatagatgagctatccatctatggagacattctttgaactctgtcaatacagagaaatatataatgccaaagtaaatatttgaagcaaagcttgggggtcgagagagagagaagcagttaatactctgttcttcagagatgtttggaacaggtaatactgaacatcaccaaatccataaattgttatcagttctcattcaatattagttttttgcaagtttctattttgcataaaatatttctacatacgaaatttgactttgcaaagtgaagatattcttggcatagtaaattacaccaaagaagtatagtttgcttaatgctctgataagattgaattaagtagctcttgtgttttgtatattcagcttataaaagtcatatggcatctactttataggataataggaatttcctatttatactctcattaactatatgagccattaagtcaaattatgctattctcatattatgactgggtaatacttcccaagagtctaagtatcttattttaaatggttgcggaaccatacacactgtcttctgaaaaaagaatgtattattctcgtgtaactttccccatcaggttgggtgacagaataccctttgagggagcaaatgaacctgatcaagtttcattaaaagaagacattgacatgttgcaaaatgcattagctgaaaatgacacaccctattatgatgtatccaggtgagtttatttttataaaactatccaatgagttttattttagaaaatgtgtttaagaactataaacgtgcttattttatctcaccatgaagctattccgatagcaaaacactagaggtttctatgtgtcatggcttcattcatcctgatttactgcagatcttacagctgtacataattttcatactgaaaggttgtaacaagccaggatgaacacaccattcacttccattctgttgcacataattccaacatcacagattgtaccaattctgataaaagtacagcatttagcattccaatgatggaagagttgccaaggagttttgtctctatataaagaaaagatacctgatagagctgttcattcatagagctgtttgtctagagcatcatttcaagtacagaccaagtagctctatagtacttggtacagacaaagtataaaaggtgcttcatttgaaagagaaaaggtgggatgataggccttaatgccttctctatcttaagagattttgtttccaaatattttggaaaaagaaaaaaaaaggtgtactggggtttatgaactttccaaaatcagaatattttcccattgtgaatgtctttattcagtggggcagacacaaagcaccatgtacaaatagcagctaatttaaatagatcatatttttacaccaatatttcttagaaagaaatagttataaagattcaaccatggaggaatattgaaatgtgctcctagaaatgcctgtttctttaatttttcagtgtcttgggctagaaatatagggtatatcttgatataagtgactagaagatctcttttgttagggtgttaagaaatctccttttgaactttagttttaatgagaagctttcataataagcccataatttttttgttatttaataagccataataatattctagaaagccatttacaaaataatagctatttttttcttccttgttttagaaatgccaggcatgctgatggagttttcaccagtgacttcagtaaactcttgggtcaactttctgccaaaaagtaccttgagtctcttatgggaaaacgtgttaggtaaagagaatttattatttttataaaatatgttatcattattcaatctgaatattgtattttcactcttaacaagttatttactttgtttgaaattgaaaactcgttgataatgtttaatttagttaaatgaaataacttgtattcttcaataacatctatcaagcccatggactaagactttttcataatatcatattcattgactccagacacacatttttctcaagtagcaatcatttagcaatctgcaatcaaattgaacaagactcagtaaaacaatcaaaaagagatagtacagactgaggtaaattttaaggtcaaacagaatattctttttacttcctgctcaaattaaatggagaattccaaatggccaacagtcaaatatttagatgacgttgctcagggtagcatagcttctaaagaagtaattatgttttttttaaaaaaaaaaaaaatttctcccaatggcagagcacaacttcagctattcccaaatttttatttttggatgaattatttgctcagctgtacagaatgtgtcataaaacagtcccaggccatgccaaaatatggcagatgattccttgctttccttcatccttaggtttagttgtatttttcttttagtctttttatgatagaaaattagttgggtgggaattgctttttatgtggctccaagaaacctggaacatgtgtgtatttatcatttcttgtgaaaactctttgatttccttttcctcatgttccttagcagtaacatctcagaagaccctgtaccagtcaaacgtcactcagatgcagtcttcactgacaactatacccgccttagaaaacaaatggctgtaaagaaatatttgaactcaattctgaatggaaagaggaggtaaagaaaaagagaacttgctaaaatgaggaatcatgactgactttcaaaatagaagctgcacatggagacctctctatctcacttatctagctatactacgtgaagcagtgattttcaaccttggctgacattagactaccccgcagaactttaaaaatacagatgtctgggccttctcccaaaccaattgccaggaaatcggtgtcttcggtggtgtggccctagacatacatttcttttaagagttccccagttgactttactatgctgccagtgttaaaaatgatgactatacagacatctagtctgaatctaagagcaagtttcatcaaaagtgatgatttttaaaacatgtaaagcatagtcaattgcaatttggtaacacatggaactcacttcgtgtgcatattcactactgttatttaatcaaattaaaccattaggtattttgtatatttagattctgtaaaatctatatctctctatggtgtgtaaatattggacacaatacataaacagtgtagtgttctgtctttttattccaattgtttttgtttaagtgatgagtattaaggataattctgtttgggtgtgatcagacaagatgacctctttgcccactagatgataattctgtgagaataattttagaaactctaagattgatgaataattcataggtactaacaaacctcaaagataattgtttagcctccccatacactttcagagcacagagaacagcacattcattatgtcataatagtttctttagaccctttctcatctgagagccttaatatgtacaatgtttttctggtctgcagcagtgagggagaatctcccgactttccagaagagttagaaaaatgatgaaaaagacctttggagcaaagctgatgacaacttcccagtggtgggtatattcgtgcattccttctgtattcttatggctgtctctgattatataagtagctaagagtcacttagtaagaaacatcttagggttaaatagtttctcatcatgagacctcatccaagacagacacttctacaacagtggaccccaacccagtaaacagcttagaatgattcatgaaatttttttgatcttgtaaaagagagcactcacaataagcaaacgttttgagatctgaatagtgttcctggcttacttggggttatttctacctttgtatcaagataaaaaaacagaggaggctgactcacactgacaagaaaaatgggctttccttttgaggatcgacccatgctgcttttattaattgaaggtttagtctcacaattgactgttagctcctcaattaagtatagggaaatagcaccaaattagagcatggcccattactatgaaaatatcaaggcattctgggtctaactatattccttgaaacatggcaaacttcatagagcaaaagttaaatttagcttgttttacctgtaagtttgttttacctatatgactctaatagcattctctgccaacattttttttgagcagaaaaaacatggatagactttttttctttgtgaagtaataagcttgctatcaaaattgattttatataaatgtgggttcaagacatatttctttcctgagttacattacattaatattcacattcgctcataaaaaatctataatactgggcaagtgcttaaagaaatttcatgctgtcaccatatcaaaggttagcagattttaaagggctatggagtaaaatatgtttggctttgtgagccatctattttctgttagagtgacttaactctgctatggtagcacaaaagcagccacagttagatgtaaaacgaataggagtgactgtgttccaataaaactttattcataaaacctgaaggtgagccagattccaatccctaactaggttaaggagattaaattcacccatgctcaaactaaaggcaattcatggccttacctcagttcctgatggggttatctaaggttttcaacagtcatcaagagtggacatggtgtctgggaagatacctgcttaattgactgcttttgtccactaattacccttagacctctaagagaaagcagaggcaggagtgtggcccacatcaactctttatcttttatagacatctcagagaaacaagtccctttgctcaaagaagaaagttaattacatatagcttttctaagagtgtttataagaaggcttctccatcaaattaagaaacacggtaggcactaaaatataaaggagaattgattaatcacactgtgctttgtaaatggtaagatcacttatgagattccatcctccattcttttcttttttaaatgggtggctttggacaaattctttgaagaggaaatcatgtgggtcatccattagtgaaaattacaagtgaatcattaataatggttagttagacgtcttttcacattccagttcctctctgataatcagtcctctagaagctgctctcttggtatgtcccaggacatgatcccctgccacaggctgttaacaagggacaaagagaaataagtgtttatcagataagtaaatcagtgaatgaaactaagatgctagaaataaaatatattttatgcctaaagcaacaattttttctttttcagaattcttgaaggaaaatgatacgcaacataattaaattttgagttctacataagtaattcaagaaaacaacttcaatatccaaaccaaataaaaatattgtgttgtgaatgttgtgatgtattctagctaatgtaataactgtgaagtttacattgtaaatagtatttgagagttctaaattttgtctttaactcataaaaagcctgcaatttcatatgctgtatatcctttctaacaaaaaaatatatttaatgataagtaaatgctaggttaattccaattatatgagacgtttttggaagagtagtaatagagcaaaattgatgtgtttatttatagagtgtacttaactattcaggagagtagaacagataatcagtgtgtctaaatttgaatgttaagcagatggaatgctgtgttaaataaacctcaaaatgtctaagatagtaacaatgaagataaaaagacattcttccaaaaagattttcagaaaatattatgtgtttccatattttataggcaacctttatttttaatggtgttttaaaaaatctcaaatttggattgctaatcaccaaaggctctctcctgatagtctttcagttaaggagaacgacccctgcttctgacactgaaacttccctttctgcttgtgttaagtatgtgtaaaatgtgaagtgaatgaaacactcagttgttcaataataaatatttttgccataatgactcagaatattgctttggtcatatgagcttccttctgtgaaagtacatttggagacacaactatttttccaaaataattttaagaaatcaaagagagaaaataaagaccttgcttatgattgcagat

SEQ ID NO: 70 - DNA, 354592 bp, Homo sapiens
ggctcacaaatgaactgctttttattcaaagaaccatgctgtctgttttcgcgtgggtgggtgtgtaaccggggcgggcgctatgttggttttgttccctgcaaggttgacacaggcaatggcgacttgcggccacactggggcagcctctcctcggctggcagccgggccgggcggctcgctcccgggagctgacaatgtagccaagtcctgctcgtcggggccgcaaagaatttaaaggggtctagaaacatccatcttttccccttttcacagttaacagcgagctcagggctctcggtaaaaagaccaccgggaggaagaaacgctcagggcgtttttgttattgttcgcaaaatcctctatcgcccccaaacgtccagcccgccccctccctaaagcggagggaaaccgggagaggagggagggtcggcggcgccggccaagcgcgccagtacacgcccctgcggatccgccccgcggccgggtgacccccgccgcgccgcgctggaggccccgggccggggtgggcgtggggctgaactccgccacccccgcagcccgcggcccgctcgccagcccggcctgtgattggcttggggggcgcgtgtgcccgccccggcgaacggggagggtaccctcgcggcgccggtgggaggaggcggaggagggggcggagagagcgggggcccggacggcgctagcgaggaggcgggcgagccgggtccccgggagcgcagaggaggctcggaggggggcggagagcggcggggcgggagggaggcgcgggtcgcggggagggaaagcccggccgggtctgcgccgccgccgcgcgcagtgagaggcgccggggctgccgcccggtgctcggcgcgctctcgggagccgcccgcccgctggtcccgcagccttccgggaggaagcggtgccggcagcgtccagggcgcgctctcgggcaccctcacctgccggcgcccggccgcttacccggcagggcgtgcgcagggtagggtgcgggaccggggggacctggaggcagaggggagaaccggccgtccgcgccgcagcacagccgctgggagcgcctcagaccccgcgcggggcgccggctccatggcgaccgggctcggggagccggtctatggactttccgaagacgaggtgagtggcacccccttcctgctcgggactccccggggagttcctatcccgcgccggcagggggaggggaaaggggccgtccccggggtgctcgtgcccagcgtctgcaggggagccccaaagcgggagcgccccggagcgggatccaggggagcttgggtccttccgcaccccccaccctccgcaagccgagctcattgtttgtaaataaagcggcgcgacgcccttggagctgggggttcactccgcagctcctcgctttcgggaggagagggagggggcatgcgtgcctctcttccctcttcctctccaagcagcgtctcccggggctgttgggcaactttccgcctctcgcccctgcagcccgggagtccatgatgcatgtcacgtctgggtcgcgcggctggagacccgggactgcggagaagccggatcgtttccccctggaactttctctctcatgattgtgtggatcagcaggcgctcagaagcctgtgcgtgcttatcccggcgggaatgggggacacgctgcgtgtgtccctcccctcgttttgcaaagtctacggccaggattgtggatttcggagcctcggtgggggaggtgttcaaggctggtggcaggtgctcctggaaacttggggaggaagcttgcagccctgccattttttcctcccgaggattcaaagcccggcacctccagggtgggtggggagaggaaagcttaattgatctcttttattaataaagcgactgaataagccacgcctcccaggcggtcggtttcactggaaagggctttgtttttaccttcattctctcttccgtgtctcccactccccccttttgaaacaatcctgctaaatcactgcctagtcctctctcgaccagccacgctcggctcttattggtatgttgctctgccaaaaaggggggtgggacgcttgtcgcgggcgcggcgtgacaggcaggctggatggagcaggtaggagtggtttgccatctggcggggtgcgcgctcaggtctggctcccctttcgagaggtgaattttacaacccaagaagcattactcagcagggaggtatttcctatcctggttgtgcatttcatgaaaagttgatgcctggaaattcaggcgttctcgatttctctttcttcccctccctcctttcttttcagaggttccctctttctctcgtgttgggggtggggttggaagaaaggctattatctgagacaggctcgcgttatggctccgctttctgcggctctcctaccctggcatggtgtgtgtgtgtgcctgtgtgctacgtaagtgtggaatgaaaggtattttggggtgggaagggtgtttagggtatgaatttttttcttagcggtgctaggcaaagcttgatgtatttatttgatcaaagaatgatcacagtgcaaataatgtgtgatttgtgtgtttattttgcctcgctgtgcttttgtaaaataatttcccgttttgtgtaactacctggggataggtgacagtagcattgtttcattgacccggggggcttctcctctccctcctggcttctctctttgaggagctttcccttgcatcctctacttctccatttaattagtggcagtagagggcaggccctgagttgcagagacgcagacattcctaaacaaaggggctgcttgggttgacgtattgtggggggtgggggtgaggacagctgcatttcatcctaggttcttttaaaaaatgttttaataacatgattatttgtaaaaactcccccgaaaaaacgattttaagagtgttttgggaagtgcagctggataaatgaaacacgttaatgtcactgttgtttgtgctttatttacattggcagtgagtgtcagaatctacctagagcacatcttgccacttttgtccacaggagtcactactaatcatcataactgatgtctagtgtgaaagtgaagcttggaatgtaaacagagtccgagtgtgtgttggcatgtgactggattcactcctgcatgttgctagaagggaatttggggctgtataggaaatagcaagaggtgatgaagacaccttttattatctatttattgccatgtcgctggtagtatttagttccacacacattgtatttcacaagatgagtctcagccgtcttcctttttcaactttctcctaccagtgaaaaaataagccagggcagttctgatgacttcacatttcattggtatttgtttttcatgggcagtttcatgctgtcacgttgcccttcagagaatcagggaatgccttcgtagaatattaacgacaaattgttgaatttgcacagcttgttttgtctccctgaattagtatgtgtaagaaaaaccaatggaagattttagcaggctctgaaagtagaatgcccgctgaagcaaacggcagggttgttcttccaaggcgtattaaatatgggtacacttagtttgcagacttggtgtgctgcagaatatcacatatgaagatattttgaccgctatttagaagagtgacctcataaatcttttagcaaagtagacacacatacctaccacatttcttaaaagtagattcgtattttgatttgagattgttgaaaagcatggtatgtttggagtgcacttagttatgtcccatctcataaagactgttgagctctctgcactgctgatgatgaagcattgcatgaacccagaaaacggggatgccaaagcacagggcttaggtgctgttccttgcgtcatcagcagaggtctgtccactttgtagaaggtaaggggttgagatgtgggctttgcttgtgtgaatgtatgtgctgtttaattttttctgtgtgtttcgggcggaggtttctctggtgagttataattcatatttaccctgatttaagtcatgtcactttaggtagccagattcaaaaccatcagatgaaggacttttggtgttagagggattagcagtttaacaaaacttctgattcatggcccaagatcagatttggtttggaatcagaacactttggactagtttctgcatctggcttgagtccttgtggatttcttgttttatttctttatttttggcaatctgtagtgcattttggcatagtttacttatgaatgttaccgctaactttctgaaatcttttattccattttagaaaggtatcatttattgaaaagatttttctactgaacaaaatactgggattgaatggcagcttcttatcacattagatatgacattaagtaatttcgttagtagttaaaatgaagcaaatggcatagaaatgaaggccaggctgacataggataaatggcaccttctctccttatcctgtacaaacacggatagttggctacttttgaatgcctcttctataccaatggtaaaaatccggcttaattggggccacattctagcctagtcacaatcagtggcttgcattatgtcctttgagatgtggcagatctgcttataggtgccagtcaccacggctccctgctggcttgggggtctttctactcatttacatataattatctacttcttaatcaaccattaaggttaacttttggcatggatcctgtatgcttttcagtttaagatgctgtcacttttaagatgcgccatgagagcaaagtgctaagccttgtgcacatactatgtcatttagttctcatgagaactgtgtgaggtaggctgtgatttacagatgaggaatgaaagctcaaagaggttacgtgacctgcataaggacacaaaacaagttaagttatggagccagctattttgaatagaaaggcctagtttttaacatgctgaatatcctccccttctgacaaatgccttgaaaggtcttactatctagattatttaagataatgtaagagaaataaacaccactggttgcaaactgatggctgctgggcccgatttgaccaggaaccctgcttaatgtggtctctagagtgttttaaagcttggaaatttcatgaaaatggtaaaaatctggcttaattggggccacattctaacctagttacagtcagtggctggcattatgtcctttgagatgtggcagctagttgtgctatggttgcagtcaccactactttctgttgtcttaggggtctttctacttgtttacatataattatccacttcataacaaacctttaaggctaacctttggcgtggatgccatatttctttcactttagtgtgctgtcacttttaagatatgccattatttcatgtaccacgaagaaaaaattgctgtcaagttatgacatactgtccatcttatgaagcatccttatttcagagaagttgaaatatgagaaaaaggatattttagaattgatgaattacagtgactagaaacctgggaaaactccatgccatcagtttcaatatccccaatcattcagtacttttaagtcaacgagtagtcagatttctgcttttctgtgtttgaggaaagtgctagaaaaagagaagtgctcttaaataggcattagcacagaaggaactgggggcctagatcatagccaactggatggccgtctgtaagtgattaagaatagttgttagtttttaaaaagtggcctgtgtgtattttcaagagattacttgggaaaccctatgtgccatctttgcagctgtgcaaaacggtgaggacaagattgctttcaaaaattgtggtttagattttgcttggatctcaaggtgaatgctgacaggccgttttctgaagagagagaaggcttgcccagtcatgccaagtccaagtgcctgtgtcgggcctagatgctggatggtagactgtatacccaggacatataggtaatgtttgagaaacaaatgttaaaaggacctagttttcatggtgacatttaaaatcagtttttaaaattcatgaatataacatgttgttttaaaatttgattatagggaccgggtgcagtgatcactcctgtaatcctagcattttgggaggccgaggcaggagaatcacttgagttcaggagtttgaggccaggctgggcaacgtggtgaaaccccgtctctacaaaaaatagaaaagttagccaaacatggcggcacgtgcctgtagtcccagctacttgggaggctgaggtggaaggatcacttaaacctggaggcagaggttgcagtgagccaagatcatgccactgcactctagcctgggcgacagagtgagaccctgtctccaaaaaaaaaaaaaaaaaaaaaaagactaatgaatagaatttattttcttcaatgatgtagtgtctgtggaatttgtagacattgacatttgaattttcattatatttagttttattaaatcagaatgttatgattgtttatttcattattgaacatcagtttccttaatttaaggaataaaaataattttgctcaggccagacatagtggctcacatctgtaatcccagcacgttggaggccaaggctggtggatcacttgaggtcaggagtttgagaccagcccagccaacatggtgaaaccctgtctctacaaaataaataaataaataaatgaaaaaaaaatcagctgggtgtggtggtggacacctgtaatcccagctactctggaggctgaggcaggagaatagcttgaaccctgaaggcagagattgcagtgagccgagatcgcaccactgcactccagactgggtgacagagtgagactctgtcacaataataacaggctggggcagtggctcatgcccgtaatcccagcactttgggaggccgaggctggaggatcacctgaggtcaggagtttgagaccagcctggccaacatggtgaaactccgtctttactaaaaatacaaaaattagctgggcttggtggcaggcaactgtaatcccagttactcgggaggctgaggcaggagaattgcttgaacctgggaggcagaggttgcagtgagacaagttcgggccattgtgctccagcctgggcaacaagagcaaaactaaaaataaaaaataaaaaaagaatagtaatagttttgcttaaagggtgaggacagtgacaaatggtgatcctcagatgactgtagtttctttaccattacagaatgcaattcaaatgaaaaccattgcatggtactcaggcatttcttcaatgcagtgtgtgcccacatcaccaggaagcttacttgggaaagtttgttttgggattctggagtacctcaatatatctggtatattttcccaagaaaagtgaataatcttggggggccgaggtggacagattgcttgagcccaggagtttgacaccagcctgggcaatgtggtgaaaccccacctctacaaaaaatacaaaaacttagttgcgtgttgtggcacgcacctgtggtcctggctgctggggaggctgaggtgggaggatggcttgagcctgggaggttgaggctgcagtgagccatgatcatgccactgcactccagcctgggtgacagagcaagacactgtctcagaaaacaaaggcaaacaaacaaagatcaccccaaagaagaactcccaacatattaaaagtcattgagttttgtacccttcaaatggatgaattgtgttgtgtatgaattacatctgaataaaactgtttaaaaatattaagaatgattgagtgtgacattattgcagcagtacattggagtttctgctaaattacttttgcattcatttcaaaaggaagcaactatgcccattgctaatttaataacctgtttgcttgtgcggtgtttaaaatggcatcatgaaaacatggcaatgtgtgatagattaagagccaattaaattttttattttgagttacaagatctgcattaaacagattttattgttgcccttgaatttccagtcttagatgagtagcagcagtgaaaaaaagagatcctaacttaagagttttcaagctttttgatgttgcaggtatttgaataagtgggtctgtcttactgaaatatttgttaattagcgataaagcaaactatatgttgatcttttggtagtccatgctaaggaggattagaataatatataaataatataatggtaataagtatcagggcaggaggattaaagaagggtggaagaagtgtgacaaaatgttactttctgtttttacattgtttctcttccaggtcacaactgtatttcaaatgtatttcattttcagactataggtggcaatgtttgtgctgttcactgtttaatgttactgttggctcgggtgttgcttgttgctggaatatggaaatgatagcataatttagagttgagaataaaaaaaactagatttagaaaactagaaactagatttagatttagtagagactttctaaatagtcctagttctgctgtgtggacccttctgtaactttctgttactctgagaaggagctgataattatcacaactactggtgtttgattagcagagacattcttgattcctgatgcaagaccgtggctgaagttgtagcagggcgtttggtggttggcgatgtaaagatctgggcctcttgtttcatgaataatagaatctcactatgattgtaatattttgttttgaactggagtgctgattattgtaatccctttaggtgagaaaagccttattatataagtgtatctggggtaactagcttaaatttgacactccagtcaactttttgtccctgacttcagtcctgcattgattcaaaacgcaccaagttaaatgtcaaggctctcagattcccttgctgtcatcaaattcagtgtttggtgacttcttggcaggcagacatctaccaagagattttgtattctttttatacctcctattcaccaaaagaaaagggccattcaaaagtgagtttttctttttttttttttttaagtttaaaaagctatgatgtggccacccatggtggctcatgcctataatcctagcactttgggaggccagggcaggcagatcacttcaggccaggagttcaagaccagcctgaccaacatggcaaaaccccgtttctactaaaaatacaaaaattagctgggcgtcgtggcgtgcccctgtaatcccagctacttgggaggctgaagcaggagaatcgcttgaacctgggagatggaggttgtggtgagctgagattgcaactctgcactccaccctgggtgacagagtgagactttgtctcaaaaaaaagctgtgatgtgaaacctgttctgtgaaggtggaacttggaaaggcttgtaaggatggtggtcccatgaagaggatgaacaaaccaagggaactgtcctcttgctggtttgggtgatgtcccatcacctgtcactttgtttgtttgggctgcagtggaccaatggtttcccaggcacactgaagtgacatgtagatggattgcttgagtggctccggcatgtttccatctcctgtctaccaggcagagaccgtgttccctgttttgaggggatccagaagtgcagtgacaagggcctgatttgcatctccagctcctggtcttgcctgtgttaacaattttttttttttctttccagatggagtctcactctgtcgcccaggctggagtgcagtggtgcaatctcggctcactgcaagctctgcctcccgggttcacgccattcgcctgcctcagcctcccaagtagctgggactacaggtgcccaccaccacgcccggctaatttttttgtatttttagtagagacggggtttcaccatgttaggcaggatggtctcgaactcctgaccttgtgatccacctgcctcggcctcccaaagtgctgggattacaggcatgagccaccgtgcccggccaacaatttttacattctaattaatttccagtttccaacctgactcaaggtttagctcttcgtctcttgggtgcagttttggatcatgtcttataatgtatatttaaaagtgtgttgtaaagctggaattcccattgtgggtaaatgctgagattgttgtaatactgagaagtgcacttgggaaccatggccaacactgccctagctgaccggaggttgcactgagttgtcccctttgaacatctgttatgaatgaatgttggaaaatgcaaagccaatcatttcttttacctgacctatgtgatgttaagttttagttttatgttttggcaagtgagtgttggatgtcactaatgtgaggaggccggtgagggcagactttgggtcagaggtaatgtaggagatgaagaccctttctattaatttttcttgtttaattgaagatgttcgtgttgaatgggttttatttacatgtataagttctttttttcttaatgctggaagttactttggtttttcagaaaatgcaagtaaccctaatctatttagagaattactttgcttagtaagcactcagtactatttagtaatggggaaaaaatgtgtttgtgtcccacagcgtgacaggctccacaaacttacttacgaatctcctaactaccctgagaacctgaagaatgggactttgtggagaatcttctgctttctttgctagtctctatttttccttctcagttattaagtgagttgtctttgggtgtcctcatcatgctgacttcatcttgcccagtttgttttgggtagaggaaggagtgcaaggtttaaaggaaaagcaaagcctgtacaacatggtgagaccccatgcctgtggtcccagctacttgagaggcccaggtggaaagataatttgagcaccggggttcaggaatgcgctgagtaatgattgcaccaccgcactcgagtctgggcaacagaatgagacctcatttcaaaagaaaaagaaaaagcaagactgaatcatttcactttgtattctcctccttgctctcattccttttgtgcttcatgcattgtgtgtgacaattggatgcagccgtaattattgtcagtaacttggtttttaagcttcagactgtatttcctcctcacttgttaacaccagaagataaatgaatgtggctcttggattgaactacatctacagggagctgaacttcccatgttgacgttgaattctagagtatgcttatgctgattcttgagaaattggtatgtgccgtgcctttggaattgataccttaattttcagtgaatattattggtattattattaaagagaacactttaagccaggagtaagagcttttcctccttttgagaagtgaggtacagaagagtatactgcagctgtgggagtgatgggtggggtggggcagtgttgaagaatatttaataccacgaagatgtcaccagtataatattaaatagaaaaagtaggttataagacagtggatccagtagaatcctattgtggttaagtgtttatatgtagagaaaatgactaggggctaggcacagtggctcacgcctgtaatctgaaccactttgggagatagaggtgggaggatcacttgaacccaggagttcaagaccagcctgggcaacatagtgagactctgtctctataaaacaagaaaaaagaaaaactaactagggatatattccagcatgttagtggaggttatctttgagcaaaggggattataggtaattttttattgtcttgtgttttgcttacatgtgttttctatatttctacaataaacctttttttcttaatataaaagtaagtttaaaagtgagtttaaaaatccctgaaaggcatgtacttcaagcttcaagtgaaagttatagtacttgttcagcacaaatactgatatagtgtttgttcagtggaacacttatttagggtctgccttgtgttttgtgtctaaggattaccaggtcattttcatattaggagctcaccactacgttgggagttggagagatagagcaaggactattttaaggaaaaaatgactggtaaattgtatttctttttccccacttgcagtttgcaaaatagatgtttcatttctctccactgtggacacttaaagtttgaatttccatccttctgtgcactccagttgcgtgaaagtaatttacattgctagtagtggtttgggttctctgaaattttttgtgtgtgctatggaaattgtctcctgtgatcagactcaaatccatttctccttattattgttttcttaggttttgagttagagaccttttcatgaccgtataaggtgttgaataggtttagatatcaaagtgatagctatgcatagctatactcacctgtgagcggtcagctcttcagtgtttctttcaactgacttgtaatatccagccactgttgggtgtgacctaaagtgtatctcttcccaaacagaagggaggagttgacaaacaccatgttacttttaatcagagacttgtccttgtcccccttcccccagccttttaataattctgaattcatgttgcagtcgatatgtgtttaaagtgttggtaggtttcttgtactcacaccatcctcctccactcctctcacccccaaaaagtgacagctgacagttgatggcatcttagaattgtgaggcttgagttggtctgtctcaattcgtgttttatggtggcccataaattgtgaaagataattgatagttgtcatgggaactagttatgttgttcagctatgatgtctcaattaggaaatgttcacctagacagtagggaaatgggccagctcagggatgtcttcaggaaccaggttcattgttttttctgctttcccttctacagcctggctctttccagggcttcttggtcctaggctggctgccactgacagagctatgcctttttttatttttttactttttttcaagacagtctcactctgtagcccaagcaagagtgcagtgacaccatcttggttcactgcaacctccacctcctgggtttaagcgattctcctgccccatcctcccgagtagctgggactacaggcatgtaccaccacacccagctaatttttgtatttttaatggagatggggtttcaccatgttggccaggctggtcttgagctcctgacctcaagtgatccacctgcctcggcctaccaaagtgctgggattacaggtgtgagccaccatgcccagccagagctatgccctcttttttttttttttttgtttgtttgtttataactgtgtacttgtaaaggaaagagaacggcctcctgtgccttaaatcttctgttgtgtctcagggcccacagaggctgagatctgttcatcctgcaaccagtcaccgtggcaaggaggagatagaattacctttttttcttaccttttgagccaggggtaaagtcaggcacggtgaccctgcattccacaccttggataatccatccaccttcagaaatgcccctggcttcgtgaaatgcacatgctccctttctccagggaggtgacccgaatatgcagctaagtattgcaaggatttctgggtaatattacacctgaaaggaggttttttttttttttaattatctggtgatttatgactaaataggctatgtctctcaaaacattgaacctgcaatgggcaagaaagaacaggatgactacaatgaaccttctatttggaaaaggggaaaataagacactcacagtggggtagctggctgaacaggaacagctgggagcgtttgctttggtcagccggtctggcagcttgcctctgctgaagtccgtccagggtgagaatctcgcttggtcattgtcctctgcagctgcacctggatggggtaggcactggcaaagctccttttcttgggtgctgcttggcattagtctggggcttcaggattggttgtcttggggttgaatagccacaggcttgttccagccttactgagaatgtctttggcaaaactgctcccaggaaaactcaggctctgagttttgtgtctagtcaattccatgggctggtaatggcagccagtgatctcacctagatgaggtctgtggttctgggaattcctgggtcttaacagtaagtcccacagccctgctaatccccaccacatctgccttgaggcaattttaaaatagcctagaatgaagaggcacacagttttgggtctaacagacaacaggggcagtttaacccactctgcttttgctctctggtgtatcaagaatgagcaacttccccacactgggattgtgggactctgagtacccacttcccttcactcagccattccaatttcttaaagcaatttttaaaaaatggtggtaaggccggccgcggtggctcacgcctgtaatcccagcactttgggaggctgaggcaggtggatcacgaggtcaggaggtagagaccatcctggccaatatggtgaaaccccgtctctactaaaaatacaaaaattagctgggtgtggtggcacgcacctgtaatcccagcctctcgggaggctgaggcaggagaatcgcttgaacctgagaggcggagattgcagtgagccaagatggtgccactgcactctagcctggcgacagagcgagactccatctcaaaaaggtggtaaaatacacatgacaaaatggactctcttagccacattaaagtgtatggtttggtggcattacatgcatgcacactgttggcagccatcacccctgtctagccatggaactctttcatcttgcaaaactggaaatgccttactcgtgaaccagtacctccccattcccagccattccagtttcttgtagcgcatcttctctttgatacaaaatctttgatagggttttgattgcaggcaacagcaattgaatctgatgaattcaacagagaaagaattaactgaaggaatttggggtagcactggagtacttgtcacactggagagacaggcctggacaggggtcagggaccaatgaagcctgggcatccagaatcacagctgttagtgtgttttattatttaagagtgagctcagaggtcactgttcaaagctgggcactctgtctccaactatccctcttcacatcccagactcaatagcacctttctgcatagttacttctactgaatacttcactgacagcaatgaaggattgttggtttatgtgtctgtctcgtatagattaggcacctcttcagagccacagccacatcccaatgatttatctccagtcccaagcaccgaatcagaccccttgaccgtttactccattcaagtgatgatctcaggttagataatcatgaggtcagttggtcaaagcaaaaacatctttttaaatgtctttttgaattctaatttgtttatgcaatatagattactcctcctattttcttcttctttcttttttttccttaagagatgggatctcagtatgttggccaggctggcctctaactcctgggctcagcggtttctcccaccttggtttcctaaagttcagggatgacacgtgtgagccaccgtgctcagcccctcctcctattttctagtctgtgtcattactgagaattttactctttattctctttcctcaaattctaagtgaaaagacctctcctctctaggccccaagaaaggcaaatgtgttccacggaagaaggttgcagacccatgtttgattgctttataccatatttcccccccagaggctcttaaaagggcaaagaaggtgttgaaactgccactgtcaataccagagcatctgcttgaaaccaatgtttcttttgtgactccaggatccatgctgcctggctaagaagggcagtgtcctccttgcccaggtgttaaaccacaacagacctagaaaactgagatgtcactcctcccctggagtgacagcagtgttaggaagtttggaatctgccaacccacctcatcctgtccatgaagttgtcacttggctaggtgttgatgtaaatgtgctacagaaacaaactcacctcttgtgggacatggtgactctggttagtaacaatgtattcttcaaaattgccaagacagtagattttaaatgttcttcgtatgcaaacttggtaagtatgtggggtaatgcataggttaactagcttgaattaaccattccgcagtgtgtatgtatttcgaaataacatgtacatgacaaacagatacaattttcatcaattaaaataaacatttagaaaaataacataaatcctcacaatagccctttgaggtaggtgctgtcattttataggtggggaaactgaggttcaaggaggttaaataacttgcccagggtcacagaactacttagtaagtggctgagccaggacttgaacaagcagtccggttgtagacacccggagtggaaccatcacgctgtggtgtgtccgggagtgcttcaagcaggggttggttgggggtggggttggggtggggaaggcacagctgaggcctgagtggccagactgtaaaagccaaaggaagaagtggctggatgtgaacagctttgtggacctcatcaaggagctgggactatattgtttgaggcaccttgagaaacctgttgagatctgggcttttcttattagtaagtatgttgcccagactggtctcgaacccctggcctcaggtaatcctcccatctcagccttctgagtcgctgggattacaggtgcaagtcgttgggcccggcaatctgggcttttctaaagctcaccatgcagctttggggagattggatttgagttggacaaccctaggcagttgcagagctgtccaggcagaaatggtgatgacggtgaaaatgagccaggggataaggcaggaggtatttaggaggcagattccattggatttggtcactgattgattaggtacaaaaaaagggaggtgtctagaataatccctaggtttcttcagaggactaggtagatgggaggaggggaagaagcctatctctattaaatacttagtacagtggctctaaactggggcctgtcttgcacccttccttctcccctaggggacatttggcaatgcctggagacttttttttgagacggagttttgctcttgttgcgcaggctggagtgcaatggcgtgatctcagctcactacaacctccgcctcctgggttcaagcgattctcctgcctcagcctcacgagtagctggggttacaggtgcctgccaccacacccagctaattgttgtattttttagtagaaatggggtttcaccatgttggtcaggctggtctcaaactcctgacctcaagtgatgtaccggtctcggcctcccaaagtgctgggattacaggcgtgagccactgtgcccggccgcctggagacatttttgattgtcacagcttaggagatgcctctgacatctagaaggtggaggccagagatgcagcagaacatcttacacggcacagtacagctcccacaacgatcatctcgccccaaatgctgccgaggttgagaaaccctgctgtagtgtagtatcagttttacgtggttatctaattggatccgtgagccagtcatgttagatcataaatatgatttttcctgtttttcagataaaaaactgaggcatagacaggatgggtcacttggccaaagctctgcagctagtaagtgttagagccagaatttgaacgcaagtcttccagatgtcagaatctactccttctgcttaccctgctgcttcatatctcacagtgatgccaaggaagatgcacattggactgtgggttgttttttttttttttctttctgtcatggtggctccagactagaggaggcaggaaggaaggtggttatttatagtcagctgtgcataggatcgatttttttcaatcctgaaggacttgcagcaggtagttcaaagaaacctcctttagacgttgactttcccttgcagttgtaaatatgggaacatttaccatcttttgctttaaaatatactgttataattaaggtaaaatgtaaaacttataacttaaaaactttactccctgtgcatatgaactatggcaagcttctcaaattaattactatccctttgggataaattaaaatattttgatttgctagaggtaaggagcccttttgagaattagtttgttttagttgagaatgattagagggctagaatgatatatagctctaaataggaaggtttctgattcttttggctactctccacttttactggttattttccagttctgggaagattctgcatgtatgtagcagcctcccttggctatccatggtattagagctctagggacagagttctcctagttgaactcttcataatatctcattattggtattttcaaagttatatgtgtattttaagatagtctttggatgatgttccaaagaaggctgctttgttgagattgagatagttgttttgcagttgtgatttctctttgtaaaaagaagtctttgtgtcggtcccaggtcttattttttgcttgatcacccagtacgtgggtgcacttgggctgttgggaccatctggtgagtgtgaggtctctgtacttcacctgtggagtctgttgtcctgaaaggtgccggctcaggtggtggtgctttgaggggagcttgtttgctgcaccttccagtctgctagaaaatagatgcttagaggggcatttcggggtggaatctgatcatggagtttggtgagcaaacagggcctcaagttttatgttgtgagaaataaatactgagtttatgttttaattatggcacagattaatacaaaatctggtgaaaaatggagaaaaggagagcttaaaacttagctgtttgttgctgtcatctaaatgtagttggtagccagcctagatgggaccacagcatggcactaaagcgcggctgctgcttttcagatcccatgttcatattcgcatgtgtggagcatgaaagtaccaatagaaaattttgacaaagaaattgaagggttgggccagggacggtggctcacgcctataatcccagcactttgagaggctgaggcaggcagatcacgaggtcaggaaattgagaccatcttggctaacacggtgaaaccccgtctctgctaaaaatataaaaaattagccgggccttgtgacaggcgcctgtagtcccagctactcgggagtctgaggcaggaaaatggcatgaacccgggaggcagagcttgcagttagccgagattgtgccactgcactccagcctgggcgacagagcgaaactccatctcaaaaaaaaaaaaaaaaagaaatcgaagggtcgataatttcatttatttgttcttttttttttttttttttttttttgagacagtatctcactctgttgcccaggctggagtgcagtggcgttatcacggttcactgtagccttgacctccgaagtccacacgatcctcctaccacagcctcccaagcagctgggactacaggcactcgccaccatgcctggctaattttttatttttatttttattttttgtagagacaagttcgtgctgtgttgcccaggctggtctcgaactcctgggctcaggcagtcatcctgcctcagcttcccaaattgctggatttattgtcatgagccaccacacctggccagggtcagtaagttaaaagataccttctaaactcagcccaatattgaagagtaaacataaaaatacatgttttgtctattatactattactgttactcaatgcttaactaattgtgcttatgtttttttctttgccaaaatttctcttcaaggagcaagtttttctaatattgcttttcttgggaagaacaattagtcacgagatagtacagcttttttttttttttgagacagattctcactctgtcatccaggctggagtgcagtggtgcgatctcggctcactgtaacctccacctgccgggttcaagtgattctcctgcctcagcctcccgagtagctgggactacaggcactcgccaccatgcccggctaatttttgtattttttgtagagacggggtttcaccatattgtctcgaactcctgaccttgtgatccacccgcctcggcctcccaaagtgctgggattacaggcgtgagccactgtgcccagccgtagtgcagtatttttaagcttcggtaaggtagaacccctttagagaaaaaacatcagtgagaagccatgttgccttatttttactataatgtttctttttttttttttttttttttttttttttttttgagacggagtcttgttctgttgcccaggctggagtgcagtggcgtgatctcggctcactgcaagctccgccttccgggttcatgccattctcctgcctcagcctctcaagtagctgggactacaggcacccgccaccacgcccggctaactttttatatttttagtagagacggggtttcaccgtgttagccaggatggtcttgatctcctgacttcgtgatctgcccgtctcggcttcccaaagtgctgggattacaggcgtgagccaccgcgcctgacccaatgtttcttaaaatacatccaaacataaaaagaacaaggatgtttatagctggtatatcaccatagccatcactataacaccgtaacaaacatgcaaatttgttacaaatctaattctcaaatgaataccattcaaattaatagcatgattttaatgtgacaggtgatgctattttattaaaactctatcatctgtgctcaggaagtcatggctgctagggtaagttttcctttcctaaccaattatgtgccagttggtggtaacataacaccgttttcctttgtttcctttattcaaacttctcttgtactatgtactagagcatgaaaacgtctttgacctacagttatgttagctggagacacagcagaactactgttgtcatcttgatcctgaatacaagggccgattgaagccccagaaatcatggggaagtactcgtttacataaagtggtcatgtagataatctaaaatatgcccgttagtgtattaagatcataactgcctaaagcttcctgtgccaggagtggtcttagctctcaaagaagtcatagtctggccaggcgtgatgactcatccctctcatctcagcactttgggaggcgaaaggattgcgtgaggccaggagtttgagaccagcccgggcaacatagcttgatcccgtttcttaaaaaatggaagtgatatccaggtggggaaaccttcctgctgtagtggagcctcttgagatggcacacgtattttgctcacaggtgctatcaatatatagctctggttcttcagaatataaataactatcacctgaccccaataccttatctatattgagattgttcattagatccaaaacatcttgtgcatttcttgctttttagtcatgcacagaccttgtctttactttcaaagacagtttggtactgaaaattgctctggtaaattaacacaatttatttaatccctgctctttccaatctttagcaacgtttttttcattgtcaccatcagatgaccttgctgagcttccaagtggcaattgcttttgttgtattgtttaaaggcaaacaaaaatcaattattattggctctagagtgcctggcgaggtggagctcagttctttgtgcattgcgcactatgctgctggtgtctcagctgccatgcttatggttgcattactttcctgtctagctttggtattcttgcctttaaaaatttctttttccatttgcttttcttagccagtgatgacagtaaaataaggaacgacctatttattgttttaagagatacgctggatggtgcccaggcagatgagcattgccattcaaggtggcttcttggtagactgcatttactcttaatcgggtgcctgtgggtcagtgcatttcttggtcatccttactctgtcaaagctgccttgttagccaggttactagccatactagtctcattaccttacgataacacctcattcaaatggccttaacgaagttgaacacttatcttagtcactatggttggctttgaaccttttctagaagttaagtttattccctgggaaaaaacgtgtttgccaccacacagagtgctgggtgtactgggaacccggcttcaaaggcaactactccagtagggaaggttgaggagggtattgaatgatagctcactgcttaaataagtgtttagagtcccaaggtatatgtaatggcatatgaaatgcctagtgtttaaagaatattcagaaataatcagtcatactctttaatattcatatctcatagagttagcatcaggaaggaaacttggtagattaaataaaatagcagaaattactgctggatttttgtacagtagaaatgtatgcacatttttctcccctagtagtcacttaagttgcatatccatttcctgttacatctcatgacatgttttgggtaaaccgtttttggaagcgtccatttgtgtagaagttaggtggttctgagtttaactttgtacacatttctaggcacaaggaaattaaataactggctgagtgagagtgatctcgttgaatgctgaggcttgtttgggaattgggtttattttggtgaaatgtaaatttagatccactctgtattagtttttttttttttttttttttttaacggagtctctctctttcacccaggctgaagtgcagtggcatgatctcagcttactgccaccatgccaggctaacttttgtatttttagtagagacggggtttcaaccatgttggccaggctggtcttgaacgcctgacctcgtgttccactcaccttggcctcccaaactgctaggattacaagcatgagccatcgcgcccggccaagtccgtttttacactcctataacgacatacatgagactgcgtaatttataaagaaaagaggtttaattggctcacgattctgcaggttgtacaggcttctgcttctggggaggcctcaggaaacttacagtcataagggaaggtgaagaggaagcaagcatgtcttacatggaagaatcaggaggaagaggggtggggtgccacatatttttaaataaccaagcacagactcactatcacgagagcaacactgaggggcaaaatccactcccatcatctcatctccttgtaccaggcccctcctacaacactggggattgcaattccacatgagatttgagttgggacacaaatctaaaccatataaccctcatacacatgtattgtaattcagaatttgtcattttaaaaaaaaatttttaagattagcttatcaatttaaatgtttccagccctgaactctcaaagtcaactttaatgagttttgatttttgccgagaaagatcaacagcagaagaaagagaagtataacaaaacttagctccacaggagcaaactggagaattggagtactggtttatgattttggtcagttaagcagaatgcagtcctagtttaaacaagactggataaaagtccaaattcaaataccattcttacaagtgtttgaatttaattttgtcagtgtacatacatatatctagtaccatagtgatctcaggctttgaagaatgaaaagcaaaagaaatgatttagagtcctggtccaaccactcagctatctgatatccttttgctattttcgtttaaggggttatcagggaatgagctaatttgacattttctgcttaaagcaatggttggggctgggttggggtggagagagctgctctgaggaggtggtgtggggggcctgcgaggacacacttgggttacctggtacatctgcagttcccatggaattgggtctcaaaactgagaaatggaagtgtgagctaggaagaggagtagcttaatggggactttgccacacttttagtgctcctgtagctgcacacatgttgttctttgtaatgtatgatttgtgtcccagtggaacacttgaggagtgggagctggagaaaggaatgttgtacagtgttgtgcagatgtgggtgagatgaggtgatctgggaagctggcagtcttagttggcccaggaatgccaggacctgagatgacagctgctggtggcagcggggaatgcaggtgtatctgtgtcgaggttgggaattggactttgaagggctgggacttccagaaggtaaaatgggattgcactgtttgggagaaggggtacagatttttttgtttgcttttgagataaggtctccctctgtcacccaggctggagtgcagctgtgtgatcatagctcattgcagcctcaacctcctaggctcaagcaatcctccttcctcagcctcctgagtagctgggactacagacatgtgccactacacccagtgaatttttttttcttaaagatgaggtattgctatgttgcccagactgatcttgaactcctagaattctttttttttttttttttgttttgttttgagacggagtctcgctctgttgcccaggctggagtgcagtggcatgatcttggctcattgcaaactccgcctcccaggttcaccccattctcctgcctcagcctcctgagcagctgagactacaggcgcctgccaccacgcctgactaattttttgtatttttagtagagacggggtttcaccatgttagccaggatggtcttgatctcctgaccttgtgatccacctgcctcggcctcccaaagtgctgggattacaggcatgagccaccgctcacagccgaactcctagaattcttaaacattaaggacagaaacatctctgttcttaatcatgatttgcttttagtctcagcagatggaaaaatgatttacttgcaaagtgagagagctagatgaggaaggaaagaatatgattttgtaccactcagagaaaaatgtgagcatttctctactgtcttgggttggttattttccgttgattcaaaattgctctgcaggagacataggagaggcttgagagatgtcagtgggtggccatggctcagccttgatcctgagtgggtgggaatactctgttaatggggcaaagtggaccctccaggtccttcatgctccttttggaaagaagcgttcctggccagacacagtggcttacgcctgtaatcccagcactttgggaggctgaggcaggcagatcatttgaggtcaggagttcaagatcagcctggccaacatggcaaaaccccgtctctactaaaaatataaaaattagctgggtgtgatgatgtgcacctgtagtcccagctacttcagagctgaggcacaagaatcgcttgaacctgggaggtggaggttgcagtgagccaagatcgtacccctgtgctccagcctgtgtgatagagtgagaatctgtctccaaaaaaaaaaaaaaaaaaaaaaataggaaagaaaatatatgttcccctgtggttccctgttataccctcttctcttgaatagtttatcagaagggacaaccagctcctcatgcccttcctcagcaagtgtcaacagtgtgggagtgcagttgataaagcttgattttcacaactctgcaagtagctgagctccaccagtgttagaactgaaattgaggttatctcaccaggaaccaactttcagatgttgaagccagtagaaatttagtaatgtgggaaactgataactaaaagtattccaggttctaattattttgtcagctcagttttaggaagcagtcctagggattcccctggaagaaagtttggctggatagagggcagtgattgtgaattttctagatcttttgtggactgcttctgttgttaaaaaagcagcagtctctcagcacacgaatgggaagtgttaatgctgtaactgagtaacactgatactgagtttaaaataatggtaaatatcccactgaaatttcacccccagtacagattagggccttggaatgctggatagtggattaaggacatctgaaaatctacttcataaaagcagtgagaacattggcaaaacctattaatttcaagtttttcagaaccatggaaattagttaaagatttctagcaatctgaggaatgattgttcaagaaaacactgggatctcagtaggaacagtgaaccttgtgttttaacctgctgcaatcccattcccggcccctgaccacctccttggtggccttgaaaaccagcagcctcacagccatggcagctgtgaaactcagaagtctgttaaaccactggaagggacagaacagaactggagctcttgaaggaccatcctcaaagaaatgtcacaattcgaccatttggcagcttgcttgaaagggcctttctgagggctttgtctttgtttcacccaacacaggtcagctcacattgtgcaaacagctctacctgctgagcatttgttgaaaacaatcggtggtagttgtttaatcacagctgtctgaggtggtgttgctaattgaggccaagtggctgaccaaaaaattttttatttttattttatttatttatttatttatttttttgagacagggtctctctctgtcacctagcctggagtgcagtggtgtaatcgtgactcactgcagcctcaacctcctgaatttaagtgattggtcctcccacctcagcttcccaagtaggtgggaacacagatatgtgccaccatgcccagctaatcttttaattttttttgtagagatggagtctccctatgttacccaggctcaaacagtttttttaaaatggagaagtaaatgttccttgacgacttcaaaaagctccaacatattcctgggaatctagaaggctctgagcattctgagaaggctctaccttctctgctgtggcgatcttgaggctttatgcaagcctcaaggaagactaaggtagaattataaaccattcagcagagtgttgaaggcatgccccaatacccacacccacacgccctctcacctacccacccacccacccttagtaaaggctggaaaatttattaattcaaggcatgtaaggaaatctctgtgtagttactagcgaaccactaaactaagagtcttcagtggccatacatggcaaacaaaaaacaaaacaaacagactttatagaattagttcctgaaaatcactaatcagatagcaacaaaacaaaccctgggatgggggaagaatttgatttttagaattgacacattgtattagataaaatttctagtctttgacaaaaattagaagctatctcaagaaacaggaagatatgtcccatatacaggttaaaaaaacacacacacacacacacctcggtttctgcctagtttctaggatagaaactgtccttgatgaagcgcagatgttgggcatacttaaaacttaagtcactatgaaagttatgttcaaataactataggaaagcatgtctaaagaatcacatgaaaatatgcttgtgaggttgaagccaggaggattgcttgagcccaggagtttgaggctgcagtgagccatggtcatgatcaggccactgtactccagtctgggtgacagagcaagactctgcctcttaaaaaaaatattgggtgaccaaacagagaatgggaataaagaagtagagattataaaaaaaagaaccaatagaaattctggagtcataaactctagtaactgaaatgaagaattcactggaggggcttagcaggtatgaactggcagaagaatcagtgaactggaagacaggtcatttgagatagttcagtctgaacagcaaaaataaaagaatagaaaaatgaacaaagccttagagacctgtgtaacatcatcaaccatacccataatgggagtcccagaagagggaagatgtaaagggaaaaagaaggtatactgtgaatagttgtgtgtttgttctcatgccgctaataaagacatacctgggactgagtaatttataaaggaaagaggtttaattgacttacagttccacatggctggggaggcctcacaatcatggcagaaggcgaatgaggtgcaaagtcatgtcttacatggcaccaggcaagaataggagttgtgccggggaactcccatttataaaaccatcagatctcatgagacttattcagtaccatgagaacagtatgggagaaacttcccttatgattcagttatctccaccttatcctgcccttgacatgtggggattacaattcaaggtgagatttgggtggggacacagagccaaaccatatcaagttgtatgccaacaaattaggtaacctaaatggaatttatacaaattcatgtagatgcaaatggccataactgactaaagaatttgaaaatctgaataggccaataacaggtaaagagattgaaatagcaatcaggaaaccttccaccaaaaaatactgggtcacatggtttactgggtaaattcactgggtgaattctaccgagtattattataaactctttcaaaattttataattaacctgataccaaactaaagacatcacaagaaaactatggaacaatatcccttataaatacagaggccaaaatcctcagtgcaatgctagctttcctcccattctcactacttgtattctgtcataaaaaaaggattgtacaccgtgacaaagtggaatttatcccaggaacaaaaacttggttcaccataccaaaaccactcaatgtaatctgtcatgttaatagaataaaagacaaaaaccacatgatcatctcagtaaatgcaggaaaatcatttgataatattcagtactttttcttgatgaaaactatcaactagtaatagaaggaaaattctacaatttgataaagactgtctatgaaaaactcacagttaacatcatacttcatggtgagaaattgcatgctttctcctaagattatgagtgagacaaggatagtcattctcaccacttctatgtagcattgtactggagattctatctaggacaattagtaaaaataaaatagtaatataaataaaagcattgagattgtaatggagattggaatagaactataactagaaaagtatctgtagttacagttgacatgatcttgtatatagaaaatcctaaggcgcgcgcgcgcgcgcacacacacacacacacacacacacacacacacaaatcttgaactaataattgagtttacaagcttgtacatacaagaacattgaagcatccagaaatgaaattaataaaacaattccatgatacagtagtatcaaaaagaataaaatacttgggaataagtttaataagtttatgatttgtacacaaactataaaacattcttgaaggaaagtaaagaagacctaaaaaacaaaagaaaggacattccatgttcacggattagaagacttacattgttaatacggccaatactccccagattgagctgcagatggagtgcaatacctacaaaatcccagctggcttttttttttctcagaaattaacaagtttattttaaaaatcacatggaaatgtaagggacccagaataaccaaaacaaccttgaaaaagaacaaagctggaagactcacacttctcaatttcaaagctttgctacaaatctacagttatcaagacagtgtggtactactgtgtggacagccatagagatccatggaattgaattgagagtccagaaatagacccttaactttacagtcagttgtgtttttgacaggggtgttaggacatgaatggataaagaagatgtggtatatccatacaatgggatattattcagccattaaaccactaagctcagataaatgcatggatgaaccttgaaaacgtatggtaggtgaaagaagtcagacacaaaaggccacacgtttatttgaaaattctggaataagcaaattcagagacaagaaatagatgagtgttaatatgtgctggaggctggtgggaggggagaatagggtgtgatggtagtgggtatagagtttcctttgggatgatgaaattttctgtgattagctaatggtgatagatgcatagttttggagacacattaaaatcaatgaattatacatttgagaggggcagactttatggtatatgaaatctcaataaaacgtatttaaaaacaatatacagttaagagcgcatccagatacacctaaggtattagtaaagcggtgcattaagctgaaatatctggcttgtgcaaacttggggcatttgtaccttatgtagaattccaaaatctgcttaggattttccctgtccactggactgccactggcagggtctgcttccctgttcctgggttgagggagcagcattggagcatccctcaattcctgaatgaggaagttagttaaaagggcaatgtgagctgtagggccacactcatctaacaggtgagcttaagtttccattgatggcagacctatcagatgtttcctcccattctcactacttgtattctgtcattttgctcttatcctcccaaaatcatgctaagattttttttttttttttaagacagagtctcactctgtcccaggttggagtgcagtgatgccatctcggctcactgcaacctctgcctcccgggttcaagcaattctcctgcctcagcttcctgagtagctgggattacagttgcgtgccaccatgcctggctaattttttgtattttttttttttttttttttaatagagttggggtttcaccatgtgagccaggatagtctccatctcctgaccttgtgatccgctcacctcggcctcccaaagtgctgggattacaggcgtgaggcagtgtgtctggccactaagaatttttaaaataagtgacacaatgaagaacaaggccatagagatgatcttgggtaatttgagggtatcaaaaagtatctgcctgatggatggcttgagacactaaaaatgagtaaatgattacaaagtaaggaatgataatttgttttgaagaataaaacagattcttgtctctggtggttgagggatacgactgatgctgtatattaagacaagaagatgaagcccaaatggcagggaaattgaagagaagatacaggggtatctaggcacagggttggctgtgaaagtttcaatatgtaaaagatgataggctgaaaggaagaggatggtggaaaatacaaaagaggcattgataattcaggagtgtggagtgtgagagaagcttctccataggtgaagagttggatggacagtggttgttaggtcaaaataacaataataataacctagcacatatgtcagatatctgtttgggttcatcttacgcaccattctcttgggagggagcatgctttgaacagatccaatttatgatggagttttaggaccagaaagcgtcgtagtagcagagacttctcgtcctagagagcaaaggggaagtcattttttagttagttagtttgtgttttagacagtcttgctctgtcgccttcgcctcctggatgttcaaacagttctcccgcctcagcctcctgagtagctgggattacaggcgcacaccaccatgcccgactactttttctacttttttagtaaagatggggtttctccatgttgtccaggctggtctcgaactcctgaccttgtgatccaccctcctcagccccacaaagtactgggattacaggcgtgagccaccgcatccagccttagtttgtttctgagatagagttttgctcgtttcatcacccaagctggagtgcagtggtgtgatcatagctcactgcatcctcaaacttgtggggtcaagggatcccctcacttcagcatcccaaaatgctgggattacaggtgtgagccactgcatctagctgggaagtacttttaagagtatttttttcaggctgggtgtggcgcctcatgattgtaatccaagaggtttggaaggctgaggcgggagggtcacttgagaaaaggagttcgagaccagcctgggctaacatagcaagacccccatccctacaaaattttttttttaaattagctggtggtggtggtgtgcactggtagtcccagctactcgggagtgaggcaggaagattgcttgaatccaggaaattgaggctgcagtgaaccatgattgcaccacggcactccagcgtgagtgacagggcgagacccctccagatgatagctggagatcatgttattttcttactgattttcccccggtttagcaatacaaagtgatcgttaggttggcacaaagcacgatggaaaataaccattgttggcatcaagagaaatctcacaccacttgataaatatagtgaactagattactaaagagtgatttccctggattgcttgaaccagggctcagtgaaaatgttgctgtttgctttttttgtggtcaggattttttgattaaatgagaagcctacaaatatgcaagctagaaggtgttgtattttgggattaagccagactgtagcaggatgttagtaatttgagttgcataaactaatctggggaggcagagtgagtagctgatgtcacatgaagagcaaacccttgattccattcgtaatacataatagaacaccttcgtttctaaaactgggtgcagtaaagcataaaaaaacctttagtagctgatgaaagattctgccccaggcttgagtctattaaccagaaaaactgaaacaaaattaggcaaggtggtaagttttgctttcttttagtggaatattaggatatacagcaaatggtagcaggaccacgttgggaaaagggccaaaagactttttaaaaatcctgtttgaggtttggatccattttctttcatttttggacatacctttgagtagtgggtaaactgagagctcagtgaggtgagcctgtgtctttcagcgggcgggcgggctggagttggaactcctgtttcagtggttttcagatcctgctgatctccagaatggctccagttcccccacccctaatgctttattatgaaaaatttcaagcctgcagaaaaggtaaagaatgtacagtgagcacccatataccaaccacatggattctgcaatgaacattttaatatacctgcttttttttttttttttttgagatggagtcttgctgtgtcacccaggctggagtgcagtggtatgatctcagctcactgcaaccactgcctcctggattcaagcaattcttctgcctcagccttctgagtagctgggactacaggtgcgcgccactatacccggctaattttttgtatttttagtagagatggggttttgctaacaggccagtctggtcttgaactcctgacctcaggtaatctgcccgcctcagcctcccaaagtgctgggattacaggcgtgagccaccatacccagcctcataacggctttttttttttttttttttttttttttttttgagacagggtcccactttgtcactcagtttggagtgcagtggtgtgatctctgcagccttgacctcctggactcaagtgatcctctggcctcagcttcctgagtagctggagctacaggcatgtactaccatgcccagctaatttttgtattttttatagagataggcttttgccatgttgcccaggctggcctggaattcctgagttcaagcaatctacccacctcggcctcccaaagtactggaatctctttttttggaatacgtttcaaagcatgtgatagacatcggtacagtacagtcctaaacactgagtgtgcacgtcgttaactacagtttaatatttgttttgtttctggatcttttccagggatttttttcaagattaaattccaagcgccatgatagtttctgagttagaaggatggggcaggcccaggaatcagtactttgaaaagctcccaagtgcttcttgtgatgcatcgggtttgggatcttctgccccagggagcgcttcccgattacttcatagctaatcctcacctaaaatgcagaggtgggcagttatctttaacctgaccatagagctccatttttggttttcttggaatcttttgtttaaaacagtggttctcaaccaggggcagttttgtgcctcgagagacattggacaatgtctgggatggtttggttatcacaccagggggcatctagtgatgagagatcagggatgctgccgagcatcctgtaatgcaccggacagccccacaggatggggagttatctggaccaaaatgccaatagtgctgaggctgagaaacgtatttttttttttttttttgcctaaaagaaaattgcttgctccagatgactccagacaaaccaaaataaaaataaaaagtaaaaactaaaatgacaacatgaaatgaatttttaagagccaaatgagacctttagagacaatctcatcactgcctacctggtttccgtcaaatacagatttatgctccagaaagtacctaatttattaaaataagctgatttctaaaagcttgttagatggtcagtaatctcaaactttgagtgaatttacttgaaaaggtaatgttgctggtggcctttagtttcttttaatatatcttaaatatgatatcaaagaaaaacagaacatgatgctttgggatgaatgtaatgaatgaaaagcaggattctttggcaggtaactgtgtcccaggccctgtcctgcagggtggcagggatgtgctgagctgggtgaggggggaccgctgagggcttctctcagtagttgctctgtgtagaattttctgagtgtcttgggagaatgggggcatttttcctgaaggtctcacttgactccacagtgaatggctttacctgtctcttgagtaagatgcatttctagtaatgctctgactacttagtccacgtttgactagtttttaggaaaacaatatgtacaatggaacagaaagcttacagaaataaagggcagttcttttcttgaggtgaaagtgatgtggggagccagtaggtgacaggatttgctctggcccctccgagggaggaggaagatgaaggtgaaacgtggtattggtcagtccgtttcctgcttggttgatttcagggacctgatgagacaatatggtggtgaaaacagactgctggattgcaatgggcggaactgggcttagtctctggataggtgtcagttcatttcacacctgtcattgagggaaaataatacctgtatggctgttggaagattaaatgagactatgaacgggagctgtgtggataaaatgtaccaggcactcccagtgccagaaggtgttcttgttagttctgggtgtggcgatgtgcgaagacacccgtgtctgcggggtgtgtgtgagctgcagataaccagcaggtcctgctgatgaggcaaccttcttgggagtcttggctcagttccggggtttaattacgatgtatccttgggcaagtggcttaatgtctctgattgtaatttccttcattttttcatatctaaaatgaaagaggtgcttggatattcctaagggttcatctttaggagtctgtacttctggtgtggagctttctggaaaaaggcttctgggaatctgaaatggcagtagtgatgggcgtggtaacagcagtgttcatacgcttcctcagtaattttatgtaacaaacactcacagtgtacttactgcccctgagatcttaaaaactctcactttcaactttcacgacaccctataacttaggtaactgctattatccctggtatacagatggggaaactgagcctcagagaggttggtgatttgccccaagtcatagctgggaagtggcagacctcgatgggatgcaggcaccctgccctctgggctccgatcacttggccacctccccgcatgcaccacatgggctgtggagttggaggcatttgtgggcttcaagaatgagagttggtggggagtatgtgtgaggaaccggaggggtcatttccctgggactgggattgtggaggttttgattttgcttttccctttttaaactgggtgaggtatgagcatgggaactctgtacggaatgtgtcattggagagggacagcagggacaatgaaggtagtccccagagaagtatgagaaactggcattcagtgctcatgcagaattctctttgttttaataataatacaaataataacattaatattatttttagaggcagagcctcactctgttgcccaggctggggggcagtggcacgatcatggctcactgtagccttgaactcctgggctcgagccatcctctcacctccctcagcctcctgagtagttgccatgcgtaacaccgtgccttgctaagttttaaattttttgtagagaccgggtctcactgtcttgcccaggctggtctcgaactcctggcctcaagcagtcctccaccacagcctcccagagtgctgggattaaaggtgtgagccactgcaccctgcctaggattctctgtagatggggagcccacctgggtgagatgccagacacctggctccggcatatgcacagcagtttcacacgagcgtctcttactcaggtttcagagttctggtaaaagatttaggtttgacatccaccctttgaggtttttggttctcacatgtttgataacctgaagcttgtgggtttgatatgggcagtaaagtgggattatttctgttagagatccttattccctagagactttctggtctggaaaggtgagaggctatatattcattagctggaaccaccatgtggatcatttgttggaagaactgttaggaagaagacagatattgctatagagagcagggccagatgagcgagaaggcaaatgtacttcattcctgtacctgcaggcttattagggacagatgccctcaggcggggatgtgtagcttcacttgactgctctaaataaggagcgagagggtggtgtgtgtgttaaccatcaagattaagcaagcaagaaaaagacaaaagaaagccatcatttagtaactggtggagtgagttggagcctgggagctgccccaggacaactgttatttcccttgatcttcctcaaaccctaccaggaagtgagggcaacagttccctaaagcagccccatcaagctcttaagaaagcagtttcactgggagtggggagaggtagaattgggaggtggtagagggctggggggtatgaaatgtgagggccggagtcctcagcatcggaactccagaaataaaaagttgtctgggtctttgaaagcctcctatatgataatgttacagtaacagtgttctctgctactttcaatgaataaaaaacctagggtttctcagctacagtgtgcattaagagacatttgtggtctagttttggcacttcatttctatttgggaacatgcattctgagttttagacaactagcttccaaatgaaattttggaacaccaccctttttttttttttttttttttgagatggagtcacgctctgtcgtctgggctggagtgcagtggcgcgatctcggctcactgcaagctctgcctcctgggttcacgccatgctcctgcctcagcctcccgtgtagctgggactacaggtgcctaccaccgcgcccggctaattttttatatttttagtagagacggggtttcaccgtgttagccaggaaggtctcgatctcctgacctcctgatccacccgccttggcctcccaaagtgctacgattacaggtgtgagccaccgcacccagctggaacaccacccattttttaaagcagagaatttattgttatttgcacaaaaggacgtttgaacactttaggaaatctggatgctggaattaactcggtcaaaacaaagcaaaacacacagaatctcgtatcttttcctgccctgatgctgaactgcagccttgatttatgttttgtttttccacttttgtttctgaacctatgtggtacaggctgaacccttgtccctgcttcggagcacttaccttaattattatagaaaaaaattaagagttggctgactctgtgctgaactttctggtttttttccaggcagtttctccataacaaatgcgttttgcatagaattgaaattgcctatttacctcaatgacaccatcctaatagttggtggtaactacctaatctaataatctctcattgtgtgtgatagggctatttattgtattttagagtgaaataatgcattttgtttgcattttaaaaaggaatggtacaggaaatgattgtaatccaggactaaatatacagtttgcagtctttttattctaattgctttctgatgaatatatatatatatatatatatatttttttttttttttttttcttgagatggagtcttgctcttgtcgcccagactggagtgcaatggcatgatctcagctcacttcaacccctgcctcccgggttcaagcaattctcctgcctcagcctcccaagtagctgggattacaggagcctgccacaacgcccggctaatttttgtatttttagtagagacggggtttcaccatgttggccaggctgggctcgaacttctgacctcgtgatccacccgcctctgcctcccaaagtgctgggattacaggccttctaataaatattattttacacatcgagatagtactgtttatgcattttgtatgctgcctcttaaatctataagcattttcttttcttaaaaaaaagctttgggctgggtgcattggctcatgcctgtaatcccagcactttggggggctgaggcaggtggatcacctgcggtcaggagttcaagaccagcccggccaacatggtgaaaccccgtctctgctaagaacacaaaaattagtcgggcatggtggtgcatacatgtagtcccatctacttgagcgtctgaggcaggagaattgcttgaacctgggaagcggaggttgcagtgagtggaggttgcagtgagctgagatcacaccactgcactctggcctgggtgacaagagcaagactccatctcaaaaaaaaaaaaaaaaagctttgataaatattgtacatgattgcaaagcgtcccatcgtgtggatgttcacttagttatttgatacatatttttgtgttcttgggctgtttctaatatttctgtattacaaataaggtgatgggaagcagtttcattcatcaatcattctttttaaatgtcccttcctatcagtttctgttaatcagtcaaaagcgtatacattcttagcaggaacttaaattcttagtaggaatcttaacaggttaagatttctaagggtagagagggtacctgttttgttaaccggtggcttaataccatttaataccagtaaaggctcaataaatgtttattgactgaatgaacagaaaagatcagtgatcatgaagaatggcccagttagtggtatatatacgagaagtgctgcagtggttcacagtaacatgataataactaattgtgtaatgatttggcacgaggtactgatctaaatgatttatacattgttgcatgggattttggaaggggagggagtatacctctaaattagttcatgctatgggatggaagtaagactttaaatttaggtgggctcaaaaaacagaaacaaaccaggggccgggtgcggtggctcacgcctgtaatcccagcactttgggagtctgaagcgggtggatcacgaggtcaggagatcgagaccatcctggctaacacagtgaaaccctgtctctactaaaaatacaaaaaaattagccgggcgtggtggcgggtgcctgtagttccagctactcaggaggctgaggcaggagaatggcatgaactcgggaggcagagcttgcagtcagcagaggttgcaccactgcactccagcctgggcgacagagcgagactccatctcaaaaaacaaaaaaaacaaaacaacaacaacagaaaaaaatcaaatgttcgtcagctgatgagtggataaacaaaatgtggtatatccatacaatgaatgctatgctatgctgccataaaatggagtgaaacattcatacatgttgcaatatggatgaacctgccactcaagtagctggtactacaggcatgttccaccatgcctggctaatttttgtattcttagtagagacagggtttcaccatgttggccggcctggtcttgaactcctgacctcaggtgatccacctgcctcagcccctcaaagtgctgggattacaggcgtgagccagtgcgcccggcccaaagcttttttttaagaaaagaaaatgcttatagatttaagaggcagcatacaaaatgcataaacctggaaaacattatgggaactgaacgaatccaggcacaaaagaccacatattgtgtgattccacatattccacatattgtgtgattatatggaatgtttggaacaggcaaatccacagagacggaaagtagattagtggtggcatagggctggaagaggaaggaaacaaggactaactgctaatgggtacaggattttttttcctcaagtgatgaaatattcttagattatgaggatgcttgtacgactctgtggatatactcaaaacgatttaattgtatactctaaatgggtaaattgtgtataaattatgtctaaataaaaccatgaaaaattggatgaggtttagcattgtagaaggaaagatgggggtggtggtgtgttagtttttgagggctgccatagcaaaacaccacacactgggtggcttaaacagtaaccatttattttctcacagttctggaggctagaagtccaaaatcaagatgtcagcaggtttggttttccctgaagcctctctccttggcttgcagatggccacctggccaccttctcactatatcttgtggggtttttgtgtgtgtgtgtgtgtgtgtgtgtgtgtgtgtgtgtgtttgagacagggtcttcctctgtcacctaggctggaatgcagtggtatgatcatggctcattgcagcctcaacttcctgggctcaagagatcctcccaccccagcctccagagtagctgggactacaggtgtgtgccgcaatgcccagctaagtttcgtaattttggtagagactgggtcttcctatgttgcccagcctggtcttgaattcctgggctcaagtgatcctcccacctcagccccccaacatgctaggattgcaggtgtgagccactgcgcccagcctggtcttgtctttgggcacaaatatccgctagtgtctcattgcgtgtccacatttcctcatcagctctactggattagagcccagcgtaatggcctcattttaacttaatcacttctttaaagtcccagtctccaaatacagtcccattctgaggtagtgaaggttaaggctccaatgtgaattctgggggaacatggttcaacccaatgagaacaatggttatctgttgggagtgaggactgatatgagtggagatgcatcggtaaagatgcgcggaccacagatgtgacgcagcaggtgtgcacagaggtatgggatggggtcagtgtggagggccgtgtgccaggcagcagtgtggacttggtcctctacccagcgtaggggggtcattctgggggctgaaccgagggtgacactgtaaaaccatgcttcaggaaaattcatctctgcgccctggaggatggactgaggagggaagaggctgagggaaatgagtgtgcaagataatgaggcgatcccaagggaagtaaaaggattggaggccttgcaaaagcaaagcgaacccaagcttcagaacggaggcatctgagatgatgtcacagttttgaaccttatttatagaagaaagagggtgaaatggggaattaggtaaatgaaaatataggtcccattgttggtaagatacatggagtgtcattgattcagtatttagtgtgcttttccttattttaaacagctttcatagctcacttccaaactgtatttttgcaaccaactctttttctctctctattaaaaggagaatcttttattttacactaattaacagctgattctcctaagagagttttcaggaacctaaacctcagagttagatggagacaagtgtctttgttaatcatttatgtgaggtcagattgtacaatttgtaacagattttacagctggttcctttattaagggatgggtaggattcctactaattattattttgagttttactttgtttttaaccattgaaacttgggggatgtactctttggtttgggtagattttgcttatagatattgaagtttgagttgttgaatttcatacatattttattttgacttttaatcctttaaaacatttgactctgactccattgagctctgtagaacatctgtcatccagatcttttgccagaatatagagccttgattggacaccttgccagctaatttaaagcttcccaagatgcagaatactgtgtaaaatgtcctacctgttgtgtcagaagggagaaaataagacgagattttcatatttgcttgtagatccataagaaacttgggaagaattcctaagaaactagcagtagtggttccctgcagggtgggggctctggatgtgggtgtggcaggggatgggagagactggcaggttgaggagcagggtgagagggatgtttttatgatgtacattctcatatatttattttgaactatttgaatgtattactcatgtaggaagacaaacctttactttccaaaaatattagggaaaaactttcaagtctctcatttttagcctttttgttgttctgatatttccacacaggacagacggtaacatgcccgatacattttaagtacaaacaaggctgtaagttgccttacttgactttcttcactattttctattcaaaaaagtatttttgaatccaagggaattagaggaataatcttgaaatgattatgttttgggggaaaagtatattattaatatgatagttatctaatgttgtgtaacaaattgcctccaaatttagcatatgaaaacaataagcattcattgtgtcacacattcattctttcttttcagtgaaagttaacctgtttccatctgaatagatttctcactctgtatcctgccagtaatcattttgtactgtttctgtgcctttcaatccaagagtccaacctgatgaggttctgctggtgtaattcttttaaaagcattgtggatgtcctgtgaatctcactggagttcactttttaaacattagacttctgtggagactgctgaaggacaacacccttacttcttagggcctttggtttgccagaattgttctctgagccattgccttggattttttcctgacttcttaacaaaggattttataggtgggaccttcaacactctggaaattgccttagctacattcagccatctccttaggtacattttccatctcccacattgtagcaggcaatggcgttgctaaactttccatcaggaaataacaaagatctccttttccagtttccagtaacattttcctctctacaccatcatccacagtctcctgaaaggccctccaggttctagcttttccagggctcttcaggggttttcgaactctctttttacagtctttccagttcctgcccattgccacgttccaaagtcactcacacattttaggaatttttctttttttctttttagcaagcataccaattccagttaccagaatctgttagtttttgttatgtgttgccgcagtacagattgcctcaaagcttagtggctgaaaacaaggaacattactggccaggcacagtggctcatgcctgtaatcccagcactttgagaggccgaggcgggcggatcacctgaggttgggagtttgagaccatcctgaccaacatggagaaaccccatctctactaaaaatacaaaattagctgggtgtggtggtgcatgcctgtaatcccagctactcgggaggctgaggcaggagaatctcttgaacctgggaggcggaggttacggtgagctgagatcgcaccattgcactccagcctggacagcaagagtgaaactccatctcaaaacaaacaaaccaaacaaaaatgaacatttactgccatacacacttcctgggggtcagggatcccagagtgtctccgctgtgtcagtatgtctcagggtttcctgaggctgcagtcattatgcccgctagggcttgggtgggactgaagcacctgcttccaagttgcctcactcacatacctggcaagttggtgccgttgctggcaggaagcctgcttttcttgccaggtggacttctctgaggggtgcgtgaatgccttcactacagggcagctgacttccctcaggacacatgattcaggagaccaggggaaagctgcagtgtcattttatcacataatcccagaagtaacactctgtcatttctgcaatatcctgtgggttacacgtcagcattattcattgtgagaggtgactacatgagggtgagtccaggaggcaagaattattgggggctatcatggaggtttgataacataattggtaagaaattcagatacacctcagacttgattgtggcataccagtgtgttgtaaaacttgtgagaatggcttgccttagaaagacaagtagtccatccagtgtcttattcttatgttaagttgggattgctattttgttacccttgggcctctatatacaaagcctctcatagtaatagatctaattgggttgaagtttagtattatgtatatgccctctgcttttattagtagattttactttcgtgaaaggaacatataaacttcattattgcatttttgtataaatgcagctggggacatggttttattacccaatgtccattttgtaaatatttagagaactttttttttgcatcataaatcagtataaatagaagcttggtttccattgttgccctggctatgaggaagctgagagtgaaatttgtcgttcaagtgtggcagttatgttactgactggcgtatttatattctcctttatttgatattttgctatgagatgttccagtttacttgtgggaaaaaaagccaggtgttcttgaactcaacaaatatttattgaattccacttgctggccagacagcattccatgtgccccagatatggcactggacagatagataaggtccccactcgcctacagcttccaacctggtcgtaagaaaataccttagcttttgctccataatgtggaagaattggcctcagagaaaacctaattcatatgtaccacgtttctacccattcaagttttatttcataatttttttttttttttttttttttttgagatggagtcttgctctgtcacccaggctggagtacagtggcacaatctcagttcagtgcaacctttgcctcctgggttcaagcgattctcctgcctcagcctcccgagtaggtgggattacaggtgcatgccaccatgcctgactaatcttttgtatttttagtagagatgggctttcaccatattggccagcctggtcttgaactcctgacctcaggtgatccacctgcctcagacttccaaagagctgggattacaggcgtgaaccacgatgcctggccgtatttcataattctatctttccatagaaagaattggctggggcacgtataactaatgtgagttactgatttcagaggaagcttttggaagtggttgataggcactgaatgggatggggtggtgagtggtttaaaataacacttgaacctttggattcaaatggttttaaatgcatctcagaaaagtgaaaggtgaatgggagagctacatccattgagagcaagggttcatcagctagggctgtggcttaaactaagcagatattctttcctggcagttctacaggccagaagcctaagatcaaggcgtcatgagggttggtttctctgaggctcccagacagtcatcttctccctgtgtcttcacggggtctttattctgtgtctgtgtccaaacttccttttccttttttttttttttttgagacagagtcttactctgtttcccaggctggagtgcagtggcactatctcagctcactgcaacctccatctcccaagctcaagtgactctcctgcctcagcctcctgagtagctgggattacaggtatgtgccaccacgcccggctaatttttgtaattttagtagagacggggtttcaccatgttggtcaggctggtctcgaactcctgacctcgtgatctgctcacctcgtcctcccaaagtgctgggattaccggcataagccaccatgcccagcccaaacttccttttcttagagggtgggctttatctgtggttcttagttagcctcaccttcattcttccttttggtgttacggtcttgcttactgctttgggaatggatttgttgaaactacatgtgactagtttagggacccagtaggaggttttactataagtgtaaattaacatgtgcctttgggggaccttaaaagtttttgtcattgggccatgagatctgagtgcagctggtagaacctccttgttttctttggtatgagaactcctgggcttttgttggttccttccgttttctccggtgtattaccatttcacatcacagtgatattatccagataacacccatgatttgtttttaacggagtttcactctgttgcccaggctggaatgcagcggtgcgatcttggctcactgcaaccttcacctcctggttcaagcgattctcctgcctcagcctcccaaatagctgggactgcaggtgtgcaccaccacgcctggctaatttttgtatttttagtagaggcggggattcgccatgttggccagactggacttgaattcctgacctcaattgatccacccaccttggcctcccaaagtgctgggattacaggcacgagccaatgcacctggccacacctgtgatttattttatttcatttgagatttcagactttgtcgcttgttctttctgtagaagttttttcatagaagtatgttgtttcaaaagcaaccttcaaatagtagacttagcttggatgagaatctaaaagtctttgagtccaacaaccaagcaggtcccctgtccaggaagtaccttatagctgatgtttgagtatccctgcagatgggaactcactacctcctgaagcaccttacttctacccttggaatagtaacagagattaaaatgtccttccttaatttgaggtgaaatctgccttcttgtccattttacacacactaaccttccttccaccatgcaagctgagagagagccaggttgagcctgtgtttccacaacaactcttctcagacctcctgctgccacctaccatgcacttgctcttcactggctaggttccagttgctctgtacctttcctaaagtgtggtgaccagaatttggcacagtgagggaaggttccagagccctttagtgttatcgggggcacagagcttgggctttggagtcgctcagatcttgagttgatatgcacttctttgtccttgagcaaatgattgaaccttcttggactctcagttcctcattaataaaatgaagatgaaacaagatgagatggactgtgcacatttcctgatgggggctggtatgtgctggtgcccagtgcaaagtggctgctggcagaatggtgagtcaccagtacctgctcccttcactgagtgcttcctgtgtgcctggcaccattgctcagggctttacatggacttactcatttcattttcactgcagcctagagcgtaagtaagtatttgctttatccccatcttatagatgaggcatttgattctcaaaaaggtttcatagcttgcccatgttctagcagctagtaaaaggagaagccagagttttcatttaggtgggagtcctcaacctgctttcttaactgctgtgatctgcactgtggcatgagagtttgtcttaatgtaaatgcacatgtaatagcattattcacattgcctgagactgtggaagctcctttggcaaccagatgccacaggggactcatttcatgcttttagaagacttgagccactacatgccctgggaactgtgttgcttccccactggccatcactcttgcttttgtaagggatgtcacattgagccattaagtgtcatctctggaactcatgactctgttattccacatattaggttttctttgtagctttgtgtcaactccaagccaggtaaataaatcttggaagaaccaagttacagatgtgagtaaaagaggggatggcagggggcagaagtcagggcaggccctgtgacttgccaccagcatcctcccttcgggggaggtcctttcatctgggtgctagctggaggaattggcaacgtcggagataaaggtgtagatgcaccagctgaacgtcttgctctgtttcccattttacgtataagatgggtgatggcatgctgcattcagatccccatgggtgtatttgggatttggggtgggggattgtgtgtagaaggcaggaaagattgcccagcaactctcatttgaattgagggtggaagcggttctcgggcacagtatgccaaggcccagggcgtccaagggacagagcagagatcacagatgctgaacgggtggggaaggagcactaggcagggcatttctgatgagactttgatttgggaggtacgaaagttgtatgaggaatcttgataaactgcttagagtgaatggagatgagtaggaatcaccaccattcacatactggctctgcaagccactcagcacagctctgcacctgctcttatggaggagaagacaagcagaagagaatgttctgatctagaagagttcgtgtaagagcatgaaggcaacagcacttgagatgtggtgcacatgagcaaaatttcagtttatgtggaatttaagattaacagattaaaaggtaaaattctctccctggtaccaaaaaaaaaaaaaaaatccatgtactccctctctctcttttttttttgtttttttttttggagatggagtctcgctctgtcccccaggctggagtgcagtggcatgatctcggctcactgcaagctccgcctcccaagttcacgccattctcctgcctcagccttccgagtagctgggactacaggtgcccgccaccacacctggctaatttttttttgtatttttagtagggacggagtattccctctcttgactgatgtttcagcagtatgtggacagattcttttttaaggtaaatgaccaggggcttgtaatatgagtgtcacttaggcaacaggacatttcaatgaaatggtgatggaaataggttctttttgtagattgtgagctcttgggagcatggattttgctaaatatactgatttttaaatttttttgacatctagcatggtgcatttcacataggagtttttcaagaagtactcatttcacaggcatcttgaatgatagatgtttggtaagaactgcgcaagacagtgtactaatcactcattctcattcagcctctcaagctatcatggttggttagtaataacatttcaaaattatatttgtcccttaggctagcagagaatactgtttaacaggtttttcttgaaaagtaggagtagcgagctagagttgtctctaggtggggtaaataaaacatctcccaccccacccaaattgaagctgaataccttcaattcactactgtgcgcatattcatgtttcatgctgagcagttcacttgagactttctcacggaaagaagtgcgatacagttggtggtagtcttatatttgctacgtgctcatgtgttgtctgatgatagaatgcagtggtcaaatattgcacaatttacgccagaggaggagaattcccatcaactctccaaccatcataaatactttattccacacaataaggaaattgaacttttcagaagaatgatatagaacatctaaaataggttaaacttggaggaattatactgtccattgtaaaattggagccactcttgaaaaattgctgcatgccccactgaatgctagagcaagacatgcagtcccagctccaggggcttccagagtgattgaggcagggctgtgggctgctttcctgaagcctgactcctttctttcctcattacactgccacagatggtggcagatacagcatggattggcataagtcactctctactacctgcagaataaaggcccaatttcctagtgcagcttgcaaagtccttctcatctgccaccttcctgcctttgtgatttctcctcctgggactcctgcacccccttttttttttttaatttttcttttcttttttttgagatagggtctccatctgttgcccaggctggagtgtggtggcgcgatcatagcttattgcaggcttgacctcctgggctcatatgatcctcttgccacagcctcccagatagctgggaccacaggcacatgccaccccgcctggctaattttttgtatttttttatagagacgggatttctccatgttgcccaggctggtctcgagctcccgggctcaagcgatctgcccgcctcagcctcctacagtgttgggattacagacgtgagccactgcacccagccactcctgcacccttaccttttcgccgccctggccggctggacgactgcacccatttcacccggcattcttgtgcctgactgtgctctggccatttcctgtgtctggaatacccccattctcccatgctcagccccgtggactgtgtttattcgtaatcacacctcagagcccttccccttctccatggactccacccctgctgtgtagatggccccaacatcattttgctgagtggagtgccactgcaaggcatggcatggaggagcctgactgcataggtggcggcaccttgagggccttacagacctggcagttgaaggtatgggctagaagacagatgattccaaattacggctaagaaataggtaggctgtaaggcttgattgccgtgaatgcctctagaaagagcacttaaaaaaaaaaaaaaaaaagaagggatttccctgttcatggcctatgagtttaaaaacaagcaccccatgtcattagccctttgctcaccacagagttgctgacacattagacgatctagatatgtgtctgagattttggatgcctattgattgtgtattcacttagactttggtgcttttctagatgtttcacaagttaagatgttgttaagaggttctcattgttttattcctatgttctttccttccactcccaactcactccgatgtcactcatctgggttcttctgctcctgcctgggctgcttagtatttattgagctacacactgtgcttggcacccagggccatggaggcaggcaaagaggggggacatttattcagcagcttcttactgagggtatgggtgccaggtgctcgctctgggaaggtgcaaatgaaatggatgatggctgagcctgaagaattcccagggtgaacagatggggggaagccagttcgggcagagggagtggcaaaagctgctgcttaaagtcgttgctcccaccgcgtggggagtaattggatctgtctgcagcactgaggcctggacaggaagatgggactggaatgcagaggggccttgcagggctcagtcggggccaaagggcagagaggcagggcacagagagaagctgtggccgccttggttggtcccatggaatcctcgcccattggggccatgggcattgatcgacactgtggagcttgaaatctcaccaggtggaaacatctctgccagccctgtaatcatttccatagtttcttctggttcttttcatgaacattttccaatatttttatttgagcattaataaaaggtttgcctatatacttaaatttctgccagaaagctttgacttccgtgatctagagcaagcttgtgcaaccacaagcaggtcacatgcagcccaagatggccttgaatgtgacccaacacaaattcgtaagcattcttaaaacattatgagccttttgtgtgatttttttttttttaaactcatcagctgtcattggtgttagtgtattttatgtgtggcccaagacaattcttcttcttccagtgtggcccagggaagccaaaagattggacacccctgatttagagttttaggacttaggttttgggaatgccaaatgtttacatggaaaggctcatccattaggatgagcatggttttcctcatgaactccttggtagaacctaatgttagtgtgtggctcttttcctttattattttcttctgtacagggtactttataaccaatagctgtttctgaaaatatgggaaaactatttttgaatattgaatcaattacattttcagggtagtttgataaaaggcattctgtggtcatctttatctaaaacgaatcctcctggccttagtgtgattattttattttatttattttattttattttattttattttattttattttattttattttattttattttattttattttatttatttgacagagtcttgctctgtcacccaggctggagcgcagtggcgcagtcttggctcgctgcaacctgcacctcccagattcaagcaattctcctgcctcagcctcccgagtagctgggattacaggcatgcaccacaatgcctggctaatttttgtatttttagtagagatggggttttgccatgttggccaggctgatcttgaccttagatgatccacccaccttagcctcccaaagtgctgggattacaggcatgagccaccccacctggccttagtgtgattttgtattttatgttgtgagttttgtttttaaaaaagaacatcagtaagttcagaaaccaactccatgcttatttgctgtaatgaatttttcccttacattggaaaaacacagttccatctgtcctgaaggcccataagtcacagaatgcggtgtgttggaatgtgaaatcctttcagccttgcagaatctttatcattgtgctaaattgccatgtggaagaatggcaggtggcagttagaacttagggctttctatttattctctttctattttgcattagtcagttaaggttctgatcttcagaactttgtatgaaagtcagtgcttcatacaatttcacatcaaactgtggcattgcaagaggcaaaccatttggaattcttccttaaattacaaaaagaaaaaaaaaagtgaatgcacgaagattgttttgttcgcaagacttatgacacagccctccagctctgtggcttttcattctgatgggaaggaaatgagaccattgtaaatgactgttcagaatattagtgccagctccatgccaagtgctgttaagaacatggagagagcattcgagtgtttgcctctgaatttttgcccaggccatagttcgcagttggccggcaggctgcaagggccattccaagtgggagaagcattccatccctgggacaagtaaacagaacctaaaacaaacacatgtttagttgaagtgatacagcaccaggcaaagtgttctacttttaatgagtgaaggacatcagaaacaaaggatcagagccccccacgttgcattctcaactaattatagcactaaggcaggaatccttggccctttatctggagtgagtcagagagtatatcatgccttatctaaagtctaaagttaattgagcccaaggcccttctgaatagacacacactgtaatcagatatacagatggagtgggaagaggtaaatggtttcagatgccagcctggtgtagttgcatgccggaggggacttaaaggaaacagtgagaagtattagaaaactgtagttgaccaggtatggtggcttatgcttataatcccagcactttgggagactcaggctggaggatcgcttgaacccaggagttcaagaccagcctggacaacatagctagaccccatctctacaaaaaataaaaaattagctggatgtggtagtgaacctatagtcccagcaacttgggaggcggatgtgggaggatcgcttgagcctgggaggtcaaggctacagtgagccatgatcacgccattgcactgcagcctgcgcgacagagtgagattctgtctcaaaatagcaacaaaaacaaaaaccaaaagtatagttgcagagaatggctttccctgcttagttttatccagatgactgttagaatagtggtgaagaatctgacaagtggcagaatgcagggccatgggaagggggagagttcatgcctaaggtcagctgagcagaggagacttggagaactgagaggggatccctctcctgtgtttgttgggagggacagagcctgttgcccagcctgcaggtgtgggagggaccctgcaagaagtccctttggtcaccctcttcaggccccacattgcctgatgaggttcagactcctaggcctatgaagggtaataaggcccgtctgttcctgcctttacttttcttctatcagtttctaagcactctcagcctccgggcctttgatcgtggagcgccatgatacagtggcgttgtcctgagtggttagaggtgtgaattctcgaggccgactgcctgggtttgaatccttgcttggccatcttccagctgtgtgaccactctatgcctcagtttcctcatccgtatgataggaatagtggcagtacctatttcatggtgttattgagctgtacagttgctagctgctgccatcatcattgtcatttcctcatttcttttagacccaaactctcacactttccggaattatttctggagccccccagaaggaattggtctcttttattctagattccctaagaggcacagagggatactagggtgagaagatagtggtggctcacagtcatcactctgtacttactagttttgaaaatgtatcaaattgctgacgtctctgagcaccagtttcccaatgtgttaaagaaggatggtgatacccaacccatgtcacagggtttcgtcagtaaatgctaaaccatgtggtaagcagatgttctcagtgagcaccaggtcactattattatgttacttgtcatgacgagttttacttgccaccttgtattatagttgtgatgactatcttttttctagctccacattgggacacatgaaattatagagttaaatgaactcatttgtagatacttgaaaattgtaataatctttgaatatctgtacctgtttgtgtccagattcttctggttattttgacttccttataccccagtgtccttttttttttggagacaagtttttttctcttgcacaggctgaagtgcagtggtgccgtcgtagctcactgcaaccctgaagtcctgggctcaagcaaatcccagtgccttataagcaggcttcctcaaggcctgttgtcttactcatctgtattttccttatagcatctaggtcagtgccttgcttataatgggcatttggcaaatgtttgttgaatgcatttatcattacttagtaataaatactaaactattttttaatgggaaaataggcaggtttgggttctcatgcacatgacccacatttgtcgaatgtctgctgtgtaccagccagcagctttcttcctttagtgctatttcctgttagagtgggatagtggtatttcagtccacctgatgaccatttaggccaatcacatgttaatgggaattgaatgcatgcattaaacacaacaccagcgggtgctgtccacattaaaaccaggaggtctgcttcattggttcttgactatattgaaagagttggaaatctgacctgggcatttgaggtagactctaaggggtgtaagacggccctttgttttagagacttaggattggtgtgagtgactggcagggactgctttagtgcccagacctttagtagcacagacacaatataggaaaactcttcaaggaaaaccagccccaaataagagagtaggtaatgttctgcttctcttgctttatattctgcttgctttacagaataatctgagatagctaataatcaaagtgcaggtcccccaaaatgaaagtgatcatcatagaaccagaaaagaagggataaaatactgatttcaaggactcctgaagccaatggcagctctgagtttcctggcagccaagacaaagacagaagcatgctgggatgatgcatcctcgggctcggtaaaggaagcacaggacctgcctgctgctgtgggctcagggaagtgagtactattttccctgtctggagtggggaggagcacttgtctgtggtagggtgaggaggaccacttccttgggctatcagtcattaaggccccttaacatcatggccgattctgaaattacctctgaaagttgagatttatgttagactgtagctctcaagccagttcccttagaggccagagtaatgacagtgtaatttacttgccacctgcttgagagagacaattggtggttaagggactttcccaaggtgataaattgttttagcaaacagatccagaggacagctcctttcccctggtctatgtatgccttttgaacgccaagaccttatcctaaactcaagtttcacgaataggattaaaataccctttggggacctttcttacattgagaacagaggctgggccacagcttggctaaagcattccagatctctcttctgagcaagagattttgacttgttcataaaccaggctctctctcatagtgggcaaggccttaaaaacaaacaaacctgcaaaacctgaggaaacatcttcctcctacgtacttagctgatgtaggcattaatggaaatggatattggagtgggaggctccttttagggggcagaaaagaaagaatgtttttatttttaattaaaaaaatattttcttttgagacagggtcttgctctgccatccaggctggagtgcagtggtgcgaatatggctcactgcagccttgacctccttgctcaagtgaccctctagccttggcctcccgagtagctgggatgacaggcgcacaccaccatgtctggctaatttttgtattttttgtagagatgaggtctcactggcttgcccaggctggtttcaaggtcctgggctcaagggatcctccctcctttgccttccaaagtgctgggattataggtgtgagccaccgtgcctggatgaaaaagaaataacttgattatgggttatggaagtttagcaatggcttcaaaaaatgtcagcagggaatggatgtctttttctatcagatgaaatttcagtagtcatctgatacagccaaccaggagaaggaaaactactaagtagaaagacttagataagtggagtcgaacatctctgggcttaaaaggagcatcactcctggcatattcagcgtggcccagctgtgtttctctgagggcgatgtcctcctcagggtctgtgaatggctgaactcagaacaaggcttttgcaatctgcgccttctgaatacagtttttgttctgttggtttaatttgcatttggtgtctggagtgcctggtcatggaaagagcccgttctttgttttgggtaatgagggctgaggtttccaataagtatttctcggttccgtccgtgtcgagtgtcatttgagtagcaagtgactgttgctcattgcactgggcctgcgagcctccatttgcacattagatttttgcataccctgcaattagtaaattacagaatgacatcatgaaatagaaaactgtattcccagatggaaatgctttccgtattctatgcatttttattcaaaggcagatgcatttgtaaacctctttggatggttgttctgcctttgtcagttacttcatagcaaatgtcaactgtaaaccaagagagagaatgagccaggatggagaacttttttttgtttaattgtgtcatgttgggtgctttttggaaagtgggtgaattattcatgatgacatgaatgggggtattattttaaattagtatagaagcaaatggttcacaacccatttattaagaccctaatgttgatgtggctaccaagaagctttaccagcaagggccagtgtgttgccttccttggttggttagtttttctacatccacttaactcctagcctaattttatcttttttttcctctgtttttctttccctgaatgtttatttaagctctgataaatcattttgaattaaggtcgggtatgtatttcctttcttctcatcttcttccccctccatgactgcctgcatttgaatacatttccattgtgtgagaggcagtaatggtacagaggggtggggggtggtgactgcttggtgagctgtggctcacatgtctccagagacacagggcctaggaagactgattaaaaatcaacttttaactactataacggctcactttcctgaaacttgttatgctgtaaccccacctattgaagacataatcagaaccagaaagtgaacaaaattgaccctggaaatatgtggcaaaaattctgtgcaataagtatgataacacttttctttcagtgaattctctctcagggcccactcacagaaccaattttgacatcaaattttcttccttttaaaaatacagttaacccccacccccatctgcaggttctccctctgcagattcaaccaactgcagattgaagatattcagaaatttagaaaaatgaaaaataacaatataacaaaaagtaatgcaaataacgcagtatcacatctatttatgtagcacttgtgttgtattaggtattatatgtaatctagagatgatttaaagtatatgagagggtgtgtgtaggttatatgcaaatcctataccattttatgtcagagacttgaggatctgtgaattttagtatcctcaggtgtcctggaactactccaccatcaatgctgagggacaactgtatataatataaaataaataaaatatgtactgtaaaattgtaatcttgaaagtttgatcctgtggcagctgctattttcaggcagctcagcctttgtttgcatgctcaaaaccagcttgtgatttggtttctaagatcacggctggcttattatctgtgctggcttatcatgacagtggctcggtgttatggacacagtgagcatttggtgtcgatactcccagaatgaactgagtagaatggacaggagactgacctttgtctatttgtctatgtagcagtaatgccactaacttgttgcagtgctctttatcctcaaactatttgctatatatagtaatgcttaaattacatatattatatatattacatatacatattatatatgtggatatattatatattataattatatataatatatataattatatattatatagatggttctgactttgcacagttctgatatgcatgagttgcaattaccatgatttaaataataccagttccccaacaactctagtcaaatctcagttacccccgtgtgttaattgagtaattgcatgaagtacacaagcttgctgctagtgcttcagtatacaactcaccatgtaaataacagatgcatgtcagaatccgtggccaatcacagcacttctttcaaagcccatgggtgattggtcagtgcacatgttccttagttcatgcacagacagcagagtgtgtagttctgtggccttcttggctattggggataaaccagtgtgacattttacaaaaataccaaaaatcgagagggaattggtgaacgaagataaaagtgcagcaaagaagctgaaagtgataatgctagaagtgaaaccaaaacctacatggaattatagaagaaatagctgactgtgggaatattggcagtacagctgttggagagactgcctgcgcagcccgaggaggagaatgcaggtttaccacataaacaaggaaagtggttgtgaagaaaagaataaagctgtcctagaggacatgaccttggcaaaacaaacaaatttcacattaaaggatctctcagaaccatttcccagcatagaaaatgcaaaggatgaaatgtatgcttattcaaacttacggctcctagcagcactgttcacaatagtggaaaggtagaaacagcccagttatccatcagtgggtgaatagattaacaaatggatgaatagattaaaaaacagattgtgatatatccacgcactggaatattgatttaaaaagggacgaagtactgatacctgctacaatgcggatgaacctgaaagataccatgctaagtgaaagaagccagatacaaaggtcacatatgataaggttctatttatatgaacgatcttggtaaatctgtagagaaagaacacagatttgtggtttggtttctaagatcacagcaagcttatctctaagatcggggctggggcgcggtagggaaatgaggaacaactgcttaatggatgtggagattccttctggggcgacagaaaatgttttgcaaccacgcggacgtggtggttgtatgacattgtgaatgtactaaatgcgcttaattgtttactttaaaatggtgatgttatatgaatttcacctcgattttaaaaacgtgacatttcaccaagtcatagaaaagatgcttcgcttgtataagttatgcgacaaaaagataagcacttttaaatatttcttgataagttttttgtttccagggttttaaatggcaacgtgctgaatatttcactatttttcacttccttgtacatttataactgacagtaatagagtttttaatgctttgacaaaatttttaagaagtcacagaacaattgcattttttccttttcatcactaacattgttttgcaccgtttcagcttctatggacattcttatggtttcatactgagtactgcctgtgcacatgtatttcactacacccccgccccccaaccaacccctccaccccccaaacacatcccatacccattacagcacgttgttgcagggaggattctgagatgcgtcttctacaatagaaaaagatgtgctgggcttgctgtgaaaaagcagaggaagttagaggtgggatattagtggtgaagttggtagaacctcagctgcttctagggaagagggaaggtaaagtcagcaggtattagggaccaggggaagcctgtaacttataaggtatggtaactatcagagcagtttgtgggattggctagcagctgtgtggccagtagctggaagaaccagtggtctggacatgtcctagttttgagaaatctgtcggcaaggagagcgctaggactgaaggtatgatgcctgaagcccagaaacgcataatgggctgtgacaatgctgtttcacttgagctcatcggatgctttcgaggattcaatccatatctccctgttctccctgcattttgacacaggccgtgcttgcatgacagttgggttagtgtattcccctctccaccagagacttgggagggtaggggagtgtgccttagtcattctcgagactcctgtgcctggcagtgcctagcaacggcttaataaatacttgctaatgaacctaattattatgacattaagattttaatctaaatcttctaaatgactatgggaatctgtttatttttgcttaggatcattggtaatgttttctggccaaagctgcttttttgtctgagctgtgtgtttatttttcattcctgtctcttatttatattgtgaaaatgattaagaaaaataggtggtatggctcatggtctgatatcacgagtcaatgtgttgttttgaagccaactccacacataatggttcaagccctctgactacatcttagttttactccagattttctccatcaatgttgcttgcatttttcagtggtactttttggaaggaaagaatacgaaagccagcccgcaaaagatcactgggtgggggtcatagtctgtgatggtgactgaattatctggtaaagcatatttttgccgttttcagggtcaggcttcagcataatgagattccagaaattgttatgaaaaaagaaaccttaggttacccagcagctaaatgattactgcatcagctagcagctccggaatggccatttggccctgtagaaagatcattcttgggcaggctgttgatgtggagagtgagaggagcagctgttctttcacctgaggccccatctgggtagcagatggtccccagctaggcacaagccctgtgtagggacatccgtgctgcccaggatcctgggacactgcccaaatcaactgtcaggctgggagcctgtgtccagaactgtggatggcattcactttgggttgtggaagttggtttgtacctactcttaagtcttgccccttcaactccagctcaggctttttaaccctagtagaagctttcttatctgtaggtatttaagataagtttgaacctactggtctgtgggaaggtaccgaaaaagccaaaagctgcagctcctggggagcttacaggctcccccttgttgagagtctcccgagtgctaggtactgtgggtttaagggagaccctgcagtggtcaaaaggctgcctggtgaaggggggccggttcccatacttctcagatgtgcctttgggcaagccacttgcctcctggtgcttctcttttgtcatctgttaaaggggttagtgaaggacccttctcatagggttgttatgaagattaaatgatttaaagtatgcagagtgctaagaacagtgcctggcagatgattaaaaaaattgttacagaaatacagtacaataacatttttggtcacatttaatcctcaaagcaatcatgcagaaagggcaattgtcatacctattttgcatgagagactcaaccactcgcccaaagtcacagtgctagaaaggacttgagccaggatctgaacctgtcccctgaaatcttcacctgctttgcttcttgacacggcaggagaatgatgaggaagtgggttagtctgctagggctgctgtaacaactgcagatggggtggccaaaacctcagacatttatttatttttttaatataatcttggatgttggaagtcgaagatcaaagtgttgacaggcatgggttcttctgagacatccctccttggcttgcaattggtcaccttcttgcttcttcacatggtcctccttctgtgtgtgactgtgtccaaatttcctttctgtaaggacacagccatattggattaggcccaccctattgacctcatcttaacttatttactcctttaaaaaccctgactccttatacagtcacactccgaggtactggggattaggatttcaatgtatgaattttggaggtgagaggacacaattcagccaataccagtaaatgattagtaatcaaacacagggattgaatacgcagatattaaggattggaatgaagccagaatttggaaggattagaactgatggaggcaggtgcttggtctgggtgatttttgaaaatgattttcaggccaggtgaggtggctgattcctgtaatcccagcacttttggaggccgaggctggcagatcacttgaggccaggagtttgagaccagtctgggtaacatggcaaaaccctgtctctacaaaaattacaaaatatcagccagaagtggtggcttgtgcctgtaggcccagctcctctggaggctgaggtgggaggatcactggagcctgggaagtcaagtctgcagtgagcaaagatctgtgcctctgcaccccaagctggacaacagagcaagaccctgtctccagaaaaaaaaaaaaaggctttcaacagagtcagtcgtggacaaagaggaaaggacttttttcctcccctgcagctttaacctcccaggctcatatgatcctcccattccggcctcccaagtaattgggactacaggtacgcatgccactatgcccagctaattttttttttgtatttttagtaaagatggggttttgccatcttgcttctgctggtcgtgaactcctgggctcaagcaatcctcctgccttagcctcccaaagtactgggattacaggcatgagccactgcacccagctggaaaggactttttgtgcggtgagaggaggatcctcagaatacggagatctggggtccgcagacccattgtgggatgcacattgatttagttagatcttgagtgaagagatactgtgttagctgactgcgtgataaacgttagcctgagaaattagtttgttattttgataggcatttgagtcatttattgaactaaaagctttggggtgcctcatgtactaggcacgaaatcacagtacagttcttatcaggggagagatcatttgggtctcagtttcctaaaagtagcttttaactccaaaattgttttaatctatgtttgtagaggaacatcatgaaaatattttgaaattaaacttcttaagtataccttaattttatactgttattattttatttcatttttatgtttattttttgagacaagtttcactgtgtcgcccaggctggagtgcagtggtgcgatctcagctcactgcaacctccgcctcctgggttcaagtgattctcgtgtctcagcctcccgagtagctgggattttaggcatccgccaccacgcccagctaatttttgtatttttagtagagacagggtttcatcatgttggccaggctggtctcaaactcctgagctcaggtgatccacccacctcggccccccaaagtgttgcgattacaggcatgagccaccgtgcccagcctactgttattattttaattagtaaattttggtataatagagactggattttgacttaaggctatctgggtttaaatcctggctctgtcacttaatagctttgtcagatataccatatgacataaataggcagagtttccatcttatcacctgtgaaaagtggataactgtacacatcacattggattgccacatgcagtaatggatgtggaggttctgtccagcattgtgtctttcccatgataggcacttgtgctaatgctatgcaagaaggtagaaagttgaaagtggatagctaaaagtggaggcaaattaagggacttcttaaaatatttttatttaatagaaaacaatatatagcaagaaaatttggatcaattctttcatgcattcaacaattgaagtctgagaaccagccgtgattaggtgctccaaattagaataaggcaaggctcctgccctcattgagcttccaggcaggcgggaagcccaggagggcgtgataagtgctacaattcaggtgtgttcaggttgtcatgcaggtattgaagagggctacttttggatttatgcccacagaagagtttcacagtttctgaatttttgccccaggatgggagcaggcacttgcattaacatttgaattaatcacccagagaagagtggaaaagttatttcaggcaatggtaacagcatgtgcagaagtctagagggatgggagaggccacatggcatggttggaaaatagcagctcaggaatccatttgctgtgggggtggtaagtggaggactagatttgtgaaaggggacagatcacacaggctttgggaacaactaggaggttttttttttgtttttttttttttttttgagacggagtctcactccatcacccaggctggagtgcagtggcatgatctcggctcactcaacctctgcctcctgggtacaagcaaccctcctgcctcagcctcccaagtagctgggattacaggtgccccccaccacacctggctaattttgtatttttagtagagacggggtttcgccatgttggccaggctggtctctaactcctgacctcgtgacccacctgccttggcctcccaaagtgctaggattacaggcatgagccaccaaacccggctgactaggagatttttaagcagggaagcaatttgatgatatttacagttttaggaagaccaaactgacagcagcttggaggctgatttggaaaggaggcagagtggaaggcagggttgttgaggggggatgttttagaaagattttgtgatgattctgctgagactgaggttctgaacttgggctgccctagggctgccctacagcagcccaggaggacagattgcagagctttgagatagttggcatcaagatgggtgtgtctggggtgggcatgactgggtttctagcttgggtgtccaagtggataaatagcctttcatgtggaggctgagggcatgggcaggttgagtactgtccttcttccccaaaggtagctggccagccatgggagtcaatccacatgggatggaaggatggagaatgccagctcctctttaaagacttggccctgaagaatagagcttgcaattttgtatctagggtagtcattaagatccgttcacacaggtttggatctttaatctccagaatagagggtgggatgctccctgctccattgagcccaggtcatcatgtgacaacctgtgactaattaggcagtgagctgatgagattcgtgtggctcttgagctaagcttttgaagccagggtgagactctctggccctcattatctcagctgtggtgcttggcatgtcccagaaggtagccgtgctgtggacctcagtccccgagggagcgctgtgccaccgccacccacgatggacctgccctgagagagaagcctttgttttaggctctttaagatgacatggggattttggtggtgtttttctagcctaatctagcccttcctgactcaagtttttgtgtaagagaccaaaccttgctcattttcttttccttagctacaaatcagttttgaacttaccctttttcagtatatgcctgtgcatgtgtatgcctttgtgcgcaggcagacaaatatagctaggaccaaaagcatttctgctgttaccattatccttttgtccaaggtatttttcaatgaactaaatgtcagaaacacacacgctttcttaaaaaagcagctttattgagatatgattcacataccttacaattcacccatttacagtgtataattcaattacttttattatattcaacgttgtgcaaccatcattatgatgttaatttttttgtttgttcctcttgttgagacagagtctcactgtcgcccaggctggagtggagtggcacaatctcggcttactgcaacctctgcctcctgcgttcaagcaattctcctggctcagcctcccaggtagctaggactacaagctcatgccactacacccagctagtttttgtatttttagtagagacagggtttcatcatattggtcaggctggtcttgaactcctgacctcaggtgatccacctgccttggcctcccaaagtgctgggattacaggtgtgagccactgtgcctggctgatgttaatatttttattacccataaaaggaagcctgtacgatataaccatcaccccccagttctcccacacatccctctccccatccctaggcagcctctaaactactttgtatctctacattttgcctattctggacatttcatataaactgagtcatgccatgtatggttgtttgtgactggcttctttcaattagtggagtgttttccagggtcatcaatgttatagcaggtatcagcacttcattcctttttattggtcaaatactagtctgttgtatgggatacattgtgttataaaaccatatggtttctagagatggaagccatgctgacccctgtagagttttgtttatccatttatcagttgatgaacatttggattgtttctgctttttgcttctatgaacctctatgtagtacattcttgtacaggttttggatgaatatgttttcatttctcttgggtttatacctaggaatggaactgccagactgttttccaaagcagctcaccatttgacattcccccccagcagtgtctgagggttccagtgtatctgcatcctcaacaacacgtgttgtctgtccagtgatagccatcctactgggtgtccctgttgttttatgtcatttaacaccaaacttagatcacatttctgcattactgactttgcacataccgtccccaacttgcaacttatgctgtcattaacttgtgtagatttatccatgtttggctgtttatgaggatttgtccgtgtcaacatgtatgtttcataaggacattcttaccttccattaccagacctacattctcaatttaagatttgatattttttcagtgtttaggttttcaattgaatcaactgacaagtttagtggcttaaactttcaagcttaaactgaaatgccaatcttgttttagaccaaaaattacatcctatctcttctcttaattgaggaacttaggtggtggttcctatttgtctttatttatttatttatttatttatttatttatttatttatttatttatttttgcctacttcagtttggtcggtaaactatcaattgtattttcagtatgtatatatatatagagagagatttttaaaattttattattattttttgagacagagtctcactctgatgcctaggctggagtgcagtggtgtgatcttggttcactgcaacctccacctcctgggttcaagtgattctcttgcctctgcctcccaagtagctgggattacaggcatgtgccaccatgcccagctgattttttgtatttttagtagagatggggtttctccatgttggccaggctcatctcgagctcctgagcttaggtgatctgcctgccttggcctcccaaagtgctgggattacaggcatgagccaccatgcctggcccattatatatacatttttaatataatgtgaaatcatgtggtctctactatagactgaatatttgcatcctaaaccccaatgggatggtattaggaggtggggcctttgggacgtgattaggtcctgagggtagagccctcatgaatgggattagtgcccttataagaagaggccaagtgagcttgtttgctccttctaccatgtgaggatacagcaaagaacgtgctttctgtgaaccaggaagtggccctagtcagacactgaatttgccagcaccttgatcttggacttcccagcctccaaacctgtgagaaataagtttcggttatttataaaccacgcagtctgtgatagtttgttagaggaacccaaacttaaaggcagcttctaaaggggagcaatgctgaccactctgtagtttgtatatttggtcaacacactttattgagtgatgagtctgaatttcatgcttgattgatgatgattggtgacagagtagacaaggtccctgcttcatggagtctatggtctagttggggaaatatacctttattgaatcaaggcagatgtgattacagattgaacaatggctgtagaaggaaagggatttccaagagagaattagaggggcttctcaaattgagtttgactttctctttggtgggggttgagtcaggaagaacctttttgaagcaggaaaaatctttagctgagacctaaaggaaggggaggagcttgcctgggaaggacactgtggtggctggagggggtttcccaggcagggacactctggcaggttagagtaactgaaataaagtctgtattggagtgcagagactgccagaagaggggctcatagaggccaaagtgggacggccttacggacgagctgataatttgggcattattcaaggtggggtgctatgtcattgaagggttttagcagaggggaggcattatccaagttaaagaacaaaacaaaacaaaacaaaacccactctagttgctgtgtggcagatggattgggattgggggtgtggggttggtggcaagaatagatgcagggggacaagttatgaactgagactgggacctcatgggtcttcctgcccaagaccgagatggctgggggtgggggctgcggctagggacatggggcctcagtgcccacgttttctgtcctctgtcccctgtgagggtatgtgcgctctcataccagccgcagggcactttggctcgcttgtgttgctgggagagatctcctttaatgtttttttgtgtttttaaaatatgaacgtaggccctggcagagacaaggcagaaaccacttttgagtttttagggctgtgcattcttaaacaactctgagtgacccttccatcattacaatttatcaactaaattagaaaacgtgctttcacagatttctagtacttgggcaaatttgttatttacgctcaagatgaagtgttgcttctagtgacagttttgctgttgggcagcatttgtagggtaaaggtgtttttgcttttggaatccattgggagatttaaaaaaaatatatatatatatacacacacacacacacatacacacatataaagtaaaaagcaggaagtctatgtgtgtgccaggggatcccaaactcttggcctccagcagtcaagagattttttaaaacctttatcttttaccgtcttgctttttaaaatccattatgtctttgtatagtacttgacatacatgggcagaagtcatgctggaacgtgaagatgggagcatggactttctggagcatcccaggtggggttcctgtggctgctgtaaggcaggaccgcagagcggtggctgcagacagcacggatttgctattatatctcatagtcatagtcctgtagggtagagtctaacatgggctaaactcaaggtgtcgccagggctgtgttcctcccggaggctctaggagaggatccccttgcctttcccagtttctgcaggacatctagcagcctcagctcattgtcccctccctgcgtttgcaaagccagcagagtagcatctctgtggccattcccacatggtcacatctcctcctgggatgctctccttctgcctccctttgcactttcaggagcccttgtgattccattgtgtccatctggataatccaggataatctccctattttaaggtctgctgattagcaactttaattccatctgcagccttaatcccccttttctgtgtaagctgacctagtcacaggttctggggattaggactcgcgcatcttgggggaccgtcattccacctgcggcagtggtaggctaaaccttaggcgtctgatattgtgaacctggctcactggcctttgtcttcttgccgactcctattggtatttgcctgagatgtttttcttttctttttcattcttttttcttttctttctttctttcttttttttttttttttctggttctgggcccacagtaggtgccttagaatcatgcagtccagttgccttctgggaatccattgtagtaagtggtagaggtttttaaagcagtcctaggggagatgcaattccctgcttacattcaagtttttcgggaagacaagtctgtttaggaaacataggaggttagttgcattttcctcattaatgcaggatattaaaatattcagagggaacccaggagtcctctcaagatgagtttaaatttctcatacttgtagaagttgttgagaaatactggattctaatttccagaactctggtggggaaggagactgtgaacctggtctgaattgagaatggggattgaggatttttggacttttgaaagattgacttactctctcccgttagttctgttgaactgctgcctaaatggagggaatgtgcatcctctcttgtgttgcgtggcaatgccgtggggacacttgggacatgagcaaaacgttgacagaggggagcacttcccggaatattattaatacagagttagttttaacttcaccttttgggcaaacttgacattatagatcttgaaataggattatttttcccttgctaagaggttagcaaaatcagtacagtgtgtctctttgacaggccctagaaagcactctacgtttgttaactttaaatttgggttggaaattgatgttattggaggagcaaggcgtgtttaggcctgatgatttttggatagcttgaccaaacccggtacagccaactttcccccaaaactactgtgtccttctcagtggttcctgtgcctgcacagggacccagcgcacaccccagtgtgcctctttgggctctggctaacttaggctgacatcctgatagaacgcagtgaccacctggtcatttgattacagcgcttcttccagacagcacgctcagaattgcgtttcttacttccagtcttcttgccctgtaagcattttctgtgagtcaccaaatcaaccacaaaatcatttaattttatggaagtggaaaatcagacttattaaaatactgtgtttttgttttaaagctcagaggtatagagatccatgaatttttttccatgccttctcataatgtggttttggtttagctgcggttcttccaggcgcagatgtcagccctctgcagatctgctgcatcagagtttatggcctgggtcttaggaatttgcaatttaaaataaccccttcaggtgcatctaatgcagcctaaatttggggccagctcatgggttgtaaactgtactgccctatacaatagtagcacagttctaagctcaagggactcaagggggtccagtaagtacagttcaccagagaaataacaaaagcatttgcagagggagaccagagcatcacctttgttagggcaaaggcttaacatagaggaatgtggcttctatgtccaggccagtgggcttcctaacacagaacatggaattaggcagacttaacatcccccatgcccaccctggtgagtgccagcatgggcttgagctgctcttcacactgatggtccatcctttggactgatctccttgtgaaggatacaatacagcaaggagcgggggcttggcttggcacagccagttctttacccaaactcctgccaacgctggcccttctttcttaccctggttggagtgtgtgagggtgggagaggcaggaggaatatgctggacagagcttcttccatctagaagggaatttcaggagtaagaaagcggcagctcttaacatacctgggagaaagcaagtgcttagtaaacagttgaggaatgaactaagaattttcagacagattttcctcttctggagcatttgcagaaccgcctctttgctcaagtgctttgttttttacagattcatttaaggtcatggttccagacactaatgtaaatcagcacatatattattgaagaagtagaatacctccaggcccagttgccttggagcaggaaaaacagttcatcctcattaccatccagaataatttatgttcaagataatacacaatcaatttactttttatcatattcgaatttgatttgtgtacacttttgagtttggatgtcagccacattgcttctgtgtgttaatctttatttacgggaataaatgggaagcagtcagccattttttattctttattggggaactgcattatagtggaaaaggtaaaattataagctaatgagaccagaggtctgtatgtatgaaaaccatcctcatcgcttcacagttgtctttgaaccagtttccctgggattgttcgaaatgtagcaaacgtggctcacggttaccctgacggggccagagcaatagggggaggtgtgggcacctgtatacatttgcgttgaaaaacgtacccgggctattctgaggtcctttcctgcccccagcctggtttctgggcctctctggagtctctctttctggcacttgtgttctggaatcgcttatcagcctggactccttcagcagcagctgccacagtgtctttgtagtcacactacacacctatatactccatgacatggagtgtatagaatgtttcccgtcttcctcgtcagtgctgccaggagaagcttcccctctcctaacctctggatagtggctggctctgctttattcaggcattgctttcattttttagaacagctgctccagtatgcttagtgtgaatgacagcccagcagaaagaatggacttgacactggagactgcaccactccacatttctttgtcccctcaagatgacttaactagctcccttcccttttccttcatgcaatagcctcagaagttcggctggcattgccaagttgttagagtgaaccttaacctgtgtatgactcagaattcacatctgctgtgtcagtgaacacacagatctctttgtgaacacatggttatcaagaggcacatgctcttacgtatcctgccggattctggtaaggcgctgcttgcgcagtaagcacttgtcaggtgcttatgatgcctgtgacgtgaggctgtggatgcagaatttgtggtctgaacatttttgagtagataaaaatggaaactgaaattggtgaagcagacttgtggcttttcctactttctcatctcttttatggatataactagaagctctgcttcatcaatgagtgtgttaaaacaatttgtttacaaaatcctatttattaaaataaaaatctgaaagaactgcgctgctgcttttcagtgctcgccactctaggaacctgtattcctcctcttgttcatcctcccttttcttcttttttgttttgttgttgtttgtgtgtatgtatgtgtctgtgtgtgtgtggcggggtggtgggggcggtgttgccaaatcttttgcactgaatctttgaagatgtcctgaaatacttaccaaatcactagagcgaagagaagcccatctgatttcttcatctcccagctgaggaaggacacactttctcccactctccagtgaaggcccctgtgtcctgtgggtgggggagctgacatcacactcagtgctgacatttcttgttccctgggtgggcgctgattccagatcctcttcagccccccaagcggaactgggtttctcttgaaggtcctaacctcagctcacaccacctgctactacctttctgggtcttggattttgttgttacccaggcccggggtcatcccaaaggctcttgatagccctgtggctgtgcttgctaatacactgtcctcatcttttgtcagcgaagtaaatccaataatgtttccttctctttaatccaagccagtcttcattgaaaacacttcacctctaagctctcaggctctgcagtctgccctctccaaccttacccctcatgccccaccttccctttgtccccatctttcccttctgttccagtcattctcatgggccatggagagtggaagcctgggagggctttgccaaagtccagttgcctgctcactttcctaagggccagagcaatgggggaggtgggggaggtgtgggcacctgtatacatttgtgttgaaaaaggtacccaggctattctgaggtccttttctgcccccagcctggtttctgggcctccctggagtctctctttctggcatttgtgttctggaatcgcttatcagcctggactccttcatcagcagctgccacagtgtctttgcagtcacactacacacctttaccccgatccactgacctgctgtcccggatggccctggtgtgttctctctgttcctagccgcagaaattgctggtgaatgtcaccaagctaagcggtgtagctttataacaagtggattcagccagctgggactggacgactgagagtttgcagcccctgctggaccctgtgtaactgtccagttcgcctagctattggtttggcccagtggttttcaattttggctgcacatcagaatcacctgggggaggtttaaaaccctacctctgcccccatgccctggggttcacacccagaaatgctgacttcattggtcgggggctggcaggcctggacattggcggtttgcttagaagctgcccgggtggttctcatagcagccagggtcaagcaccacggcctgttcttacctggctccccaggccccctttaatctccctctgcagcagattggcacacatcgcattgtggagcaagccatctgataattttccttaatcgtctttgaagatcttccctctgcctgttgatcctttaaggaagaagtctccttgccaggatcggcctctccagtctctggatcccttcttgcttgctctcttcagaacccatgaaacctctctggctgccttgacgtcagccagattggactgcccaaatagaaaggcagaaatccctgtcgaggccagacagcaaggatggagagaggcagggggtgaaatgaaacacaccaggaggagtaaagacaaggccttctgatgtcagccaagagcaggtgtggattaggcagtcctaagtttgagtcctggttctgctattcattggccaattgtattctccctccctctacgatgaggttaattacagttacctcactgggatttgtgaggatggaatgaggtaacaaaacataaaatactatcagtacaatgcccagctcataatgagtatgcagcaaatgttcaccctttaaaaaatgccacggccgggcgtggtggctcgcgcctgtaatcccagcacgttgggaggctgaggcgggcggatcacgaggtcaggagatcgagaccatcctggctaacacagtgaaaccccgtctctactaaaaatacaaaaaaattagccaggcgtggtggcgggagcctgtagtcccagctactcgggaggttgaggcaggagaatggcatgaacctgggaggcggagcttgcggtgagccgagatcacgccactgcactccaacctgggtgacagagcaagactccatctcaaaaaaaagaaaaaaagtccctttctaccttcaaattcaggaaaattttctttagtccaacagatgtaatccccccctcactcccccatccccactggtatctttatgtactcaggtgactattaccatattctgcttggactgtttttatacattgcagataatttgaagatatggacttaggtaggtttttagatttataataattaagtgatgtttttctatcaagtgatgaaagtttcaacagatatttgttaaaatttaatttagccaaaggaagacatgccatttcagcaatgtgatctaagtaaaagtgtcttctcttttttttggtggggagaacagagtgtagaatgatattagtaagatagagaattgatgaccaaaccataactgctagcattttagtagaggacacaacagagaaaggattctcacgtgtgttattaggatcttggatgagagtgggctgttattttaactttggcccctgttggagcaaattactctttgggggcccggttttcctcaggaactacctacagaattcagtgagatagattttagaacccttctgaatgctgctggtttggagattctgtctgtagcaagttttgttcagttgttaatctttctttcttttctttcattctttttttttttgacagggtctctctatcacccaggctggagcagtggtgtggccctggctcactgcaggctcaagcgctccttccacttcaactgcccaagtagttagaaccacaggcgagttccactacagctggctaattaacaaaaattttttttgtagagatgaggtctcactgtgttgcccaggctggtctcaaactcctgggctcaagtcatcatcctgtgttggctttcgaaagtgctgggattgcaggcatgagccaccacacctggccaactatatgttttctatgtttattatattttctgatttgtaatgtattttaaaattatcccaataatatatgaatgcaatcttgaaaaatactcagcatagcctttaggctaaaaagtggaggtctgccatttctctgccttgccccattcccttcccatgtcttattttccctgttaccaggttggtgtgaagcctttgagacctttttctctgcacacccatatatgtgttttttctatgtttttatagtattgtttcatttaaaaaataaactaggtttttgaacttgagaaatttcaactcgttctgctcagagctttgttttattaaaatcagtgcctgggagttgctcaagtctttgggctgtgtcgccctctagtggtagccctttggcttacagctgccattcagccctagggctggggtggaagtgatggttttgtgcccacaacctgatggcagggttggcagtgtttagttgctgacaagtgtctaaaactcaatctaggccgggtgctgtggctcacgcctgtaatcccagcactttgggaggccaaggcgggtggatcacctgaggtcaggagttcgagaccagtctggccaacacggtgaaaccccgtctctactaaaaatacaaaaattagccgggtgtggtggcgggcgcctgtaattccagctactcaggaggctgaggcaggagaatagcttgaacccaggaggaggttccagtgagccgaaattgcgccattgcactccagcctgggcaacaagagcaaaattctgtctaaaataaaataaaataaaataaaatataaaagtctagtgagccctggagtggtgtttgccttgctacctccaacttgccctttttaagagacttaaaatttgtggtaacttttcacatgatgtgtatttagatactgctgagttaatgaggctgctatacctggctgatttattgtttgctttcaaagcagttgtcaagtggtgtccacccatcccactgatggattttttttcttttttctttttcttttttttttgagacagagtcttgctctgttgcccagactggagtgcaatggcatgatctcggctcactgcagtgtctgcctcccaagttcaagcaattctcctgcctcagccccctgagtagggattacaggtgtgtgccaccacgcctggctcatttttgtatttttagcagagatggagtttcaccatgatggccaggctagtctcgaactcctgacctcaagtgatccacccacttcagccccccagagtgctgggattacaggtgtgagccactgcacctggccccactgactgtttatatctgttatactgttcttgcctctgtgccttttgggttccctgtcatggcagcatccttacatcctccaccacctctgaatgttcccgcaccttctctttctaatggaagcctggctggcccttgaagacaccgccaaccctgctggtctcttcacagagtatccacccagcaacctggcctgtccattcttgacttcttctggtccagctgcctttctgtacctcattttagtgaccctttttagatctcgtccaggttagcctctagaaccctgatctcaggcaccccactctgcgatcttccgttcccagccttcccacttgaaatcgtcttggaaatcccgggctttgccaatctgtggacccaccaccttttcaccccctttccggtgccctcaggggactttgctgtagcctgaacctcatggtcccttcctgtaaacagccaaactgctttgtactccctgaggagacccccgccccggttggacaccccaccctggttaaacccactttcacaattattccaaaactgccaactggacttgcatctcttcagatcggctgtcatcactcattgtatcaggaatcttattacacttttgcagcagtttcatcggttcagagaaaactctttcataccttctgctcatcagttctccacacctcccatcattctcctagctgatgactttgctgcttgtctcattgaggaaagaagccgttcagtcagtgagaccccctgtctcgcctccacctttccacctgctgccgcggaggcttccccagctcctgtctcactcaggccccttgccactctcaaggcatcttcttcctgcttcccaaggatgtcactcctgcagttaaccctttttcctcctgcattattcgtttcttcctttcttccgcatccttccaaatagcgtaaaaacaggccttatgacgtttctctttaaaaatgtccttaccagtgccacgtccctcttggccactgcccctgttgtgcctcactccgtagaaagaagtgacctgtagagactatatcctgccctctccagcgcctgccttccgattgccccttccagtctagtaactgtgtccattccttctccaatgaccgggtgacaagctgtcccttctgagagtgccagagggtgttccccgggtgggaggccggatgtcagtgccagctgtgctgtcctgggtgagcctgtgagggaccacatctggtcagactcgtgcatggcctgccctcatcttcctccgcctgcggtgcctttgagagcattgactccactaagcccgatttctgtgtggcatgttgtctgttcctccccggcctcctcgatggctcctccttggtctccctctggctactcctctgcttctccgcctccaagtgctgctccaagtgccttctgtgctctgtctccatccatcccaaaccttccaacactctctgtaagtggaatctcaccttgaggctgccagcccagcctcctcacctctgtgctccatctttagagagtcacctctctgtctggcattcccacttgaggaccaagatgattctcaaccttaacgtggcccacatggagccgctgctcttcctgcccagatctgccttcaccaccacatcctgcccactgtcactaaacggcaccagctcttacctggtttctcagtaaaaaaacaagtttatcatcttccctcacatactttattcaataataatcactaacatttattgagtgcttcctatgtgcctgacaccattctaagcatttgaagaagagtgtattaacctgcatgaggaaggctattaaaacctatgtaattaattaattaatggatggatgtgtggatgaatgaatggcagggtcttacactgtcacccaagctggagtgcagtggtccaatcatagctcactgcagcgtcagactcctgggttcaggcagtcctcccacctcacccttttgagtagctgggactacaggtgcttgccaccagctaatttattaaaaaacattttgagagatggggtttcatgatgttgccaaagctggtctcgaactcatggcctcaagcgatcctcccactttgacttatagattgtggggattagaggtgtgaggcatcgcgcctggcctgtaataacctatttgtgaatgagaaaggtcaggcacagagaagttaaataatttgctcacagaaatttcctgtgttgcagctgagatttaaatccaagcaatgtgtttctaagcctgggctcttaactgtaacactgtcctcttccccccaccaggagggtgtgtgtgtgtgtgtgtgtgtgtgtgtgtttctgaatctgaccagttgaggcaggctttcatgtcattctctctggccacccccttctttgttcacctccagtctttggaatagtcagagcgatgtgttcatggtagaaatgaaatcacatcaggtcctcagtggcccatcacatttagaactaaagctcactcttgcctcatgcctctgagcccttatatgatctcgagtcaccaccccactgccagcctctccactctcttctctgtgcctcatgcagcccaggaaatataatttggaccgcaaatgccagccacctatgtacggtaacttttctagtagtcacattaaaaagaaaacaggtgaaatgaattttaatgcattttagttaactcatgatatcaaaaatatttcaacatgtaatcagtattcacacaaagattaatcaagtatttaacagtcttttcttttgatccggggtcttggaagtttgacctaccacctctcaatttagccagccacatctccagtacttggcagctgtttgtggctacctcatggacagggcaggtcccgccacccgggcatccgtctgcctggcgcacgcaccaaacgggttccagtctggggaagttggcatctgctgttgttacttttggtcagaacgcccttcgcctgcatcctcacggggctgactccctttagccttgaaggggaccgttgctccgagaggcctgaacactccagctgcagctttctccccagtcattattgagatcaaattcacatctcttacaattcacccatttaatgggtgatgcaatgcggtggcttttagtatattcacacacatgtgcagacatcaccatagccaattttagaaaattttcatcagctgaaagagaaaccttgtatcctttagctatgactttgtgattccctgttcccctgagcccctggagaaccctatctttctgtctctgtaggtgtgctgattctgaatattttgcataaacggaatcatactagggggtcttttgcttgggacccctttcacgtggcgtgtttccacggcccatcccgtgtgatagcatgcatcagtacttcattcctttttatggcagataatagcccattgtatggatataccacctgtttttttaaaaagtccattcatcaattcatgagcatttggtttgtttctactttttggtagaatgatgctgccatgaacacttgtgtgcaggtttttgtgtggacatagacttaggaatggaataaccatggagttacggtaactctacatttaagcatttgagaagctgctggcctgtttttcatctgcaccatttgcattcccaccagcatcaagtgggagctccagtctctccatatcctccccagcagtcggttacccttttctgttgcctctgtagcactttctaaacataaaattagcttatttctttgcaggtgtctattgcaccccccaggaatgtcagttccctgcagactctcactctgccttggcacccgcaccccagcacccaggggtgaggtgcctgcctgggcagccctgtcctcacctggggttgactgaccagagaacccttgcgattctctctctgggtttctgtctgcattcctgtcgggataggtgagactggggtgacggctgctcgcggcttggtcaccttcttctctgcttacctgttcatgctctcttgcttttctctgatagcaaaccccgtctcctgtcatcctccctcctggcggaccagagctatactggcccataaaggagtgctggccacaccaggctagattccagttgagcttaaataaaacaaatagaaaggtcctccgtggtattagccatattgtaggtgctccgtagacacatgcggctagtggctgcccacaggacgctgcagatgtggacgtccccgtcatcacaggacgacattctgtgggcagcgctgtatttgtttacaaacacaattctttggctgtgtgaaggttcaggatgatacctttgccattatgattcatttattcatttcaggctggacacggtggcccacacctgtaatctccacactgggaggccgaggcgggaagatcgcttgaggccaggagtttgggaccagcctgggcaacatggcgaaacctcacctttatttaaaaaaaaaaaaatcggccgggtgcggtggctcacacctgtgatcccagcactttgggaggccgaggcaggcggatcacgaggtcaggagattgagaccatcctggcctaacacagtgaaaccccatctctactaaaaaataccaaaaattagctgggcgtggtggcaggtgcttgtagtcccagctactcaggaggctgaggcaggagaatggtgtgaacacgggaggcggagtttgcagtgagcggacatagtgccactgcactccagcctgggccacagagtgagactccgtctcaaaaaaaaaaaaaaaaaaagaatcaacatttatttatttattatttatttttttgagacagagtcctgctttgtcaccgaggctggcacgatcttggctcactgcaaaccccacctcccagttcaagtgattcttgtgcctcagcccagtgccaccatgcccggctaatttttttgttttgttttgttttgttttgctttgctttcctttgttttgttttgtttgagacagggtctcactctgtcgcccaggctggagtgcgatggcacgatctcggctcactgcaacctccacctcctgggttctagtgattctcctgcctcagcctcccaagtggctgggactacaggctcccgccactgcacccggctcatttttgtatttttagtagagatggggtttcaccacattggccaggctggtctctaactcctggcctcaggtgatccacccgcctcggcctcccagcgtgctcatttatttattttagcatcccttcttgtgcctggttgtaaagttcttcttatcccaggaaacttaataggtcaaagaaccctccccttgaggcagtttggatggggctggctgggaattggtatgtccagctgcccatatcgtggcctctgagtcaattatacaggcatctcggcaacttgaagttttgagtcccaaaacaacagattccatagcataaacagtgcaacgtaaatcctgtcccttgtccctcttccattggatacccttgtttatgttctctctggcaactgcctgtagcagggacggatgctggaaatcctggcggggccacgtcttctgtgctttgtaggcagctatggctggatggtgcttgctgtttctgtgtgtaaatgttgggatttttaaaagcccttccccgcttaatgcgttgtggttgagcagcacatttaaatgcctgaagtgtaagatgaagtctcttggatgtagagggcagtggtggtttttatttttcctggttgaacttggcctttggattgctgactgcgagctcacggtactgttaatgattttctacctacagtcacctgctgtgctgagcacatcaaatacagtgcggttagttccaagctatgaagcgcctgtcacgcatgtataacaggcagacctcattaggagggggccttgcataggggtcacattttccagcatttgttttcaaaatggaaatccagatcacgcatttgagattaaaataaaaaaagcggcctgtgctttatcattttctttaacttacatgcctgctggtccagcccagattgctgatagaggaagccctgagaaagttgcccagccagttgcccgtgcttcaagacacaaagggctgactgaggcatccgtgcctacccttggctgctgctgctcagcctgcttgcatctcgtctgttttcagttatcagtggtgtgagaaaaacacaacggtggattcagaaggagaaaccaagtcatctgcatttggcctcagtgtgtggactgtcctgaaatttgagtacagatgtgttcatgtcctgggattagataaaaagagaggaaacacacagtgaattcttatggtctgtcatttcagttggccatcttctgcccctctgttctggaagcttctccactaaaatagagcacccaacttggttttctacttgctttctggcccatcttgagttggaggaatcatgtgtttcagaactcttgctggtggtgggtgggagatcaacaaatgatttcattaagctgtgtgttcttaataaactttgggaagatttgtcgcagagaaactcagatagggaccttgtgatctcagcagtcatgggtttatcttgtccacacgcgtggcttcattgggatttggttggttgcgatccagcagaactgtggcggtgttgggctctgttggggtttggttgtgagcggaactgtggtgttgggctctgttggggtttggttgactgtgatctagtggaactgtggtggtgttgggctctgttggggtttggttgactgtgatctagtggaactgtggctgtgttgggctctggagtttggttgtgatctagtggaactgtggcggtgttgggctctgttggggtttggttgactgtgatctagtggaactgtggcggtgttgggctctgttggggtttggttgactgtgatctagttgaactgtggctatgttgggctctgttggaatatggctgtgatctagtggaactgtggcggtgttgggctctgttggggtttggttgactgtgatctagcggaactgtggctgtgttgggctctgttggaatttggctgtgatctagcggaactgtggcggtgttgggctctgttggggtttggttgactgtgatctagtggaactgtggctgtgttgggctctggagtttggttgtgatctagtggaactgtggcagtgttgggctctgttggggtttggttgtgagtggaactgtggtgtcgggctctgttggggtttggttgactgtgatctagcggaactgtggctgtgttgggctctgttggggtttggttgactgtgatctagcggaactgtggctgtgttgggctctgttggggtttggttgtgatctagcggaactgtggcggtgttgggctctgttggggtttggttgtgatctagcggaactgtggcggtgttgggctctgttggggtttggttgtgatctagcggaactgtggcggtgttgggctctgttggggtttggttgactgtgatctagcagaactgtggcggtgttgggctctgttggggtttggttgactgtgatctagcagaacagtggcggtgttgggctctgttggggtttggctgtgatctagtggaactgtggcagtgttgggctctggatttggttggttgtgatctagcggaactgtggcagtgttgggctctggatttggttggttgtgatctagcagaactgtggtagtgttggcctttgttgggatttggttggttgtgatctagtggaactgtggtggtgttgggctctgttggggtttggttgtgatctagcggaactgtggtggtgttgggctctgttggggtttggttgtgatctagcagaactgtggtggtgttgggctctgttggggtttggttgactgtgatctagcagaacagtggcggtgttgggctctgttggggtttggctgtgatctagtggaactgtggcagtgttgggctctggatttggttggttgtgatctagcggaactgtggcagtgttgggctctggatttggttggttgtgatctagcggaactgtggtagtgttggcctttgttgggatttggttggttgtgatctagcggaactgtggtggtgttgggctctgttggggtttggttgtgatctagtggaactgtggcggtgttgggctctgtgggtttggttgtgatctagcagaacagtggcggttttgggctctgttgggatttgcctctgatctagcagaactgtggtggtgttgggctctgttggggtttggttgtgatctagcggaactgtggtggtgttgggctctcttggggtttggttgtgatctagcagaactgtggtggtgttgggctctgttggggtttggctgtgatctagtggaactgtggtggtgttgggctctgttggggtttggttgtgatctagcagaactgtggcggttttgggctctgttggatttggttggttgtgatctagtggaactgtggcagtgttggcctttgttggaatttggttggttgtgatctagctgaactgtgatggtgttgagctctgttggggtttggttgtgatctagtggaactgtggcagtgttgggctctgttggggtttggttgtgatctagttgaactgtggtggtggatcccaggagctgctgctgcttgtgcgcttcaaagttggattttgtgtttttttgtgtgcagatgcttcttggaatcttgcgttgctgtatgcctgtatacctggaaagttgtgggaagaacagtttaggattttgaaccaattttctcaacaagtttgattatttcatttgagacatgttctgatgtaaatatattctgaaaaggtgagatcaaacatccactttttactctaaagcaggtccccttgctcctctctgctagtgcattctctttcctttacagctccttctcctttctgaagcaggaattaagctgaagtaactcagaaagtgccagcgttaaccccaggggacagaaaccacagacccagggctgagggattgagtttttaatttccattattctccatcagtgcgttcagtcttttgaacttaccctgactggtattatcacttgaaagttgttgttattgttgttttgatggtagtggtggtggttttttgccacccacaggagagaggggattagaagaaaaagaccaatggagtttccttgggattaattaaatgtggggctgccacacaggaatgggtccaagggctgctgtatttaaataacttacttattttgcagaggtgaatttaacctaacatgtactacagtgatggagtaaaccttttcctgtttggaatatcacaaaaggtacttcaataattgcggatcttcctttgaaccctcctattgtcagatggggtagtggtacagttccttgttccagaatgctcttagcaagttgattaatctgtcacataccccagtttcctcattcacaaggtggcataataataggacatagagttgccgtgaagtttaatgagttaatgaatgtatgatgcttggcaaatggtaggggctcaagccaaccctcgttgtcttactgagcttagtgggccttggacctgctgaggactttgaactgagcattccgtgttattctcttttttgtttttttaaggggatgagagtgtgtgtgatagagttcatgacaatattttgtttaagaaaattgtcaaaacaaagttcaaatgcaatggatggaaagtgatttttaacatgtagggtaactagagatttgagatcagacaaatcgattaggagatcaccaaacccaaacagagaatgtgagttaactcatacttaggagatgaatgctggctttgaagaccatagcgtgcattttcaaaccagatggagaggccacttttctctgcagatttcagttattcgtgatgttaaatgactcgtcttctcttacttgcctggcatgtggaactgagtaaattctgtcaaaagaactcactgaaggaatgtgtaacagctgggaattggatgtcttttcagatttgggagagcctgtgttttgactgtgatggaattcttatggtttaatatgcttaaatattactgtttaacattttgacgtttttgaggacagggataattaggagaatgcacttataagtttctatgccaactgtttccactgctcccctgtttacatggtcccagggtttatacagggctctctgtagccccacaatgaatcttgccccagtgagcgggctctcacctcccttctatagatgaggttggagctcagaagaacgtagagaaacttgtgcatagttattatgccagatttagcagctggaacaggactggaacctaaatcttttttctttagataatatgttctttgcattaatgagtttgtgggttttttgggaggcgagaaatatgtgtaaataagaagtaaaaatcctaaattgcaagttgattttttttcttaatatagtaatacgtataatgcagcaaacatatcatttcccctccatgcttgctagactggcttatgcacacatcatgatgataatgaaggagctaacatagcaagcactcactctgtgctcattcataaggtggcataataataggacacagagttgccatgaagtttagtgagttaatgaatgtatggggcttggcaaatggtagatgctcaagccagtcctagttgcctttctgagcttaggaatcatggaatcatgctctaaaaacttcatgagtatgagctcgcttcatcctcataacaactctaggagatagacgttactttatgtccattgtagggatgagagtgtgaggtatgaaaggaagtgagcttaatattctttatttttattttttatttttattttttgagatggagtcttgttcactggcccaggctggagtgcagaggcatgatcctggctcaccgcaacctccatctcctgggtttaagtgattctcctgcctcagcctcttgagtagctgggactacaggcgcgtgccacaatgcccagctattttttgtatttttagtagagacggggtttcaccatgttggccaggctggtctcaaactcctggcctcaggtgatccatccgcctcgggctcccaaagtgctggcattacaggcatgagctaccgcacctggcctaatattcttaatttggctgtcggttgtcacccaaatcagttaaagcaattccatttcttttttttttttttttttttttttttttttttgagacggagtctcgctctgtcgcccaggctggagtgcagtggcgcaatctcggctcactgcaagctccgcctcccgggttcacgccattctcctgcctcagcctcccaagtagctgggactacaggcgcccgccactacgcccggctaattttttgtatttttagtagagacggggtttcaccgttttagccgggatggtctcgatctcctgacctcgtgatccgcccgcctcggcctcccaaagtgctgggattacaggcgtgagccaccgcgcccggccgcaattccatttcttaagtgaaaatcagaatttcttttcttttttccccttctattttttcttttaatcttttttcttttgtcttcaagcaattttcatttttttttttttttttgatattcagggaacctgaggcgaatgaaggggaggaacctgggagctactgactgtgattacagtggatattcacaaaggaagacctttagtacagtgtgaagtagtgagggaaagggtgatggagtaggagggatttaagtaaaacctttcaggtttaaggtcaatggaaagcgaaggaacattctagaaggacattagattttccttagagtgacattagagtttctataattggactataccctttagtgcctcaaatcaagggtttcacattttctttttttttttggaattgcctgctcatgtatttccatctccttaaaggcaagggctggccgccttatttggctgatactagcctccatggcatcagcctgtccagtggaagtcctgaaacagtacacgatgaatggataaatgaatgaatgaatgaatgaaatgaatgagggaagaaatgaatattgtgcttccagaacgaggagagaagggacgatgatgtggcaaattggcccagcatcttaagatctgtattgactttagcctcatgtggtagtttaatgatactctctcttactcagggaatgtgccttttaagctgtggtctgtggtcaatgtgtgtgcacatctctgagagtcccggctgtgttgtgtttgtgatggctcccatatgtggtttgcctttgtatctgattgtaaattaaccttgacatgtaggtcacctgaccgtgtatggagagagaaaaatcactttcttcttctctacaagctatgtgagtgcagactgaagttccgagttgtgatctcaagcagtctgcagaaactaacctttggcatacttggccacagccgacttctttctagtaaattcccactggttcttggcttttcttgtagaattaacacatttgcaaagttttcttcattggtattcctggtacgtggactggaatattcttcatcccttgatttgtgggatcgttttgtctttgggccacacttgtcatgggaggaaagtcacagctagactgggtatggaaagaatggaagtgtgtctcctgcagggagagcccaggttattgagacagtcttggcccgtgtttcttgaagaagacgttgggttttgttttgctcattgatggccataccccttgtgtggttggccaggaagctgaacgcttgctcccccttgtggctaaatacaggtggttctgctggcaaacccagtggtcaattactgcatctactaaggattaagaagattataaatgtaaactcagcttgaaactttttgtggcttagaggtaaagcaagaaaataattaagataacaactcacatgctgagggtgtttcatgtgttattattgtggatgttaataacaattttggctctctgtgggaagccatttccttcacttaatcagttggcaaagaaagtacatcagggaagattgttcaccctgagccgagaaagtggagtttcaagtaagaaccctgctccgcatcctgccactgagttgagatcatctatttgatttagctactgataaagtgtttttaattacaaattgtctgcttgcttggggactgacacaaacacttgttttgttttcaaagtgccttctctccccagtgttgggtttggagtagagcaagagtaacacagaggttgcagtcagtgtcttccagcgattttcattttgtttgatatgcggggaacctgatgctgatgaaagggaggaacccaggagctactgactgtgactacagtggatattcacaaaagaaggacctcagtacagttccaagtagtgagaggttgatggattaggacagatttaagtaaaacttaacaggtttaaggtcaaagaaaagtgaagcaacattccagaaggacccagaaaagccgagcaagtcaggcactgagatcttgggattgagaggagttgctggttcagacccagcactgttctggaactttcttttgggtactctttttttgtttcatcgattcctttaaaaggtacaatccagaactgaacatgtcattccacaagtggcccaaccagtgttgtatacactgactggacaggttttgccactaaaatggaataatagtctggttttcctaattccaggaaaggaaaatcaaggaatagatacattttttaaaaaagcatttaaagaatttctcctgtagacattatcttaaacttttggtccctgccattgtatgtgtatcttgaatccaagggtaatacgatacgcagtctggcaaaagcagtcattttaaatgattgagcaatatttagtgactttcaaagagcagagagcacaacttggctaccatagaagctccaccatgatgggcgcagggtttcctctaggctggaagttgtgttctggttatcttgtgagagaaatgcatcctgtgtgatttatgtggattcatttattcttagaggaaatcagacaaaaaccatattgtaaggcccaacccatctaaaaagacaatagaaatgagttctgtgtgtttttcagcagggcctcatgggcaccactcgtaagtccagaatctcttccaagaacaggaagtttctggagggcagtggagaaggggagtgagggctcagctctgtgaggtcgaggtgggtgtgaggaccagcaccagtggggagtgggtttattagctgggaaaggccataaggatgaggaagagaagcttgtgtttgagaggataacagggaggaaaagtcgccgagcccagagtgtgtattcactgcctgtcctttggaggcagccgcttccacctcttttgactgattcttccaactcgtatcctccagtctccaaaacatgattgtggtgcagctgcttgaattttcaaacttgatttccattttagaagttaaggatttgtttttttttccaaccacataccctgtcgctaccacatcaaatacaggtctctcatactgttggtcagctccgttttccgtgttgacctctgatactctgtaaacactcttgacacgtaagctgggtggtttatataccaccattacttttcctgcccagctttgtctttttcttccttgtattttatttgtaaagattccccagctcgtccccagttgtgtcagcctcttttcagtgtgctcagacccattaggtataaggcctatccatgttcctgaggaagtctggcccagagccgtccaggtggtctgacctgggcagggccccgggtctgccatcacccagcccatgctctcctgccgccccactgaagacttccttcacctctcttggacgttagggtttctctttgatggctcctctctttttctgggtttctgatattttctggttgagtggtgctactttcttctaacctatttttatttcattaaataaataggattcactaaatggatttcatacccatgggttgtatgatttgcactttgaaaggcactgggctagatgaccactttgagtgatgctgaggcattgctgggtgacttccttctttccttcttccctcccctcctcctcttccctcccctcctcctcttccctcccctcctcctctttcctcccctcctcctctttcctcatgaagcatgtgcacaggtgcatccctgatgctttgatcaggtatggcctgaaagacaagccattttagttagtttttggatacattacgaagtaatgtgggaagtaagcatcttcacctgtccctcttccctccttggctgagggacagtgtcctagtcagttccatgtgctgtgacagagtaccataggctgggtggcttaaacaaaaaacacttaatgctcacagttttggaggctgggaagtccatgatcaaagtactggcatatctggtctggtggggacctgcttcctggtctgcagatggccgtcaccttgttatatccttacatgatgagagagagagaaagcaagctctgttgtgccttttataagagtactaatttcattcacaagggcgccatcctcatgacctgatcacctcgtaaaggctccaccttccaataccgccatcttggggattaggatttcaacacatgaattttagggggacgcaaacattcagtccctgacagggttaggcactgtgtggctggcaatcaccaggatgcctggagccctgccgggaccacgctggctcatttcagccaccctggatgaatcatccagcctaaggcccatgcctggacattctgggtcctcagtgccttgcctttattttacctgatataatccttcaaacgaaaatgcttgtacttatttttgatcacttaatatacttggccatttaacaatacagattaaacttgtgttattctgttagaaaactgagagattgttttctgtagtctttgactgcatgcatagtctagggctggacttgggaggagaggataatttggccacaataggattccttattatctgtctcttccctcccaacccctcccccgacccccgccccatacaggagaccctcagatacatttctgtcagtaccctcagttacatattttgggagacgtaatacttaatgaaccaaaactctgttttgctggcagggaaaaaaattgggctgatacaatcaagataatcctatcaactttaggattattaggaatgttgataatcctatcaacattctatcaactctgtaatcagaaaaatatatttaaaataatgcgtgtttgttaaaaataaccaaacaaaatacagaaaaaagcaaagtaaaaattgacaatcccctaactccagtgttggtagttagggacagaagaagggtggaggatgtcttttgtctgtgttacatgattacagcaaaagtcactcttcattctggtagagccatagaaatctggccgagcagaggcagctgtgcctgaggagcctgacttcgaatcagctgtgttcatctttgctaacctcccaaagggaggaagctcaggaaaccaccgtagaaccccctaaaaggggagggtggctacagctgagcaggtgggggcaggcaggagtggagagaggcgaggatgatgagtcaggcaggtgagatggaggctttgtaggttatgttaaggctcctagacttagcatttcaagcagggatgtgacctgatcagatttatattttgcttgcattgctgatggacattggttcagtgctcattgtactggaagggtcaagaatagaggcagggacccaaatttagggggcttcccagggaatccaggggagaggtgttgtggcctggactagatttggaacatccagaaggggactggagcaatgacatacctatacctagtcccagagggccccgatctagctaaggacagagcgtgcagtcttgcagctgctgggctgatgacatgctggggagtgtatacctgggaaattctggtacagagataaaggaaatgctcaagcctccacctatgaatttgcccggtgattaaaatcatacttcctaagctttatagaagccctctgtttgtcccacaaagggccactagcacaaggaaatacataatgtgttcccttgtcattttataaaaatgtagactggtgctgcctgctgtgaaaatgccagtcaggttgcttccttcatagtaatcagtggattcttttgtccatttctgagtggaggattagccctctgtttgccccacaaagggccaccagcacgaggaaatacatagtgtgtccccttgtcattttataaaaatgtagactggtgctgcctgctgtgaaaatgccaatcaggttgcttcctttatagtaatgagtggattcttttgtccatttctgagtggaggattcctttccataacgtggtgtatttgcagtgtttctctcagaggaggagtgcctttctggtgtcatctgtcctgttggtggcagagttctgctgctgaattaaacctttgtgtcggccttggccactcttatggctctgctggaggtaaagccagtggagtggccttgtggcatttgctccgagttgttgctcatttttctgagattatcagaggccttagagggaagcattgaggatttcattatgctccgataactatcacgttgtcaataatatggttctgataagagtgatgggggatggtggggttttgtgagttgacagacgtgggtttgagacccagctctccagtcagaagccagcgccaggcctgtttctcttctctgagttttagtgtcctcaggtggaggggaggataatattaataacaccttcctgatgtggctccactgggctggccacgccatgggcacccagcacggggtggctgccctggttcgtgttaaccatcagcagggttggagagctccctccttactggtgttggaggtcattacctggcgggggatgtggtagataaagcaccttttattgtccctacacaaggcaactatggggtaacacaatataagttattcagattagagaaaatatgaactcttgctacagtgttactgcagacaggcacatatggtttgttaggatgacatttaaaaaaagtcattttgagttacagaataaaatcaaacaaaattcctttaatcaccagggctgggatggaaataaggcaaaatgttgattcctttgaaagacaatttttgggttttttttgttttttttaaaaaaactttatgtgttgatggtttactctggtctagtcgttcctactcctattctgaaagcaggccttgaattcctgattgtgtacaggattgtgtacaaacaatcaggaattcatcattcatatgaagaagttctgtttttccctctagtgtcatgaatattttcatgtacgtatatgttatgtgactagtgttaagaatgcatgtattatatatgtgcatgcgtctcatttacattgaatgtagctaaaaggaatatttgaaaagtataccttgcctgtctccaatttctacatttcaagttaaaaatgggaaataatcttagaatccatgcctgtggttcataagcctggctcagctcttgcattcccagctactgtctgacgaaactcacaggagctgtgaaaacaacgctgttttgtgaaagccaagtaggagcttagggtcatggcaaacttcagagaaatgtaaaggagcaggcactgtgggttttgtctaccccacccccccgaccccactgccttccaaaatttctttcttttttttttttttttttttttttgagacagagtctcgctctgtcacccaggctggagtgcagtggcgtgatctggggtcactgcaagctccacctcctgggttcacgccattctcctgcctcagcctcccgagtagctgggactacaggcacccgccaccacgcccggctaattttttttttattttttgtagagacgggatttcactgtgttagcccgtacggtctcgatcttttgacatcgtgatccacctgcctcgacctcccaaagtgctgggattacaggcgtgaaccacaccgcgcccagccccaaaatttctaattgaattttaaccttccacttttaagttctgatcctgatttataaaaacctatgtaattttcttcagctttcagaaggaatgtcttgtatcttcctatgggggtgttgggggaactgatattgacagaggtcctctgacatttcatagcctggcaaatagggtcaaacatgttccagacctcagaggattgctgaggatagctttctacttaagctagataaaagaagttttgggaatcttaccttgcactctgttttgtagaaacaactgtgtttaatatatttctcattactggctgaatgacctgtatgtgttcaggagatctctctatttaccattttaatgccacatatttaatgagcattcaggcccagactgtgaagactctggaaatgagaattttgtttcctatctcctgtgctgtaacaaaagcagcttaaaaattgcagtgtatagacctcaccttttatcatttttttttcagatttttaaatattaatattaagggtctttatctcagatgtttgttgtttaccaggtcatcagtatctggacgctggcagggtccttagcaatggagggagggagagggggtccagcctgcatgattggatcagtgttgaacctgtcccacctgtggggaagaggcagcatgcggagcagacaggtgcctgctgcaggtcaggagagctggccccaagtcctgacttggagggaaatggtacatattaatatcctttagtgccaggtactggcgtagctagtttatatgcatcacttgagcccccttgcatcactggcatcacttcaagatagacaacaaggggaatgcacatcatatccctgttcactggcgttcactggtagggaaactgaggcttaataatgtgcccaggtacacacagctgataagtaaccctgcaccctcgatctcacagcatgacattggaatccacctcattagacagagctcagctgcctattctgtcaaaaatgttgagttgtatcagctgcagtgtctgtagtattcctagacatttctgtgattctcataagtatctttgaaagggggccatttagtttatttctgcatttctcccttatctgccgaaatgcccgcaggctctgggacaagctataaagctctccgtgttatgctgtgttgcaaacccagtgccagtaatgatgcagtgctatttaaagataagaaagcaagctcacagagggagagcgcagcaggatgtttatgttccagaagcataaacacatgacctgtgcccgtcccgtgttcttcgtccatgtccccagagaggccgtggatgggatggtgcaagaaacccatcaggaagcagaattaatccttcctgcgggtggtccctgtgaagaagacacagcggccggtggtgtgacagcccacagctgtcgaaggaagggagaagagagggaccgagggccagcaatagggttttacagctacgtgctaggttgtctcacatctaggaaagagaatgttcatattatatagaaatgggcattttccctgtggcctgatatgaggtatccagaatattcctttaggtattattaagtcataggtttctgttttgatagaaacagcaggtggttcagttagtatttttgttgttgtaatagtagcttagatctcttgtttttgttttctttggccaagacagaaaacattctgccacacacattacttcatgactctggttatatattgagagcagcattaaaaaaaaaaaaaagtccaatttagtccattaggccattcttgcattggtataaagaaacacctgagactaggtaatttataaagaaaagaagtttaattggttcttggctctgcacgctgtactggatgatacaggatgcatgatgctgacatctgctcggctactggggaggcctcaggaagcttctaatcatggtggaagatgaagggggagcaggcatctcacgtggccagagcaggagcaaggggttgggtcacacacttttaaacaaccagatctcatgagaactcaccattgccagaacagcaccaagccatgagggatccacccccatgacccaaacacttcccaccaagccccacctccaacaccggggattattgtcaacatgagatttcggggacaaacatccacactatgtcgtagccttaaggggatcttacctctttgaagcattgtagagttcagagagtaggacattttgtctactgtattttaaaatactaaatgttctgattatgaaagtcagtcctggaaaaaaaaaacaaacaaacctgaaaccatagatgaagataaggaacaaaataaaaattacccacagtctccctcgcgtgtaccgcacagttcatgttttagtgtgtctacacaccatttaatgcaggtggacagactcaggggcaggtgtgccttgctactgctatgtccacagcacctggcagagtccctggtacagcataactgctcagcagttgggtgctgagtaaatattaatacatgtgcatgtggtaccagtcagggcccaacagagggacctcatgcgaggagttgctccacaggtgtggaggatgaaagaacaagttggggcgaccctgagagagcccagagacaagctctgcaggaagcaggcaccaccactgggccaggtgacctgagcccaggagccaagaggatgccctccactgctgatactacctctgcagtgggacgacatcggaccccactgccgatgctgggacggtgcttcccctccccctgaggctctcctaccagggccccctctcatcaggccccagctggaagccaactggaaagggagtcggggaagtttcatttgtgggggtccaagtgccaagggacagacaagggaagggtggatttgcagctaagaagatagtaaataaccagactacgtgacagtctgaagaatcaaatctggaatcaaattctactctgctctaatgtaaccctgtattttactgtgaataatataccgtgggtatcttccttgcttgatagatacagctccacataatttttctcaatgaaacagattctggagtaggcaacgttttcctcttttgtaaaatacaccaaattgtgaggattgaatgagataatgtcaaagtattagtactttaccctagctgattgacagtatccagtgatagtgataataagggtaattactactctagccaattttatcaaacctatggatgtttaaggaattgggttttttttttttctcctttgatgaatactcctgtaaatacatcgttgcctgcttgtctgagtctttctgtgggtttttagaagtggattacttgcagcaaagtctcctctacttaaggctctttgtatattttgcctaattgtgctctagaaatacatcaatttccagtcctccttctctcagaccacctgtccctcacattttcaccagttctgggtcttgttattctttttactctttgtcagtcaggtgattgaaaaatgtacatttttttaaaattggcatttattagtgagcttgaggatgtttttcacagtcatatggaaacagttctgcttcatgaacaagaccttggggccacatactggcttgttcacctggatgcattttctcagtctccctcagaatcatttttctccctgaaaaatgggattaaaagtattaatagtagtgcccatctcacagagtcattgcgaggattaaagagaggatgcatagacgtattgaatcagtgctgggttctggtagatgttcagctagccctagagattattagccatttgatgtgctgatcctcaggaaggtgggcgggagagacctagacgcagaaaaggagctctggagttgaggtttctagagatgaggtggtgcgtggtggcccagtccagcatggctctgggtgtgagcacaacataggcagatgtgtctggggctcagggagtcatttgtggattgagggtgctatgtgggtgtggaccacggtgatccaggatgatgcaggatttgggccggggaggaagatggcaacccaggttccatgccatctttaaagaggggatggttactagggtgtccagcgaccagccaagtggcctatagataataaggaggactcttcatgacatggaggctgaggtggaaagtcccagagtagggttcagccctggccctaaaaagtgccggagaacctgtagcctcctggaagctgtgctgtgtgcagagccaagcttcagtgtgacaaggaatggtgggagcaatttggagaagaatgaagacttggtgcagtggctagggaggcaggcagggtgaggatgtggaagggtgcagagctgctcaaggtcagcttcctgagcctgcggtgtggtcccttgctccacactcagaagggccctgtgtttgatttaatgctcttttcttgccatcttgaaattcttgatagtttttgaacaagggatccatgttttcattttgcgctgggcctggaaattacgttgctggtgctgaggggatgtgcagagcagaggtgggcagagaactgacgagaaggacacgtgggtaagggtgggatgagctggcctcaggactccgagcagagctcatgtaaaggtgtcgggcccaggatgcgttctcaggctggggtgggaggcctgatgatggcagatttctctggattacaaatagaatatgtagcagggtggttcatagctttgtgtgtctgtgtgtgcattggtaaatttttattttgaaactaaaattatttcaaaattagagaaaggctgtgagagtgcggttgagctggtgttggctctggaacagggtttcccaatgcaggcggcactggtaactatgtgccttgggtcattctttgttgtgggggctgtcctgtgccccatgggatgttccctgcacccctggcctctgccttctagatgctggggggcactttccctggtgtaatattaaaaaaaactctccacgttgccacatttggggggcagaatcaccccctccccgaattgagaagctatgttattggaacacagtgtcctgtattttgtctagcctctgctgcttagagctgcctgagcttggagaagatacttgttctctttccaaagcttcactgtccctttctgtacattgtcaggacggctgttaataccactgctctaaatgtgctcagttttgcataaacatcagctaatgttaaaattttaatctctgctaatataagaggcatcgaagtacacgcgagttcagtttgcatatggtgaggagggagacggcctcatatcgtatgtgtgtatttgccgattctatattttgaggttgattcctgttgtcttttgttcagttgtctcattctgttttcttttggggctttgaatgcccttttcatgcctgtgacctctctttactatgccttttcttctctgccagcaaatctcatccattcttccagggcaccttactgtcccccaaagccccagtgactgctctgtccacagggcttggtttctgtgctctggctctgcaatgcaatgcagaaggggctgggctcggaatggggttgctggtcaggccatgtgcccaggggaaggacacaggactcaaggagtccacccctctctcccccccttttttttttggtcactgaaatattttctttccaattctactagtcctgctagagctgccataacaaaatacccaattggtgacttcaacaacagaaattgattccacactgttcttttttttttttttctttttgagatggagtcttgctctgtctcccaggcaggaatgcagtggtgtgatcttggctcactgcaacctctgtttcccaggtttgagcagttctcctgcctcagcctcccgagtagctgggactacaggcacatgcactgtgtctggctactttttatattttttagtagagatggggtttcaccatgttggtcaggccggtctcgaactcctgacctcaagttatctgcctgcctcagcctcccaaagtgctgggattacagacgtgagccacttcgcctggccatgatcccgcacagttctgaaggccagaagccaagatcaggagaccagtggattgtttctcccgaggcctctgttcttggcttgcaggtggccccttgctgtgccctcacatggcctttgccctgcatacatccgaagccccagtgtctctctgtgtgtccaaatttcctcttcttagaaggatgccggtcatattggattagggcccacccgtgtgacctcattttaccttaataacctctttcaagtttctgtctccaaatacagtcacattccaggggctagagcctcaacatggaagttttggagggagacacacttctacccataacaccaatgtcatattaagctttatggaagaatagaccaatatgtggtgggttcaagaatcttttcttagaagaaaagtgaatctgtatatttgatactttatgatttccttatttgctctaagcagttggtaagaatctcagtgtcacttggctgaatgatacactactggtgcctccagacctatgaggagcctaatatttttgtcttggttgaaacaatgcaaatcctgggttttggagatgctcacagccagctgtctgattacgtaaactgaaagtggcagagaggaagcttttgcgtggggaaaacatgaaatatacaagggttcctttaaaacagagtgtacttctgaacatttactgaaggtggagggccctggacacctgatgttatcttatgtggcgttatctgggtcagatttcattgcatttcctgaagaggtaacttggcagtcctgggagaggctggaccttggtgtccaggtggcaggttcataagacacctgtgatttgatgtgagccagtcacagaggaagccatttccagagaggaacaaccgtgtagactgctttcctgggagtcaagttaaaacttctctcctgtgaccttgtcacccggcagtggaaagttacccttggctgcagccacgacttccgcatactcttcagaacttgctctgcccttgagttttccagctttcctttaatgcactaaacctttaatattgtattctcctaaatgagacgtctcgcatttgagcaggtaacactcggtaagactttgcttggtgggggaggaggttttaccttcctgtggcattctgaagctctccacatccacccatagtcatgattgtgttatatgacctcaagatgctggagctgttaattcatctttaacataattgacctgattacttctttcttgaaggattttgttcaaacctcagggtttatttaggaacaagtctaaccaggcctgattggttttcctaagtggagatacagctttgggaaacaaattaagaaaatgaatggattgaaaatgtaggaacaccgtgacagttgtgaatttttcttattgagggaaaaaatgggtatctgtgaatatttctcttacactatatagtgagaaatgacactctgctgtggatggtaatttatttctgtgtaattgcctgagtaaggctttctctgatattgaatactgagtagaactcttaggttatttttggaagaattatggattttctcttaggttttagaatattttttgtttgcctgttaagagaatttgatgaagatttcaatgtaattaaccaaataaaatggcattctgtatcctgggaagggacgatgtctttcagttctaaatcaatgcatcatttacctcctatctctcttgctggccgagccatcaatcctgtttttattaaatgttgttgttattgttttgagacggagtttcactcttgttgcctaggctggagtgcaatggcataatctcggcccactgcaacctccgcctcctgggttcaagcaattctcctgcctcagcctcctgagtagctgggactacaggcatgcgccaccacacctgactaattttagtagttacagggtttctccatgttggtcaggctggtctcgagctcccgacctcaggtgatccgcctgccttggcctcccaaagtgctgggattacaggcgtgagccactgcacccggccgttttttgataaattttaaacttctggtttgaaacttttgtttcctgtgcttaaaaggagacagttaaaagcactctgatttggactgacagaatgttttttagatgttagatagatctagctttgaatatttatttgcagagaagtagcagggaggactaggaatgactttttcttaggaggtgctatgcattccatcaggtgactgacccctttgtgagctgtagtggtcagtcccagcatggcccacacttgttggctgtcttagccatggtggctgtggttggcgggtacccagccaagggttttccatactgggggccttggtccagtgggggcgggtcgtaccatgacccccttctcctgtgatcttgcctcactggcccaggtaaattggtggacgtccttgactcctccacctccaaaaggactttgaactttggcactgttgggagtttaggctacacctcaaccaggcagagattgggatctaacctacttttaaaagccctctacagggaatttcataactttcctgagtgttaggttttggtgattaacagccttgactttttggagcccttcctttgccaaacatgcattcctcaggtgctcacttaaaatgattcttcacaatatgcctatagacgggtctgtctggtacagcatcctggagtggtgtcaagggaaagaaacatgctgcttctgccacagacggaccatgcatgggaagaaactatttgagaatggctctccaaggggctggtcggccttgtctgcccactccctctacctttctttgttctgtttctttctcttcagtgttggtccattttccttttttcactgttgcgtgttagcacatcattactcttatctccatatatttggatgtttcctgcattatggtgagcttcagtaggtcttggatgagttagttgttctcattccaaaatgtaaatttctggtgtttagtaggtgctcagtaaagcttgagaaagatgaaagtgagagcccagaactagtataaaaatacggataccaccatagcatggtaattaaaggggtgattgtgaagatgaggtagctgtgcctggatatgtgtgtgtgtgtgtgtgtgtgtgtgtgtgtgttggctggagaaggcttaccagtggtgctggacatgtcgggtagagtgttaatagtaacttaattgactgaatttggaaataatctatggggttagagagcaaggaggtagctgtgtaagaggatggggtcggtgaggtggggtggtgtgagcaatggagctcaagggctcaaggtgcaggcctggactgatggccactaggaccaccccaatggcttcagggtcaggacaggaagggaatgtgattattgcagcaggtagtagggcagtatgagtgtattattcatatatgtgtgatgaaatggagcatcaaataatatatcccataggatagaaaggcacagtgagtgagtttgggttaaaaattcgatgagataaagtggttgtacctcctatgaaaacaatttaatttcttattatgaaggcattactcatgttcttcagaaaaattaaaaaaaaaaactcagtcattatagacaattgtactcaagatgaaaacaccctgtactgtcgcaaccctgaagcacctctgttaatatgtgtgtgtcttctcacggggtgattcttgatcagagttactgaaacagcaaggcttgggaacaagaggcatgagagcaacactcaggacctgttcagttttctgcacagttccaggtgctcttccagcattgctggctccgagagagtcaaatattcagagcttgcaagctggggaggaaaggggttagggtggagataaagatctgggagatctacagatacggatcatctgcatttggaaattttgtttgcccttctcacacatttccatccaagttttctttggggaagaggggatccctgcagaggagtccagttgcaaatgtgaaatcttaaaaatgtatgtaaatagcatctttcattccgtgatacttgtttgtttgaatagaacattgttaaattttattgtgcttcagaatcatctgggtgcttacaaacatagattgctggactctggttctggagattcggattctggaagtctgaagtggggcttgggaatctccatttcttccaagttgccaggtgatgctgatgctggtagtcgggagtccgtactttgagaaccactcttctacctaccaagacttccaaaaaattggtactctgggaagatgccctgtgccagtcctgtggcttcttaggcacgtcttccagcatagactcctgcagagaacctggtacctgcaagtacctagtacctgcaagtacctgcaagtccagtgtgggaaatctcatgacaggcatcaacattccgtgacggttgacagccacctatggggtggctgatgccttttctgtgtcttcagggttttaggggaaggagagtctaaatgagtggttctaggttgtgggaagagcctggctttgatgttcagacacctggcctcaggctgcatcgcccatacttcctgtggaatggttatcatgagtcctgttgtcctgtaggtgaatcattgattcctgtctttgcataacctctcacttgatgataatttttttttaaaaaaatgactcttggaaacagaacacacagttgtagagggacctacagtacagcagaagctttgtggaaggatacaaaatgtgagggactgtagtcgaagagatttaaattggaagtgggaagagattgacttttttttttttttttttttttaaagacagagtcttgccctgtggtccaggctagagtgcagtggcacaatcttggctcactgcaacctccgcctcccaggttccagcggttctcctgcctcagcctcccgagtagctgggattacatgcatgagccaccaggcccagctaatttttctatttttagtagatatggggtttcaccatgttggccaggctggtctcgcaaactcctgacttcaggtgatctgctttgtgtctcttagggagcatgtttgaagagtcaaaggaaaaccaagtctgttagctttgcgaaacgtttttttttttgagatggagtctcgctctgtcccccaggctggagtgccgtggcgcaatctcggctcactgcaagctctgcctcatgggttcacgctgttctcctgactcagcctcctgagtagctgggagtacaggcgcccgccaccacgcctggcaagtttttctggaatttttagtagagacggggtttcaccatgttagccaggatggtctctatctcctgaccttgtgatctgccctacttggcctccaaaatgctgggattacaggcgtgagtcaccgcacccggcccgaaatattgttaaaaccaagtacctttgtgaaacattgttacaaaaaccaagtaccaagtgtgtggcattaaagtcaaacattaatttcaagttacagaaagaaatagcactgagtagaggttgatcgataaaaaatgaataaaatattcaacagaaactccttaaaaataatgtgagaaatggacatgtgacatgggcgtttaaaaagtctgtaaggccaagaaaagtttcctgaaaggaacactgtgcccaggcagtcctggctttgcaggattccctgataaccgagctcaggcatcctgcagagtgagtactgcccagatagaaccttctgcctctttggggtaaaattcgatttcaaagagagagaactgtggggtgagaaaggaagactgggacccaaggggccaaactagtgacaatgactgctgtcatgaagggtgacaaggacaatacctgctgagctcaaaccaccctttggacccagtgaagctcagatgttgcttccagtgcaggagtagttaagctcaactgttttacaatatccagttatttggctgggtgtgatggctcacacccacactcctagcactttgggaggccaaggtgggtggattgcctgagctcaggagttcgagaccagcctgggcaacatggcaaaaccccatctctactaaaaatacaaaaaattagccagacgtgatggcaggcgcctgtaatcccagctacttgggaggctgaggcacgagaatcgcttgaacccagggaggcggaggttgtagtgatccaagatcatgccgttgcactccagcctgagtgacaagagtgagacttcgtctctaaataaataaataagtagcaaaaacaatccagttattcctcaaatatttatgagcacctcttaatgtttcagatactattgtgacaagagaaaaatgtgtttgtatatgtaaatagaaaaacaaaagtgatgtggaagcgattacttctgtcattttggaactaccttcctcccatattaagtccatattatgacaattcaaaaataatcaaacttcgtaagatattacctgtgaaaggaataagtatttaaaaatgtattttagatggccttttagaaatctagtccatggacacaatctagcatcatgcagttgccttcaaaaagaatatcctaaagttcttgtttgttttctttttcctttcaaagtgttctgttgaaaataacccatttgtcattttagttttgatatgacttagttatacatgccttttgaagcagtacccacccacatagtaattgcgactatcttgtgttttgaaaaaaaaaaaagcgagacaatttgactttgatagttttaagtttaaaaaaaaaaaaaaacgctccaagttagactcagatgaaatcctttgatcttaggtattttatgaggaaactggaaaaaataatttcacaaatttctattttgctttataaaaattttatgattcataacacagggaaaatccagtaagctaaggcgttttttagtcgtttatcttgctagtgagtctttgatgtgagttatttctttgcagtaaggtggcatggatgggtgatgaggctaagctgaaaagttaaatctcataatggacatttgcaccctttaaggaagtaaagctctcaaagcatgattatggccaagatgaggccggtggcatgtttgtctcctaaatgtgcagccaggaatctcgacggtttgtctgaggtatgcaggtgcctggtagataaattagggtgagcatcattcatggcgtgtggtcagttgcaggccttcagccacagggatgacagaagggaagtgaggaatcagggatgggtttgaactgcggcgttgctttgggagtctctagacatgatcagttgcacatggactgttctccttgtcaccctcaggatctactgtcctgtggttgaagcctgcagctctcccaagttggtggcactgggcttcctgacttctcgatgtctaatgagacagtggaattctacttgcagccccactgcaggccaggtttatctctcctctgtcttcccagctggtgatttggtttctcagtgctgttttgggtgcacttttgtggaggattcaagctggtccttagccactccttgaaccagaacctcttttactttcttatgtagttcttctcttcctgtttttatatcctaaaactagtccagcgaccagcccatcgtagtagaagcgttggtgttcttcctaaaaggaattgtaaacatctcttggagagtgggttagccaccataaattgttttgggacttcggatacccccttccgcaaatgctatctagagatgctttaatttcatttcaattggttattgcatccctgatattttgaaactgttatgagtagaaaacattctggtttatgaacaatctgcttttcactatgaaatagatgggaattttaattattcctgcgctttgtcttagagaagttacatgcatgcatcaagtgttgtgtgatcttgtgcagttcttcttagattgagtttttggctcctcgtgtgcaggccttctaaaatcacaatgtccctgagttgggaaggaacatcaggggctatctggttcattatcctaccccccaccgcctcccacgccccacatttctggcagcctacgagtctttggtccctccccagtgctacctggccagctctcagccttgggaggccacctgcccgtgtttgacctgggttaatgaccgccagttcctttcccttaatacgactcatctgctctcctgcatgctcgctccttgggtgagagctgccctctgcaacctcataacggaaaatggcttgacttctgccacctcctcctccttcccatgaaagaatctggtcttttctatctctctattatttttaaaaccagattaggttggttgtggtggctcacacctgtaaaaatcccagcaccttgggaggcagaggtgggcagatctcttgagccccaggagtttgagaccaacttgggcaacatggggaaatctctaccaaaaaaatacaggaaaaaaaaaaaaatagctgggtatggtagcacacacctgtagtcccagctacttgggaggctaaggtgggaggattgcttgagcctgggaggtcaaagctgcagtgagccttaatcactccagtgcactccagccggggcaacagctagaccttgtctcaaaaaaaaaaaaaaaaagaaaaataagaaaaagaaaccagattaaacattcctaagtaattctttttgtgacttttgcctgtttattaactatcctggctacttaaaatgaatttttgagttatgaatacatttagatggttttaaattcaaagaagtctcttttttctcagtcacttccatccccagccaaacagttcttatccccagagtcagccagtgttaccagtttcttgtgtccatgcagtttgctttatgcatttacgtaagcaaatattcgtacacacacacacaccctttctatcttatggaaagttatttcagtggcacatgtaagtatctcagcatctcttgattgtcattctttttggattttttttttaaatttcatacttacaaatgatcatgtatcttaagttttctgaagtagccttggtttcgcattttgactgtatttattatggtatcaggttccatatttcttaaaagtaatactgctgctgcacttacattgaacaagtcaccaagctctgttaattttgcctgaaaaatgccactgctttgacatgatagaaaacacaggcaatagtctttatttctcactgctgtttttttcttattttgaagaatcaccctaatacataggaaaatctcgacttagcaaagagataaatgagactgtaattattgcattgggtttttcacaatgtatgttagttatctattgctacataacaaattagttttagagttagcagcttataaagcaacagatatttattatctcacagtttctgtgggtcagtaaatcaaaagtggcttaactgggtggttctgacatgtgcctttccacagtgactggtatgtagcaggcaagggtctcttatgatcctgagtgaggatgtcagccaaggctgctgtcatctgaaggcttgactggaacagaaggacccatttctaaaatgagtcactcacatggctggaggcaagaggcctcagttccttatcgcagagattgctccttggggctgactgagtgtctgcacatcatagcaacagctggctttccccagagggaatgatccaaaagagaggtggaagcctaatgtctttgtgacctaatctccaaagtcacacactgtcacctcttccatattctattagaaaggagtcactaaatcagatacccatgggaaattacccacctcatgaagaaagaaatatcgagaatttgtggacctgtttcacaaccacacagcatcattttttgaaggtagagtcaccttgagcatttaaattagggttctgctctagaagtctatccctttattttttcccatttgttaaccctttttctacttggcataatagcagccattacccagtagaagttgagagatttaggttgcacagaatcccacagtcttttcagaaactcatatccttagggtgtctgcttgttgacagcattgtagaattgaaacttgaccacgtgttatgtgttgggctgccagtggtgatcagagatgacggtgagtagtccgttgagttagggctgtttgcctctgtcggtgtcatctgggtttgaactggacttgcagtcctggtgggctgctttcatttccaccctgggtctttgttctcaccactcacatcttacgcctctgttccaccgctgtgtaagaggcaactgtgcacacaccttgcctctgccattgactgtaagctcctgagagagagagagaatgtgtctggttcagttttgtggccctcctttttgctagcataatgcattgaacatagtatcattctgcatttttgttgagtgtataattagatggtcaatgtggagaactcagagggattttaggagggggtggcagcaatataaggttgtgggacccaacattaagagagggaaaggtgtagcgggaaggcgttggtgtggggagggagaaagtcaagaggattcaacctggcaagagttggaagtgacaggaaggtgtgtggggtggggacgcaataggacagtgtgtgagattttttaaaaaatgcaggcaggggagggatgagtaggcagagcaccgaggatttttaggacagtggaaatgctctgtatgatactataatgggggatacatgtcattatacatttgtccaaactcaaggagtgtacaacaccaagagtgagccctaaggtaaacgatgggcttcgggtgatttcgatgtgtgaattgtaacagggatactactctggagcaggatgttgatcatgggggaggctgtgagtgtgtcgcggtagggggtacgtaggaaatctccgtgccttctgctcaattttgctgtgaccctaaaactgctctaaaaagagtagtcttaaaaatgcatgaaataggatcctgtctcaggactggggcaagagcaggtagaaatggaaagagtgactgtggctgctgtgtagcaggcacacaatggtcatggtccatatgctggcttagttattttttaaagcaactaaagttaagtaatgtatacgtaacttacatatttatgtggtccaaaaaacgttggtcatctgttttaatgcagagagtgtttaccctaagcctgcaaatgtgatgggtaatagctagaactagaaaagtactttagaatatggaaggtaaatacatgaattaatttaggtaagagtgacaaaacagtggaagtccctgacttagaacttattgtccgcttggacagctggtgtacgtgatcctggggtcacagtggctccctgtgcaggaagaacactatttcccagctcagataccatctttttaggagagtacctgccattgtggaaaataaggataaaggataacaagttacctccttaagacaaagtcataggagaaatggtaaattccagtatcttgagttttgagttggaacttgaaatttattttactacaagaacactgttgatggattatgtattttatagactttgtgggtggctatgggactctagtaactgcttatgcacagtttatatgagtagggctgctggatttccagatgacgctctcgcaactgaaccttcagattaccacctgtttctcagtttggacactattagtgtgctgctgtcacttatggctcgggcaccttatcttgttttatgtcttgatgaagaagtacaaaattcagtgtaaaagaaaaacatatgtaaagcttatagaatcaccccgttacacaataacaatgcagaacaatagattaataacaggaagagatgctgaaacttctcttcagcctagtttctactctgatgtttcttctctgcattgtacagccaatctatgaataatattttcattgtctaagcaaagccaccttagctaaatatttaattctactggagtcataaacagggttcaaaatatcacacatagattttatgaaagtaataaaatgcttcagaaagtacagtggctcagcctggggccactgcatctgataatttggttacacaccttgtcatgtgcttcctaaaagaatgacgatggttgcttatctgtgtttaagcttgtcattttgaggaaacaaagataagacatttttgctgtgtctctaaaatgcatgtgtaaactatttttatagagtaatgcttcagagaggagtaaaatttcctgcaacaggtgcttgtaaacagtaattgctcagtaaaggtcacctcccagctgttgcctacatgttacataagagaaccccttcacgtcttccgtatttgcagctctgtacctttgtgagtcacctaaaaaataactcatagggttgtttttctttctttcttttttttttctttgagacagggtctcactctgtcgcccaggctggagtgcaatggtgcgatcccggctcactgcaacctccgcctcctgggttcaagcgattctcctgcctccattctcctgcctcagcctcctgagtagctgggactactggcatgcatcagcacgtccagctagttttatatttttagtagagacagggttttcaccatgttggtcaggctggtcttgaactcctgacctcaagtgatccacccatcttggcctcccaaagtgctgggattacaggcatgagccaccgtacccggcaggtttgtttttcttatgacaaaatcaagcctggatggtgtcgttaacggtgaagttaaaatttttcttttgctttccttaatatttccgtgtttttttctttttctttttttttttttttttaacaaaagtctggtttctaaaccaaaatatttaatgcttcaaaaggaaaaaaatgtaagtcagtccaaagaaatgattcattttgcagaggtaattactactaacatcaacctttccaggtctttttctatgcagctatatcattgacatttttttaaaaatgagattacattgtactggagggtagactgctataacaacttttggttttggatgggaataaacagaaaaagtctcatctccagttcatttctggggagggtcaggaggtggggggtgcttggctctactcccttcgtatgattttcccttctttatctccaggatcttccccatttcacggagagacatggatgagaatgaaggctgctgagtgggaggggcttatggggccagttttgaagaggcctcataccttttggccacattccattggccagaactttgtcatatgactgcacctaactacaaggaagactgggaaatgtagtcaagttgcatgtccgggtagaaaagggacacttttctgtggaatagctagcatgtttgtaactcaattttataaaccattttgaaacttttcttaaaaaaagcttatttcagacacatttttatatgctggatctgctcacctctccatctctatcttattaaaagttcttgccagaatctctctccaattgttctccctccttctgccctgttccctcacagcagccacagtggttctttcaaagactgaagctacattttatcactcgcctgcttaaaactttacagtgcttctcccccagtggtcgggataatgttcaccctctcctgaagctggcctctgtggtccttgaccccatcaggtcccacggtgccctgcatggactctgccatccttcaccagcttccccccatcaaacggggcttgctgtcagctcttcctgcaactcccagccctgccgcaccactcagccttcttccttcaggcttcagctccagtgtcttttcgccaaagaagcctttcctgatctctcagccataaatgttcctctccccagttgctttttccctctccctctactcagttgctttatttaactgtcatattgtctttggagcacttgccaccatcagaaattatcttgcattatgtatttatagtctgtcttccgcctactagatggtgggttgcttgaggcaggaactctgtcttgtttacatctctatctccagataacgtgtctggcacgtgatgggtactcagtaaatacttgtggaataaagaaatgtcattacaggttctctatgcattaaaattttttagaaatggggtgttgcagccgggcgcagtggctcacgcctgtaatcccagcactttgggagactgaggctggtgtatcacctgaggtcaggagttcaagaccagcttgggcaacatggtgaaaccccatctctactaaaaattcaaaaattagctgggcatggtggcacacacctgtaatctcagctacttgggaggctgacgcagaagaatcacttgaacctgggaggcagaggttgcagtgagctgagatcccgccactgcactccaccttgggtgatagagtaagactctgtctcaaaaaaaagaaaaaaaaaaaagaaatggggtgttgctatgttgcccaggctagagtgcagtagctttccacaggcttgatcgtagcgcactgcagccttgagctcctggactcaagtgatcctcctgcttcagcacctccccgagtaagtggtactataggtacttcaggttttgaagcatgtgtaaaaaatactctagcagggacatcatttgagctgagcaggccatggaggcatcaaatgattagcagtagggtacaacttgttgtgagaaccagaaaagagccttggcctacataacatcctgtgctaaagaaagaaccctgactcccagcctgtgagtgttccagagatgggcagagcagtccctgcagcgcttcagggaacagggaagagcagctaacccctgatgcttctgtaagcactttgggacgccctttgctatagtagggtattgtcttagttatccctgacttgcctggtgttactttacatcccttaatcctttcatgaagactggcaaacacattcagtcctgccaaccttgaaagtaggccatgtttgaaagaacattggcacaaacgagttgcgaacatcttctttaccatattcatgttctttaccgtattatgaggacactgtgcttgccacatgggcagtcttgttttggggatacgtggttggatggacggttgggtggatggaagactcctggaatgtgaagtatctcaaggatgtgtgtccattgcatgaatgtatgtttgatctatgcagctaattgacaaagatccaccatcctgtaccctccatgttttatttttgccctgccattgttctcttcgacattctataatcatcaaggttttcttgccctcacctaggtcttgactaaacatgttgggtaaatgaatttcatattactactttcttgcgccgtcagccattgtgttcttggggactccatcctgagccttttttttttttttgagaccgagtctcaaaaacaatgaaggcaggtgactggtgaggagagttccagccactggattctccctcagtcccctgtgctgtggcccttggtgacccctagatttcagtgcccctgcctgacactggagtccctctgtaaagaagcccctttctagctagctagctgttccatcccgcacacccccacagaagccttttgctgccattagtaagcacgcctctattttctcacctgtgattgatcatgcatgattgagttttgtctattaaagcaattgataagttactaaaatggcaccaaaagaaattagaaaaaaattgttgcaaatgtcagtgaaatcttttaaaaaactgttgtactttagaagtgcctcaagtgactaatggaggcttaggactctgagtggtgtcgcaaggaaccttatgcacagggacactgacattagcctgtactgtcacccaggctggagtgcagtggtgtgatcttggctcactgaaagccccacctcccaggttcagcaattctcctgcctcagcctcctgagtagctgggattacaggcacatgccaccatgtctggctaaattttgtatttttagtagagacagggtttcaccatgttggccaggctggtctcgaactcctgtcctcgtgatccgcctgcctcggcctcccaaagtgctgggattacaggcataagccaccatgcctggcccctgggccattttttattcttactcttaggctaggtttctgcagaccttggttataactgcaggctctacattgataactgctgagtctctaagtcagaccagacgtttctccccatttagtgatacatgttttccatccaattgcttcatagacaccttggacacagtgctctatttcaatttatgttgacagttcatgacccaaactggaaacctgagttatcctggacttctgcctaccaccttctcctaagccatctcacctgtcctaaatgtcgtagcccttatctagttctctaagctgtcatagggtcctgtactgctgggctgcttgttgccttcaatagagcctggagcatattcatgtcggtatttcaaggccccgggcataagagcttcttaggaaatattggaatgaatgaagaaatgatgaataaatgaacaaatgaacagttgattgatttccaagacactttggggtggtttccatttagaatggtttttatttctttttactggaactaaggaattatttttgcttgttgatgccaacattttaaaagcactataattttgaaatgttttaccacattaaattcttttctattgcaggtcacatacaaatatgtcaacttcaaaggaggaattatttgttatatttatgcaaacttgtggcacttggacatttatctagatggttttttgtgtatgattgtgttcttggtacagctggaaaagctaactttaaatggcaggagtaattgatcttaatgacttactttgaattaaacttgtgcttaattaacttggatgttctaagtttctagagtcacagacttttagagctggaatattgctttttgaacttcagtgtaaggaagaattgcttatgctcgaattgatttgttctgtatcccaatactggactgagtagaaatcaattactttaatattggatgagagagtgattgattgaagatcaggtttttaacctctttttttgttctccttctcacagggagagtcccgtattctcagagtaaaagttgtttctggaattgatctcgccaaaaaggacatctttggagccaggtatgttggctttgtttttatttctgtggacttctgaaaaattgacaagcagttttcaaattcaggcacgcatcagaatcacctggaggacttcttaagacaaagctggctgggccccacctgcagggattctgatttaggaagtgatgctggcccagctggttccaggagcacattttgcacagggcttctggacttaccatcacaacagtagttaacagcctgttcttcacatgggctaatttcatgagattagcttctggtgttgtattctcagtagaaaaatacagtgtgggactatggctctgcttattttaatacttcaaaaatatttcaaacttagggaaacataaaagtgtcattttgtttctaggagaactggatattctggacatgtataatctgaattaagagatttggtgatttggggcgaatgtggtgatttctgtggcatttctagaagtaccagcagggaagcagccagatctttctgtgtgtttcagcttttttattttcagtattgcacttggatattcctgtatctttaaatcagcccttttgttcctattggctgtcagcaatgtgttgcatgaagttattggactgggagcagggtgagggtagccgtagagccacctggcactagaatttagccagattttggagaccaaagatcttttgaactttaaacctggaatggacatgagtgatgttctagtccaacttttccattttatggttgacaaagcttgaatccagaaaggttaaactacccgtgcaggtcacgtgggccagtgatgtttgaggagtgacaggaacactcctcctgcctctacccagtacattttcctttgtggcatggtggcctgaaaatactgtgaggtttaacaatgaaggcaggtgactggtgaggagagttccagccactggattctccctcagtcccctgtgctgtggcccttggtgacccctagatttcagtgcccctgcctgacactggagtccctctataaagaagcccctttctagctagctagctgttccatcccgcacacccccacagaagccttttgctgccattagtaagcacgcctctattttctcacctgtgattgatcatgcatgattgagttttgtctattaaagcaattgttaagttactaaaatggcaccaaaagaaattagaaaaaaattgttgcaaatgtcagtgaaatcttttaaaaaactgttgtacttagaagtgcctcaagtgactaatggaggcttaggactctgaatggtgtcacaaggaaccttatgcacagggacactgacatcagcctgtactgctggtaatgtcagagtgaagcaaatcccacctgaaggcactctcttgcttgaccgtgaagtcacactgagtggttcaccatgtgcctgcactcatgcaaggataagccaggtctctaggcatgggcagaaggatccctgcttcccttctcttccctttcagagcaacactttcagccatttccatgagtctgggctcttgttacccagctgaaatactgtttcctgaaactcacaaatttgctctctaccaaagcccaccttatgccctgcctttccatgaagcctgtcaagaaaattccaagaaagaaaatttgatattcctatatcaaagcgtgtgtctttcctctcctaatccctcttagctgccacagtaggtgcaatgtcattttagcttttgcagatgcattacctggtggtttcctagtatttctttcacttgcctcgattgctagattagaaatttactggggacagacatctttttaatatctttctcctactacttaacatatagagcatcaagggaaaaaaaaacaaaaattatcttttaaaaatgtaaacatttgcatgccaaccggtagtggattgtgcccttaggttaaaaatatgtattctcactctttccaatgaaatctgtagtgctgaaggagcaagttggatttagaaaattttggtgatttctttttaagcttgattgggtttttattttgttttatccaaaccctcccattaaaaaaaaaaattgattcacattgtatttctaagccagttaagtagatttaaggttgaatttgtagtggaattaggctccaaatcttagaagagcaaattcgtaccttgaatttttactgtttagataataacaggcagggtcatttctaagggacatggtggaaaggaatattcgtgatattaattagaaagataaatcgtattgtggccaagtggaccaagtgccagaaaatgcatcagaaactctgaatcctgcttctggtcttcattttcctagattgataagtaggcgcacacattcctgctttcctccctcctctgaagtgctgtagttcttcagggacacatttgccagtgggtctgagatgcaagtgtgaggtggcagtgtgggttaatgccatcttggtgtctcactctggagtggcactgcttattgccttaaaattttgccagatgacctgcattctccctccatgctatcttgggcaaatcccttaaaaccactcatgccactgtgtattagtgtacaacaaggataacagtttctttgtaactggcatgtggggaagaaccgcaaagtgacttctgtcggcagcagctctgtcgtgttttaaggtagtagtcaccgggcagaggtttggtagtgtcctctctggcagccaccgtctccttcagagccctgggccactgacatgccttttctccaagtctcttccctgagtattccccgcacctctgtgcctgatcagacacctcattctcccttggcagcaagaaggccgggtaggcattggagcccttgctgtagacaggataatgggtgaaagaggaagaacattttcatgagaggcatttcagagcctttaaagtggtagaaatcctgtagacaatgatgtttttaaaatcagggatttgcatctctgggactccaactcctttgtttccaagggaggttccctgggccacttggcctgaggttgggaaggggtcggtggttgcggggcagaatgtgatgcttggggatgcaggatggtcaggggcgggtgacggtgggaggagtggagcacgtcatctctccttgcccttccgaggtggtgatggaagctgcctacagctccagctcagaggccgggggtttctggggcccttggtgtggggcctctctcctagctggaggtggccccttcccccttgagaggcctgtgcctgaaatgcccttgtccttttcggccgtctcggccccagtccagtacttaggatccaagatcattttcagctccttccagccaagtctcactttattaaaggagctttgtttggagcagattggataaccgagccgcgactccacttgaacatctgagcagttggcccgcgtgggaaacagcaatggcagagaaagatgcttccctttggatcataccttgaggacaaaaaagggcagtcatataatctgtcatctaaactgggacgcttttgtctggaatgaatgcgacattgaatgggacgtccggacataagatgtaaattgagactgcagtcaccctaggtcagagacatccagcctttattatccatatcatggggaaaaaaaaatggaatgtgattttttttccccaaaacagcttaaaaaaaatgctaagtaaaagaaaaaaataaaaagcaccttttaaaaaagcaggcctcacataaaatgccactaagacatcaaaagagaagtaaaaccctgctcaaaacgcccacgtggggcggccacagctcacccttgtgtgcctgtgtcccgtttctgctgtcccctttcccaaggacgtactctgccctaacctcaccctgatctggtgactcctccagtggcccatcctatgttcaccagctgggtcctcatctcctccgccacacaggctgctgctctgtcccccagcagacctctccctgtctctggggtgcccatgacccctgggaagtgctgtgcatagttctgtgagtgaggttgacttgttgttttatgcttagaattgtttctttctcctgaaattagatttttctcctctgatgactaggattctattttatttatttatttttattttccacgacctattatagcacatagcacctaacaggtcctcaggaagtatttaccaacagattgcatgaagtgagcccgttcttcctccctctctccttccctccctttcccaccccttcactggaaactcacagtcactaaatatgccatgaagttgctgccttttgcctttgcctgtgttttcccctctgcctggcatctgctcacatcctttctggcagctgccctctcatctgtcagggcccagtttgggtggcaacactcctgctgaggcccctgcccgcctcatcaccccagcccaagaggacagaacactgctgcccgcctcatcaccccagcccaagaggacagaacactgctgcccgcctcatcaccccagcccaagaggacagaacactgctgcccgcctcatcaccccagcccaagaggacagaacactgctgcccgcctcatcaccccagcccaagaggacagaacactgctgcccgcctcatcaccccagcccaagaggacagaacactgctgcccacctcatcaccccagcccaagaggacagaacactgctgcccgcctcatcaccccagcccaagaggacagaacactgctgcccgcctcatcaccccagcccaagaggacagaacactgctgcccgcctcatcaccccagcccaaggggacagaacactgctgcccgcctcatcaccccagcccaaggggacagaacactgctgcccgcctcatcaccccagcccaagaggacagaacactgctgcccgcctcatcaccccagcccaagaggacagaacactgctgcccgcctcatcaccccagcccaagaggacagaacactgctgcccgcctcatcaccccagcccaagaggacagaacactgctgcccgcctcatcaccccagcccaagaggacagaacactgctgcccgcctcatcaccccagcccaagaggacagaacactgctgcccgcctcatcaccccagcccaagaggacagaacactgctgcccgcctcatcaccccagcccaaggggacagaacactgctgcccgcctcatcaccccagcccaagaggacagaacactgctgcccgcctcatcaccccagcccaagaggacagaacactgctgcccgcctcatcaccccagcccaagaggacagaacactgctgcccgcctcatcaccccagcccaagaggacagaacactgctgcccgcctcatcaccccagcccaaggggacagaacactgctgcccgcctcatcaccccagcccaagaggacagaacactgctgcccgcctcatcaccccagcccaagaggacagaacactgctgcccgcctcatcaccccagcccaaggggacaggacactgctgcccgcctcatcaccccagcccaagaggacagaacactgctgcccacctcatcaccccagcccaaggggacagaacactgctgctcctggggctgtagtgggtgtacaagttccctcctcctacggccccttgtcttagcggacttgggaggctcagaggctccagccctgtcttattggtgtttgcaggtccagaaatcttggcacatgacagttgcctggtaaactgccttgaattcattgagtggaacacaatatggtgtgctgtggcacctgatggccagcctggaggaaggggtacttttttctcattgtcatggaggtcccattggctcttcaagcatctctcccaagcatctaggagaggtgcttatttctcattctcacaaaggctctttgtggaccagcacaggaggcctgcctagggcttggatgaaaaatgagcatagagagaagaggttaagggaagcaagctcaagagtgggctcagagaaaagaatctgggggagtcaatgagatggcaggcaaggaacagtctccatttgatgctgatgtttgtgcagaatgactactttataccgtacagaaggagcacactctcttcttgtggtaggtcccagaaacttctacttgggggtacatgaggcccagctgggattgggcacagaaggtcatggctctgcacctgaccctcaccttaggggtcaggagagagccaaggacacgagtgatgggttagggaggactcaggcaccatggaatactgtggccatccttccatagaggagaggtacaggtggcaaggcaggcaccaggcagccgccgacagggtcaggaaccaaggcaggtccaggaaacagaggccaaaacagcagcaggaacctcaggcttagcagaccactgactcttctggaagtcttttagacgctctgtggtggggcagggacaagtccttggtgtttggccatggtgaagtgtgcagttagggtaggtgagtcgtgctttcttaacacgggggtaaggaaggagggtagagtttcagcagctcctgtttcttgagcacttgctatgtgccagatgtggtttgaactgtttacatgggagctcgttgggtcctcccagcaaagtcctatgtagcaggcactgttgttctttttgcagataaagaaactgaggcaagaaaggtttagtaagttgtagagctaggtattgaaccagggcctaacctcttaacagaagttagttagaggctgttacttgagtgctcacaggttggctggcaatgtgtttggaacccaatgtaatgtcattagattctgcctaaatcttgtgaagaggggatttccatttgataggtaagaaaattgagaagttatcatcagcccgagatcaaacaagggtatagggagtggtgggacctattaagttcagatttatgtgacttctgatgctatgctcagtgatagatctcttcttgaggataaaagtttgagaattagggttcctcgaaaaccctgagatttctttttttgaggggtacctttttgtgttagcagatttaaagagctggccattgtatttgatggtagctgagtaagccttttgaattggagtatcatcaactattactagatttagaataggtatattttgctaagtaagatcttaaagtttttcctttaaacttaggatagctgttcaaatttcaaactcttcttttttcagtaagctggagacatttaaccttttgtcataggcttaaagcagtcattaaacagggtcatttcaatgcaactttttaaacctaactcccctccctttttctctttaattatgatcagtggcttcatttgagcttacctaggatgcatttgagactataaagctgctttcttaaaacttagcaatgttggctgagacaaaccaactgtagaatctcatgctttcataaagaaggttgcaagacattcattcacagttgctcctttattgtgtgtgatgagccattggcatcaaacctgcttgggttgctatcagtttttcttttgagagctggtgacttgcaatttaaaacacacatgggctcaagggtattggagggacatggcagaaagtccttctgctgcctagtgattgagagtgatggggtcctaactctgtgtgaggatagctctttgacacagctcacctcagtcccctttacctaggtttaagttgttagcattttgctgtatttgctccatctctttttttccctgaagtattcagaagtgaattacagacatcatgacgtttagttcctaaatacttcagcccaaacctctaaaaaacaagaacatatttctatataactgtagtactgttctcacaaaattaagactaattgcctaatggactctattacctgatccattatctgaacttccccagctgaccttaaaatgccttttacagctggactgtttaaaccaggattcaattgagaattctgtattgcatttaatcggtgggtctattaagactctcttaacctagaatagtgataaaagctttttactcttggtctctttgcaaactggggacccccagccagcaacaccccacctgggtctcactctaccatgctggggtgccctagctcacctgtgttatagcttgtacctgtgttcagtggttcccgagttcttgcatggcacccaagaagaatgaggatatgctggacattgagggtgaggagggcagagtagaattttactgagcaatggaatagctctcggtggagaggggctgcagtcaggtgcttctctccttcccgtgtggctgggcccagggctttttatgggctcagaataggggaggggcaggctgcaggtagtattggaaaaggcaacatttgattcattaaaaggcattgttcagaaagaatcaatcaggaaagggtgggcagacaggaacagaagttctcgctctggttcgtgggtttcatccgggaccagcagtccagtctttcagccttcaggctgtttttggctcgaaggtggggtttcaccggggacccgcccctatctgcccaggcgtttggctgcttcctatcactatcaatagtccctccccttcaatgacttgtaggaaggttgtttcgcttaccacattccatcgtgtcctggtggcatcatcaatgaatgaacatgttcttttccccatgtttcttgtacgtactgtgtattagaagttggactaaaggcttgatcaaatttgaggcaggaatgggtgaggctacgtgcgactggagggacacaatgactggttctgtcataatcagtgattgaaattgatccctgggtaaatgtgggggcagtctcatccctccactatcaaaaattaacattttttttccccaggtgaccagcaagtaacgaggggaggggctgttttggtactgtatacctgcaaattttaaatattgatttactttacttccaaaggattggaaattttgtttttttctttctttgcccttctttgaaaacattgtacaaagtaaatctccttattttactaatggagaagcttctgaaagaggctgaacatacattgaagtacctttgctcagctgtaagcccttctggatcagaggtcagaccaaagtttgcagacagttggtccctgtggaccagactgaatccacacatgagtttatttggcctgtggagcactgaaacaaaaaaatgcaaatcctgagccaacgtttgggagatcccatattataatacaaatcgagatttccaggtttctggaaggtcttggcaatctagccacactgggcctgcatctgtgcaaggctgcatggctagaggtgtgtgctgggcacacccattaggtgggactgcgcctttctggccactagggaccgtacacctcctgttgttttcatgggggctggtttcccttgctgacacgtggccatgaggtccctcgaggtacaggccggcatttggacttgtcctctgcactgtttctttgttagcatttagaactgacttctcctcttcctcccccattgaggagcagcaccttactctgtgcagagtctgtctgtgatctgcaggctctttgcagagctacatttctctctggaggccttgctgagcagcctccgctgtctagggcattgctgagaatcacaacatcaacactaatggcccttgggccaaaaagtgtttgtcttaaaatccctgcaccaaatagcttgtgcaattactcctgtgagagccccagaggatctaactcttaggctgtttgttctagctgtattccttcccaccccccaaaccgaaatgacattaaaggatagtaactccctcccgcaaatatagataaaaacctctttactccctaacaaccacacaactatttacatttttgtgtttacctcctagtctttaagtatatgaatgcatgcaacgtcctttaaaaatatgtcaatcctagcctccacaccacccagccgaccaggtttcccagagggaagcattggaaatggcagatgggtaaatgcacagagctggcaaatctccatcctgcgggaggcttgctgtgcaatatagccatcgccacaataatggatcttcctaatgatccggaatcactgagcaaagactgtgccatgttcagtatacactaagtgagcatgcagggaatatatgatcagtttacaaacatttccacataagcttttttctctctcccactccagttttggtaaataaaagagcaaactagactgctttctttctctctctcactctccccctgtctccctccctcttcctctctgtccctgtccctctctcctgcctccctcattcactctgtcgtcctctctctctcctcctcctccttccttccttgcttcatttcccccctcatctctttcttcctcaccctttttaaaaagagacaggagtcttgctctgttgcacaggttagagtgcaggggtgcaatcatagctcactgtaacctcaaactcctgagctcaagcagtcctcctgcctcagcctccccagtagctgggagtacaggcacactaccatgcccagctaatttttaaaaatttttatagaggtgttgtcttgctgtgttgcccaggtgggtctcaaactcctgacctcaagtgaccctcccgccttggcctctcaaagtgctggaattacaggtgcaaaccactgtgtccagccagacaggtcacttttctgtaccattccctgatgttgtgagattagtgagagtccctactgtggaaccttgttcacgttgccctgactcctgatgcatggatatttgctgttaccaaagacacctctgctttaccaaatgttttgacagagtggaaggaaaactacaagacttcttgccctcgttttcttcagtctagaatgatgctggggtcactgagtctgtagggcagagaatctgatgtgttttttaggaagcggaaggtgtctgacacatagatgtttgacaaattttgttaatctggtcagagtgcagcctagaaaattaaattaaaaagctgctgaggagtgctggggtcgcattttgacatagatacaaaggcaccaatagggccaaaagtatgaggccagtcctagggctggtgaagtttggatcccctgcctgacattgtgtcctgagcccctggccccttcctgcacctctccctgagccgccggcccctcctcattccttcctctcctttatcttccgctgtctttgcctgtgcccccacgcccgtgccctgaatctggagtctttgtcttagtgcattctgtttgtctcactgtcttcctctgttttccttttcttgcggggaggaagggtagaaagagtgtaagaagctcaagtatgaggaagggaaggttgccaacttgagatgagtcagaaatgaaagcagttctgaatgtgtaagacaatgaggaaaatatttatttaacaaaaattgaactaccaaccaagccttcaggaacacagccagaaggtgctgtgtagggagaggtgtgcattaggatgctggagcgtggctgccggcgtccccaccccaggaggaagggactcgtttctctgaacctttttaatggttctccccattgtagacaggactggctctccaccccatcctcagtgggtgcagctttggggaggccgtgaggctggtgatcttggggcctcctatgcatctgtgttattgaaggtaacaatgtcccttctacccaaaagtcatgcttttaaaaacgcacaatcttgaatccatttgggaaacatctttggaactccagaatgttgtctttctcagatatgtattgccaatgttgtattacttcatttgctaagaaacattgtcatcgactttataaaattattgaataattctatttgggggagaagcctggaagctaagattttaaaggttatttataagttaagtgaactggcaaattcttaaatggtaaataaaacctttcctacatgctataggtagttatctaaatcagggcctaacaagcttttttatttattttcctgtaaaaagccagatactaagtagttgaggctttgcaggactgatggtctctgacatagcactaaagcagccttgggcaatacataaacaaaggggcatgtgtgtgagctgatggtccacgggctgcagtctgccaacctctgatgttataagccattgattttctacaacatatatatttagaactgggagtgtcagtgttattttgtcatggtttccagattaaactctttcatattgctgctggtcggtcaatgacagactaattctgctagcattgactttctgggccagggaatggggttcctagatagtgcagtagctttttatttattttcttttccattcaagggtaacatgcttaaaatacagcgtatgaagcttttggatatccactgtaaattttaaggtctaaaaatgaatgcaattgtgaaatgtttttgccttagagaaaacgctctcactgctttgtgttaataaatgcatgaaaaataatgatgaattaaatgcatacaaacagatgcagacataatttagatgagtgtattgcaattaaaatattgcccactttcgctacggaatattcgttggacttatgaccttagtgtaagtaatgtttaataaggaatctgcaatgtgtaactcctccgtaaattattaaaaggattggcattcctactgtataatatcaacacaagggatagaaaatatgcctggattcttaatgaatgtgtgctaacgttccttctggcataggaatgtgtagtaaatacacttcaagggttgttcgcatttttatccgtcattgttataggcatgttattgtgtgtctcctattgaagaactgattgatcattgttttaagcttctgtgacttttagatgcttaaaactaggcgttcatggtaggaaagtagagaaacatgtggaagaaatactgcgtttcaagtttgggagtggctggtagaaaaatcaaactaggctagtcttacagctttatcgcagttttgttttttttcctagtaggaaaatgatagtattggttgtatattaaaacactctctctgacactgacttgaatcacgtgcgagttcattgagaacagggattttaacttggttaggtgattttaaacattatttagcaaatctggaaaacaaaagagaaattttcaaatatctttcttccacggtggtgtactggctctctggagtgtgatttcatcttctcttattattgcatatgtagtcaagccatcatgttcttgaagtgagacttcacccactagtggggccgtataattcaggatcttttgtttgtccttacatagtttcttggcctggaatgtcaaaatatcagaaactgttctttctctggaatcatctgtctccgtgatggcctcgccatctgtacagtcatccaagctagggaccaaagagtcgtcctttactctctcatccttccggctgctgtgtctggctttcagtgtttgtgtagagcaggggtctccaactcctgtggcgtgttaggaagtgggccgcacagcaggaggtgagccatgggtaggcgggcaaaacttcctctatttacagctgctccccatcattcgcattgctgcctgagctccgctgcctctcggatcagccaccagcattagattctcataggaccatgaaccctattgtggaactttgcatgtgagggatctaggttgcacactccttatgagaatctaacgcctgatgatccgtcactgtcccccatcacccctagatgggaccatctagttgcaggaaaacaagctcggggctcctactgattctatattatgaagagttgtataattatttcatcatctattacaatgtaataataatagaaataaagtgcaccataaatgtaatgcccttgaatcatctccaaaccatccaccccactcctccaacccccaaaccagcctggagaaaaattgtcttccacaaaaccagtccctggtgccaaaaaagttggggaccgttggtgtagaggactcctcaagcagcgtccatatctgccctattctctctattcctccacctaggtatagaattctatctctaagacacagacagaccatgttcctgcctgggcaaacacttcggtgactgtgcattgccctgggtgaacgggggcacagaggtctttgtgacgccctgcaacgcatccctctccgagccgcggtgcgctcttcctcctctgtgccttgccggtgcccagaaccacccccttctccctctttgcacaagtgccttgctctctcctttctcaggccagtgctgctgatctgtctgtgtgacccgggtgcacagtccttggctctgtgcctggccctgtgcaggtctctgtggtggcacttagcacatggcgctaagattctccctgataggccttcagcgccgcaagggccagcaccgagtcctgcacatcctgctctagtcccacatcggcccaggggcgttgagctgaggacagctccctaccccctttctgtgcttggccgactccagcgcccgttcttctgcccctccttggctctgcctccccaccccttggctgaatctctcctcctttcgtgcttgttctccaggtgacttattcaggtccatattttcattacccttgcatttcattaattttctcatttattttattctgtaggtttaggacattctttaaaacatgcaggttctgaattttaataatataaaagtcctctgtgagtgcccatcacattgcttttctgtcctccctacattaaagttagcactgatgcctttatgtttaaggaaagcctcctgcagaggggctctgcccatgtaagttcattagaaggcaggtgtacagcctctgtcacctgaagacctcttaactgtctattccttctctggtctatcgaggtgtattgggggggttacagcaccctctggtggccatattgtcaggtgcatttttgttctagccaaataaaatgataacacaaatcgaatagtcgattggagttctttttcagaggacatcgttaattcacattttgtgtgtttcagcaggtatttaagccattctcgaatagtgacacttatgcagaggagagaatgattttatttaagtaatttctactttttacatagctagttttaaagtagataatacatagtcttaaactttatttcccctttatttctttcttttctgttagagaatttcttaaacttgtagaattatccaaataaaatgccagtcactaaaaaggaataattaaccaatagtgggaaaaaattaaattcttcaaatgaagagtactgtattcatttcatatggtcccagagataaaatgtttaggattcatttttagttttaaatgtttatgaatcagagcttcaacactcttccaggtttctttaagaaaggaatttgtctatctacggattaattaattagcagagcctctctgtgtcaccaagactggagtgcagtggtgcggctgtagctcactacagccttgaactcttgggctcaggcaaccttcccacgttagactcccaaatagctagaccatggtgcatgcaaccatgcccagctaattttttttttcaatttttctgtagatacagggatctcgctatattgcccaggctggtcttgaactcctgaaggcctcaagcgatcctcctgtcgtggcctaagaaaggaattcctcatatagaaaaatattgttatataaatagttgcctatatccatgctgtttatggtaacagctaaggttcatctcaaaagtatttgtatttggctttggaataaaaagaaatttcccctttcatagggttctgagattgtaggagtttttagtatttcaaaaagttaatggaacaatctgtgatgtgaaagagactcagaagaggctagagaggtctttaacacattttttttttgtattgttatcccttccctatagctaactttgtagatgacattgtttttcagactgatgattgtgaccctcaaccatggcagcaacaatttttaatttaaattttttaaaatgcaaggttgggtgattttctctctggatgcttgagttttgtttttgataaaaattctaccaggggcaggggaaagagtccattaagtcttggtgcaagaaacctgggcagattgcctaagtggatatgcatagcaaagaactgaaaacagagtagggggtgctgaaaacacccacagaggaaaatgcggggcggggggtgaatgcatctgctcattttgtaataaagtccttcctttcctttaacatctcttaatgttacaaataccaacaaaaaccatgcatgtcttcagtgggacagaaaatgagggaggcatttagggagaaaaaagtgtcagttgagatgatgttaaaataaagtttattttctttgcagttgcagacattaagatttattctctgggctgttaggacagttcctgcagctctctgtggtgacctgagcattgataccttttttttttttttttttttttgagatggaatcttcctctgtctcccaggctggagtgcagaggcgcaacctcagttcactgcaacctcagcctcccaggtagctgggactacaggcacctgccaccacacccagctaatttttgtatttttagtagagatggagtttcaccatgttgcccagagtggtctcaaactcctgtcctcaagtgatctacccaccttggcctcccaaagtgctgggattacaggcgtgagccactgcgcctggcctgtgccttggtttctcagatatttctgcccctgtagtgttctatgcactatgcagggaggtcctgactgctcagagcttaaattctgcattcctttattttaagtgtttggccaactgcagaggaaggtaccttgaaagatactccctctcctccctcactgctgggtcccctgtcataggagacctggcctgaggaggcttcttcctggtaacctgggttgtcactgggaccacatcttcccataagaataatgcttcaggttgtatgggagaagtgtctgacagcagtaacttcagcacaccctgagaatggcccttatggcagacacaccggacagcagtcactgaagaaatgagggttgccacatggaggttgctgggaggagggtgctaagtgaaggtgctgtataagctgcatgctttttacaagcagttgaagttctgctgtccagcccagagccactgggccaccctataaataagttcctccaaataaaccctgtgccttgtttgttagctctgggtctcttctttggcttcttcaacttggtgctgtccctgttgaagttaatacgggtttggcacaacacaggagtagacggttacctgtaccctgccagctgtccttgctacaaacatttgcccagagagtggcatttgtgccggttcttaaagtgtttcttgagctgcacattaataggccatgtcctctttcaacctgccctctggctaggtagaacaaacactcttcacctgggctctgagccagctgctcacctgcagcacccccctccttggagatagcttttcatgttgcatcttaccgagttgattgagtattcacttcgaagctccatgctgcacgcatgggcctgtaaatagctttttcgtgcacttgtgggtgtcatttcagatcgcttcatcggatttcagttacccaagtttttacttggttcaccgtaagtttgcaaaaaagactttttgttatcctgaacattgcaggtggaaacatgattaattttgaattatttttgtttaacttctaccctctttcctatttacagcctattttgtttattttaacttccgctgttaagacttctaaggccaggcatggtggctcacgcctgtaatcccagcactttgggaggccaaggcgggcggatcatgaggtcaggagatcaaggccatcctggctaacatggtgaaaccccgtctctactaaaaatagagaaaattagccaggcgtggtggcgggtgcctgtagtcccagctactcaggaggctgaggcaggagaatggcgagaacctgggaggtggaggttgcagtgacccgagatcgcgccccattacttaaaggaagtgggcttgtgttttgtggccttaaggatgtaatctgttggtaggagggaatgagggtgtcctggtaggggtgtctggctttagtgtcaccattcttttaggaattgccatgttgtggggtcacgtcttgtaggagaaacgttctgaagtcatgggattctctaccctcctctcctgctcttggtttccaccagcagcctgcttggtgtggttttgaaatggagcagagatggttttgatgagcctcactggaggtgctgctgagattaccgagaggccttgctgggcacctggagtcaatcatgccgggcactagcatccgtcatcttaggaggtagggattattatcctacctcctaagccatccctggagtggtggcttggagaagttttccagagaaaccgatcagttcataaagtttctgtaaaggattaacacagtgtagtccagaaatgtttgttcatgaagtcttggtttttgggtttaagaaagtgttctcctgtctgggcgtggtggctcacgcttgtaatcccagcactttgggaggctgaggtaggcggatcacgtggtcaggagatcgagaccatcctggctaacacggtgaaaccccgtctctactaaaaatacaaaaaattagctgggcatggcggcgggcgcctgtagtcccagctacttgggaggctgaagcaggagaatggcgtgaacgcaggaggtggagcttgcagggagccgagatggcaccactgcactccagcctgggcgacagagcgagactccatctcaaaaaaaaaaaagaaaagaaaagaaagtgttctcctaagtgctgctcaccctttttcccaaacaggacctaaccctgcgagggagggtgaattaggccatttgtttacagtttcatcagcaccaggcgtgcacggcgttagtcatggtccttgctctcaaggcactgtacttgtagcagcagtatggtgcaaatgtgcagctgaacagtgggcacaggttcctggttagcatttagtgccacaggaatgacagggaggtcttaattgtgatcggaccgtgggagctggattaccccagactgtagctcacttccctgtaagcttttggtagggagcttggaattagcaccattagtagaaacagatttcaaagggaatggtacctgttccgtatgaaacactttaaaactcccggtgtccacacgtctttaaaaaagaggcttaaagcagtttcatttcatcaaccccaaactggagaagctatgaatgaccacactgatgaatatgtcctaaaatatatgtatattatataaagtgtaaaaacagacaagcaggaacatactaccagtttctatcacagctacccttaaactatcattggagggcaattaagtgggtacaacctctagctatttggaaatatgtataaaaatgacaaatgcctggttgggtgctgtggctcacgcctgtaatcccaacactttgggaggcctaggcgggtggatcacctgaggtcaggagttcgagaccagcctggccaacatagtgaaaccccatctctactaaaaatacaaaattagccgggtgtggtggtgcatgcctgtaatcccagctactcgggaggctgaggcaggagaaccgcttgaacccaggaggcagaggttgcagtgagccaagatcgcgccattgcactccaggctgggcaaaaagagcaaaactctgtctcaaaaaaaaaaaattaaaattaaaattaaaaagtaaaataaaatgatgaatgcctgtactcttagacccagcactcccagttctgccagttcatgcagcagatacatatgcacacgtacagagaaggatgcaacagatacatatgcacacgcatacagagaaggatacgtatgcacacgcgcacagagaaggatacatatgcacacgcacacagagaaggatacgtatgcacacgggaacagagaaggatgcacaagaacatacattccctagttgacggagtcgcagattagaaacaacagaaaagcgtccattaaacaacagtttgaacctgtgttgagatatcagcatcccttctccttctctcccccactccctctgccctctgcaggttttattctcagcctgattttctccattggatgtcagccctaggctggcatttgcagagagagatggtggctcctgcagagcttacggcctgtattttattgggctgtgttgagttacccctgatgtgagcaggagaatgggatgttctgtaaattggcctctagcccatcgtgaattcatattttttttataatgtgtgagtcacactcccttctgtcttcatttccttttcacactcccagcagatcattctctctattctgattggcattttatacatgaggcagcagaggctgagacctactgtattttgagacactgtagctttatatggcataattaaatcatagtcatcaatcactcttaggaggtaaggattattattggcattttccagatgagaaaaatggaggatgagaaaggttaggcatcttgctgaagtcacagcagacttaagtgccggagttggagctgcattccggtatgcttgcatagactctcttctcatgctcactgcacgccagtcacctggtatgctgaggccctgcctccaggccttctgattcagctggtctgcagccctggcatttccagctcctcaggtgattggaatgaaagccagagctgggagccactggtctacaccaccagtaaatgatcgggttctcacttgatcatttaattaagaatcttggttttctgctttcagtctgagaactcttgttcatgctctcaggcatgtcttcacgcaggaaagtgatctttgaaattaataggtgcttggaaagcctttaagcagcaggcagtggagaaggccactcagtaggaagggccgagcatgaagcctagtgcacaggcttttcaagaccccacggagggtcttcagaaaaatgggtttcctttgtctccgtggcttccagtctttgttggccagcagttgtctgcttcaaatgagctggctctagaggggcctggagaacccagaaaaactttgtgacaacctgacaagtttgtgttaatcttctgggcattggctttctgcacttattgctcactgaatcactgaaccaggcaggtggggtactggagggcaggggatgggtaagaagggcagcctttggaaggaaaatcagcagagggcagggaccggggaagaaggagtaagaagggaaacccttttcttaggttcttataaatcagaagagcaataaagaaaaaatttaaatctaaaaaatacatgattaggatttaaatccagtatgcttcactacatataaacctttgacttaatattttctgtagtagatgaaaataggactttttttgtttcccttctcttcacatggtattgagtttttttgtgttctgaatacgtgttaagattaattatgaaaatcaaattaccagatacttgaaatataaaattagtaatattcaaagacgattaaatgcacgatttccttttctcataaaaaaagaagcagacggaacttgtattctgaaagcaaatatggaaatcacattaaacatcagaaaatcctcaccaccgccccccacccccatgtgcatttcatttctctttggtctgagttcaagggagagagaatatgaatgtgctgctagctcaggaagcttcagttctaactttctaaagagctgggaatgtgcttgagtctctgttatctcttgtttgcatttttcgctactttgcctccatttgatccagggaaaacttcatggtagggatgtgagatgtattttgagggctaaaagaaaggagtttgaacaaaagcaggacagtgttccgaatgtggaagcaaagagtccttccaaggggatgtgcggccaacgcctctgttcagcgatagtccagctgagaccaggacctgtgcctgatgcccaggccaccccacaggacggtcctccagcacctcatttctcctttcatcagacacctcttcactggcctactgggagaaaacggagatgagtgaaaatgtgcatacagaacatagggctcaaagggaccctagcaccagtggtgctcaagcctgtcccagcattagcgtcacctgggagctccaaaaacatattgttgccaagactcagtccaaagcaagtgacttccttggcctggagtgagatgtgggtggccagggtcaggaaccaccgagtgggtccacctctgcagactgggaaacagagtctgggaggctgcttgttccctcaaggacctgaagtgacatggggaggcaggactagccttggggctcctaattctgtcctggcctgtattccagtgtgccgtggggcacgtccaatttgaatctggccccagtacactctcaagccctgtgttgctctggtcccacagcttctgcccttgactttccatataacagcacattggtggccagggctttgcactaacctacctgcctccaacattgtttttgaataatggaagctaagcagatgcatattaatgcctgcattatggagaagactgtctcttcacaagtaatctgtagttgttagtcttgaaagtgggttaattcattgtctttctagagaaaatgattgcatggcctaatagtcttccagttagtctgtgtggcaaggtagaagccaggagtggattcttagctcctgttgagtgctgctgtcctgaatcagagatcttctctcccgggccactttgtcatgagcaggattttgaaccaagaccttttcttcacctgtctcgggggccctcaccgtgggctttgtgatcccctgacagctccaaaagcctttatcctcatccaatatctggtgaacagctgacacctcctgggaatctttaaaattgttctctaaagaaaccattctgctgcaagtacctatttttagactttataaagcccacgtcaggttgtcgctgcctttctctctgtctgctaagcctgctgtttgaaaggcagcaacaggatcttttgtctttaaaagttcagccccagctggtgcattccccacttgaactccatagccctggtgtgctctggggtacgtctcttccaaaacccaaaccacaggcagtgacctttacaccccaggagttgaaataatacacctggaggaagaaaataacttacaaacaatgagcctagagtataaatggctatgttttaaaaccctcgattttccttgggcgtatttaacctgtacagctagactgttgtgagttttgggctctctagggggctgtccaagttcagaacaagtgcatctgctggcagccagcttaaggagttagcagccctcaattccaataacgaacgtgtaaatcagaattcaggtgtgttgaagtggggccttgcacacatcctggtcagcccagggtgatttcctctctggccagtggttttggcttttttcttcacatgaactcgtctgttgtaactaatggtcactgagtgacttcagaggtagtgatagctcatagtgaagcccgtgacccacagcggtgggcacacctcgatcccttctccttttcctccatccccacctttctctccttacttcatcccttcctctttccacattgggtcatccagcagaagtcaagtatcttctatttcatatctttattgaataagagttttacgatccatgttattgaagtaggtaaatggaatctcttatgtggaattctctaaaaaagaatcaaaactccagtcaaaccaaaccaagtattccaaatcgtttttagggaaaaaagatataattagaaaagactggagagggtatgcaaactattaacattatgttagggtggtaggagtataagttatatttgctttttctgaatttctaaattttcttcaattaacatattgttcaaagtatcaaatacatagaaggaagagtgtgcatgcctgttatctagcaaacacacttcatgcaaagaaactctcctaaggaagtatgaagttatattttatccttatctatccaaagagagtgtgtgtgtgtcatatacctaaagaattagttattaagatgaagcattgcttataatgaaaaagttgaagcaccctaaattagcttaataatggtatatctttataatggaatagtataaagccattagaaatgatgttacagataagtatttaatgttatggaaacattttataacatagaatgaaaagtaaattgtagattggtttgtataatttgatctcatcttaggaaacacataatacagaaatatagatgaaggtctgaagggtattaatgccctaatgtattagtagcattacctcagagaagcaggctcatgagtgtttattttcttttcttctaactaagtatgtatatgtgtaagtgtgtctgtatacaggagatgtacatacacttttcttgtgaagaatctgtattgcatttactactggaagggtttattttagatttagatattaaagttacctctttgagtgagaacctatgatttatacttcttagcttaccttttacctccattatttaaatctgtctttttctgccatcaaatagaagatgtaacagtgataaaaaggctgggtatggtggcttacacctaaaatcccagcactttaggaggccaggggttcgagaccatcctgaacatagcgagtgacgtagtgagaccccatacctacagatttttaaaaggttagccagacgtggtggtgtgtgcctgtagccccagctactcaggaagctgaggtgggaggattgcttgagcccaggaggtcaaggctgcagtgagtcatgaatacaccactgcccttcattcagcctgggtggcagagtgagactctgtctctaaaagtataatattttaagaaagaaaaaacaaaaactagtgataaaaagaacttacaacaaactgatttttaagtggactgttgataattataagggctgagatttttaattgccatttgtatcaatgaataacccccctgtcaccacattttctggtgtgtttggtgtgtctggttcctataggagagacagtaatgctatttgacatgctttattgctgattagaagcctaatctctgtaatgggaagctcagtaatgaagcttgttcagaattgtgttacagtcggttaatgaagctctgagatcaagggcctggcttttgatggcccctatttcagaatccagaggtttgtttctatttatttgggttttgcaggtaagttccctggactgaggtgatctgaaggttagctctgctataataggtaaattgctaagaaaaacattggccttggtatgtacaacttaaaattttattggtgagatagtcttcttacaaaacaatcacgttaagctagaacttggtgtataaccagcatatatactcctgccaccctcagtgtgtagccaaagttctaaattgcatgcacagataacaggcatataattggtgatttcagaaaagttatacctggtgggcagtgagaggcgagccctgatctgggaaaccccagtgcttcaaggggaagcaatctgggaaactccaatgctgggattgggattcaatctgggaaaccccattgctgacaaggtacatggtacaagcttgataaaaacttgcttaatgtcacacttgtaatcccaacactttgggaggctgaggcagctggattacttgagttcaggagtttgagaccagtctgggtaacacggtgaaactccatctctacaaaaaatacaaaaattagcctggtgtggtggcatgcacctgtagtcccagctgctcgggaggctgaggtgggagaatagcttgaatacaagagttggaggttgcagtgagctgagattgcaccattgcactccagcctgagctacagaaaataataataatttaaaaaaacttaatgatgatagcatttgagttggcttttcaatcctggtttcctaaatatgtgagcctggaccattaaactgtgtgacaaggagctgtcatcttaacatacagacattaaatgcattgttcaagatcagaaatgatttcttggttctgaggcactattgactgtgtgtaaggtgccatcgttaatttggtaacaaggggagacagtggcagggaagttccttttgcctgtcttgtgataggcttcctattttctcaaaggttaagatattaaattgtcttaagcaaagaaggtatttaagggcatcatcagggttagttctcaggtctcctgactcctagcttctctagtttagtgattcacgttagcctttcaacagtttaccactcactttaatggtttttcctagctgtcttgacatgcttttcactgcttacatggttagtttcctacctagctgaatgcaggcatctgtgctgtctgctgggttcgctggtggtgatgcagcccacaggtacctgtctctttgaggggagttcagcaaccatctatttatgtcgaaaggcactgtactgggagatgaagaacacggagttctaggcctccaggaatttatcatcacttgctaatttgagctgagcctggcacttgaacataggccatagatttccagatgtgaaaaaaagaaagaaagaaagaaaaggatcctttaatgtatagacttgtctttctgcctgctttcttcacttctgatcattttaaacaattgatatcctagtttgatgtgatcatgttccaacacagcacaacagcatgtatggtttggggcatgcacctgtggcagttgcaaaggtttttacagtgaagtggctaagaggagagtaagaccagtgtatagggtgtggatgaggtcagatgcgagactatttcttgatttgagtcattttatttaggagctatttctttggaatactttatatatgagaatgtacatctgattggaagacagaaggtactgaaatttacctcttgatcaaattattctggtataaaattaaactaaataccaatcatatacttaatttcacagacttgcaaataatatactggggtaatggaagtaagagacaggaccttttatgtggtatgaagttctgtgataattcctatcttcctttgtacctaaaagaggcaccctctcctgtcatactgcaaacagatgccactactacgtgtagacacatttgccagctgtggcacagctggtcacccagccctcatcacagctgcctgtaaaacccagatttattctcttccccctgatcttttttagaaattactggtatcgttttagagagtatccaacttacacacaccacttaaataatgaattttccaatttcttctttttccacggccttcacgtcatctggtaaatattcccctcaggttggcatctgcttctgagaccctgctggacctagatatattcaccagagatgggtgaaggctttggaagagtgaagtggttaggaacatttcttccgatatctcctgctcattgtttttgacctctctgatttccagtatattctctgctccagccacacagctttcctgaacagctaagtcttgctcaccggtcagggaccagctcaaaggctgtccctttttaaatttatttcctgggtcttctcctggcctcttccctgcactcggtggagatgcctgccccatggttttcagtagcgttggctcttagctgttccgttctggggaaggattggttgttttccttttctccatgtgtgttgtgaatttcattctgtgtcaccgcatcacgcgaggtgggtagggaagagaacttttacgctccccgctgtcgttagtggcctgattacgagtctgtgggaaagaatgaaggttggaaagaagatctggtgggaaagaacaagggttgtccttgagcagccaaactaagctgtgagaatgttaatgtaataaagcaggaattctaatgggctgcctgctacagaggagatgggagatggtgtagggctcatgactgtaaaagcaggagccaccagcagatggtgatgcggcctcttggcccaggtgggactctgcatctccccctcccatggacattcacttgataagtgttgggccggtcacccatgccctggtcgttcttatcttatcgaagagtgctaatataagtaagctgtaaattcccattgtaagaaataattgccttttaaaagggagcattcaagaaaaagaccttttggctcaataaagcctttattttcctcaacactcttggctcttaaaaggggcctgttcttggccttgaagtgggaatttacacagaactttaaacagaagaaaccccctctgccttgggctgcaacttgttgtccctggcagggtttgggctgtggggtcatgggatctgtttgtttgaccgttgtatgcaaaaatgattttaaaattggcctccctaatctgttggagacattagttaaaaaaaaaatgagagtaaagaggaaaatattttgctattgggtatgcactggatccatttttaaactgagagaaggtgaaaggggtgactggttgatttcggataatacttttagagccacggggaactgtgaaagacaagaaaatgtaaaaaaagcacattgattgcaggaccggtggtccaaaagcagcacgtgaaagaggtttcaaggctgtttctacaaacaagaatgccaaaggtggcataggacaagaagcttgctggatgtcacgaagctagtggagatgggatccaaagctagttttggctgatgaaaatacaggctcatgccctgtatgtgaggacagtgggacagtaatttaaacagaagtatctagaggagtttccttattgccttgaatgtatttctttttaacattgctatggacatttaggaaaagatgccactgatattccaaaaggggcattccatacacctgagagggatccctgaggctccagggtcacctgggccaagccaggtatacacacgtctcatggcaagttggctgttatcataacttccctggtgttgttttgttgcaagggcagcattgtggggctgtggtttgaattgcttttttgtgtctcttgaatacacgaagttcctcctatagtcattggctctgctgcctctgatgaggcacttccgtgttccccacatttgaatttgctcccgattcgagagaggcaggcatccgcggcagcagcttccaacccagacaggcttaagccgcgcgagggtgcccgggtgggtggctgcgcagggccctacctgggcgggagcggctgcagagccctgtccacgcggtgcctccccagcacggcacctcccactccaggctgttggttacctggccgggagctggcggagaccaggatttctcctcgccgccgttgctgttgttaggggaaacagaccatctgcatctagacctgcctctctctccgctccccacttcagacgagctcttcctgcctggaatctggtaagtgccaccgaaggttccgttccctttattactcgattagtgcccacagcatcaggagaaggttctcttaccgtgaatccattagctttaacccaaatgtgcaggattagggggattatttgaacttgcttgctttctttttaaaatgtccattagacattttttgcatgcttcaaaatcaaaaggcggcacagtgaaaacattttaattatttatgtatttaacctgtatcatcttgtttctaacctcttttcttcagggtggtgcagtcaaaaattacacagatattgctctggtgcctctccccccttttatgaataaattactgcatttgtcatcactgtgttcctgaaatgtcaaaaatagacactgtaaaggaatctgtcatgcagagttcagaaattttcaaatttctgagttcaaaacctcaggtgaagcgaggacagatcttttatttaaaatttgattctttgtaggcttcactgtgaaataagttcaatttagagcatagctaatgcaatcagccagctcgtgatgggacaacatacttctctattgttttacattcacctcctgggatacacacactttctcatttgttttataacctttacaggaaatacctggggatgagtcacatgacccctaacttgagtttttacatgtattcacccagattaaatgattttgctcttatatggataaacgtgcagttaggaactttaaaaaattgtaaatgaggtgcataatcattactcattgtcttttactgcattcttcagccctcaaacatacaaactgttattccctttaagagaaaataaaactggcacttatgttttcctttactctaagttaaagactacccatgttatgtgccattaaaaaagatgtagaaattaatctgtctttttctttgacctaatcttactagcagggatattggggctctacttttctgttctctctctctctttttttttttttttttttttttttttaacatcagccacaggtaatactctccggtaaacatataacttgaggaaaattgaattaggttaatgctggaatagaaaaccagggcagtgcctgctctttttggataattctgtataaacaatgagaaagtctcaggctgccttagacaaaggctgagacgggagctcctgatgatttttatgagggggaagaggagatggtgaggaggagggcaccgagcatgtgcagcaacttgaagcatgtcagaaagaacatttgccagaaatcttcaaaaccgtggcggtcggtaatgtgtgaaattgaacttctgaccctgtttgcttgatggcgacttctcgttgtgcttgagaattgtgtggcattgggtccctggatgtgggaggaacagcaaagtggtttagtgaatagagagggaagtgccttcctttttgggtgggacttgccatgatagagcctgggccgtcaccttaaaaggagatgtttctgttgagagatggaaaattggcaagacaaacgccataaaccttaacctgtttataattccttacctgtaagctgctttgcacgcaaggtgatggttctacctcataagggacaaggaagaacagcacataaacctgactgaatggagtgtggctgtgggtgggagcagctttacaagaaggaaacggggccccctcctgagacacccccgtttgcttctgctccttccttgccattgacgtgcccttctcctgaaactacccacacctgtgtttggcaacaagcggctgccccttgatccagatgcatttttcaacttgcgaactctcacctcttgccaagggacccaagtacctggttaatgatctttaatgtaaatgatcctttgccttgattaacattgagctgggttagtatgcacaggccgagctccgtggtcctcccatgtgatcccttccctgccagccacctgcccacctgtaggaactgggcatggccagttttctctttatgtgctctctttgccttggatggaatttgggctgagaccgatgaggtggaaccaaagctgttcagcagaagagagcaaccacagagcagcctgttgggtggagggcttgagggttcctaaaatccgaggactttctggtgagcctctcccctgagcctgcttgagggaaggcgctgccccacacactctccagtgggtgggggtgggggtggcagcggctgatcaaaggttctcacctgcaagtgataatagcctgggtctctttggcaccaacctgccttcttcacctttctgctcagacaccccttggcacccctacataaaggaaagagctgtctggatggcctagtaactgtaggataggtaaagttagccctttcttctgacctagatatgtgatggtggtatttctacatgtttatgtcgagaactttacaaagatgaaagaaaagctttcagagctgcagaaatgagaggtggcccttttttaaaatttattttaagaaacaacttttaaaaccactttttgaaaaattggatggcaccgtcctgcagcctatcagatttcccttgagaactggggattattggcttattccttgctacctccaatcccaaattaagcagagtgacatgtaagaagctggggacatcagcctaaagcgtttatcaggtatgtccttcccaactggatcttttctactccctggcccgaattttgttttagggaatggggcctattttaattgctggtggcaaaaggatccctgggcagtgtttccatggtcctctaaggtggagtgtcggggagctgggggacacacagtggtcatgggttatctgtcttggcctctttcccagaccaagttctgtctcatgcttattggtttggctgctagttatagaatctgatgtttaccttagaatcctaggatggaaagggttaagaatgatttctaatttgaattccttgtttctagggagttattaaacctatacattacatttattattttacaaagcactaattcataatagttgacaggaacaactattttttggcttctttgtttttttgtttgtttgtttgagatggagtttcactctgtcacccaggtctggagtgcagtggcgcaatctccgctcacagcaacctctacctcccaggttcaagcaattctcctgcctcagcctcccaagtagctgggattacaggtgctagctaatgtttgtatttttagtagagacggggttttgccatgttggccaggctggtctcgaactcctgacctcaggtgatccgcctgcctcggtctcccaaagtgctgggattacaggcatgagccaccacgtccggccttctttggttttcatattgattatattttctaagacaaatactcatttatatagtctaataaaaattgttaaatctaattaaacaactaataaaaatagttgtttaatccacgttgacatcttcttacattgcgatagaaattttgatatatttatccatatgatgaattgcttaaagccggtggttctcaaccagtggcagttttgccttctctcccacaagggacatttgacactatctggggacatttttcattgtcatattcaagggagtggggtgtgaagctggcaagcatctagtgtgtagaggcctgggtgctgctccactttctacattgcacaggatggcacctgacacacagcctaaagcgtcggtactggttgaccgtatacgaaatgctgtggaagaccaggcacggtggctcacgcttgtaatcccggcactttaggaggctggggcatgaggattgcttgagcccagcagtttgagaccatgtttaagtttaagttcatttaagttctctgaagtggtgattctgatgctatatagatgaaggttggtttgttgaagagctgactctggtatttcatccaacatctgcatttttctttagctaaggatgccttgagaaacattctagtctcttaggcctgaatttgttattagcttaatagctttcctctggttgaatttaaatggaaagaaaattgcatcttgcaacaggaaaaagaacattagggaaaaactgaggaaatggaaataaagtgtggaattttgttaataataaatcaaccttgatgcattaattgtgagacatgtcctgaaccaatgtagatcttaataataggggaaactggcttcagggtacgtggggactctatcttatctttataataattctctaagtctgaaacaaaaaagtttattaaaaaagcacaaacaaaattgctgccattttgttaacagatatagtagtcaatcttactgttttctttttctttgaaataggctgctgcaaaggtatgttctttgttatctcggctctctgctcagggtagccatgaaatggctcttttaaaaatgtgcccagataattttgaaccatttcaaaccatattatgtgattttaatttattttccattgcattcactaactcatttctgggtgatgtatttaaaagactagacagaatttacaggtttaaaaagttacattaacagaaaatgtaggtgccagttgaaatactgtcaactggaagtgctaccagcaatgtgctagctggacaatgggacttgtcccatttttttgctgggtgacagctatcactgcctcagggaggctggtgccatttaatgcctctgataatcagaataagtaattgtggcttctgggtctgtaaagccacaaaatacatatgcaggcctattttaattgacggtaagtcatgaaatacactattttcgtattaagataacgtggatatgttatggaacaaagttaaaaattagcatgaatttttaaagtactactggagattgttggctttaggttcgtgaaccccattcctgcccccacactcctgttagtggggctaccagaggggccagtatgaaaagcactggacttacagatgaaagaacttgagctggaatcaattcgagtcacttaccttcgctacaggtgggcagaggagtcatcctgcaattttgttgtgaaaacagaatgagataatataaaatgtatttgaatacagtgaggtctgtacagatgctgaatctattactttgcagtaggagtcaggtgtggccccacttccccaccttcttacctacttgtatcttagatcttatatatattgatattcacttttggtggactaaggttgtctttgttgcaaacctggactctcttgtattcttgctcagtgtgtgtatgttaatgttagataaagaagattaggctggtgcattggctcacgcctgtaatcccagcactttgggaggccaaggcgggcagatcacttgaggtcaggagttcgaggccaccctggccaacgtggtgaaaccccatctctactaaaaatacaaaaattagccaggcatggtggtgcctgcctgtaatcccagctacttgggaagctgaggcaggagaattgcttgaacccaggaagcagaggttgcagtgagccgagatcacgccactgtactccagcttgggtgacagagtgtgatcctgtctcaaaaaaaaaaagcagaagattatttggaaagctatttttaaattattcttcaaacatatactaaaatagagaagacaacatgagagccaacagcataatgaaaccccatcactcagcctcaaccgttgttaacagtttactatctttattgctactgaaggcagttaaatatttcttggcagtccttttttatttagcatataccatcagggatgacaatagaaacaggtttcaaagtcaggtgaaataatgtttctctatatgagttcaccactaacttgatacacagtttatgtttatgtttatgttcttattacgttcgtgtattaaggcaacctttcatccctgccccctaataggtaactgtctttatttgttctgggattatccctcctccattgccctttttggaaagagtatggatatatttgtattttctcttactcataaagcagcacatggtacatactgttctgagccctggttttctttttttcacttagcgttgtatactggaactcactcaatgtcagtatacagagaattcccttgtctttttataactctgtgctatacgctgacggaagttcattcagtcagtcccctattgatggacacttgagttattctcagacttgtccattgttttgcaaaaatagccctgggcatatgtcatttggtatttttgtcgaggcattccaataaaaataagtaaattcttcctctcttgccttgaagatgtgcagctcctcagtaaccttttattctctaaagctctgtcctcatctttaatccctgatttaagaggtgcagctcttcaggccataaacctttcttcctgcctcaagtttttaaagctacaaaggaacctaagagatcccttgtgttttacagctaaaggacctgagagcaggaaacaaagggagagccggaagcccaggtctcctgttccctgcctggcaggtgatattctttctgttaaactctctttccctctgcctattattggccaggctgtcctccaggacagtgcttgccaaagtgtggtccatgggcagcagcatccccggagctcatcagcaatgtaagatgtcaggccctgccccagaggggctgagatagaatctaccaattactggattccctgggtgactcatgcagtcaggttggagaagcgctggactggtggctttctccagaggagcatgcaacagcggtttgcaaacagggatgatgcagttccttttcaacacgtggatttgcacttcctcctggtgcgctcctccagcctgcctgtcctgttcacaccagcctccccctggaaggggttcagacttgatcctttgggtggtagggtctttcttggatagcgtagccatccattcctgctgcatacattcaacacagccttcatccttcgccatttgtctctgatacttcatactccttttgtttgacaagtgccctagctttatttattttctcatcattgttgttaagggcctattgtgcttgctagtatacacaccactatgtaagttactagttcaatttatttgttttactgctgctgtgaggtgtgtccatgtgtgcacatctacctgtgttaataactgataatattgggcctcagtacatactttttttttttaagagacaaggttttacttcgtcacccaggctgaaggactgagacacacttgtagctcactgcagccttgagctcctggacccaagtgatcctcccaccttaacctcctgagtagctgggactacaggcacacaccaccacaccaactaatttttttattttttgtagagacggattcttactgtgttgcccaggctggtctagaactcctggcttcaagccatcctaccacctcagccttccaaagtgctgggatgataggtgtaagccgccgcacctggccctcagtgcatacttagatatacttaaataaaaacttaattgcaaattacttcttaaattatccacaaactgacttggcagtaaaagtgactacaagtagtgaaaccactgtcataataaaaataaaataaaagtctttattgttagatttagtatttctaatctcttacatttcagttttggaaggtaaatttttgggaagtggtggtaataatctaagtatgtctagattcagtgatgagagctagtacactgtaggaaagagttgagcataacaatatggaatgttggtaaatgtataggggttttctttttaaagacagctttttatacaaagaaacagatgatctttttttttttttctaaactatgttagctatacccaaattagtaaatgttaaaataaccatgactggtaaaaacattttgcaattttttttttttttactttttatataattaaatgaaattctccatttggtagttgatctctcagacaaattaagtcttgccagactgtctgagaagactagtgaatcagaccctaaaaacttgtagcatttgaaaaataacaactgtgtactgcaatttataagggcataattagagaaagtttttcagtctgaagatttatactaatcttatcaccctggttttagagaacccagttcaatccaactgctgtgaaaaagccactgcttttagccacagaaaataaccagtttcatagaatgacttataataaaaaattcaaccattttgactccaaaaacctagctggccgggcgtggtggctgacgcctgtaatcccagcactttgtgaggccaaggcgggcagatcatttgtggccaggagtttgagacctgcctggccaacatggtgagacccccgtctctactaaaagtacaaaaattacccagacgtggtggtgtgcacctgtaatcccagttactcgggaggctgaagcaggagaattgcttgaacctgggaagcggaggttgcagtcagccaagattgcaccactgcactacagcctgggcaacagagtgagactccttctcaaaaaaaaaaatgcctagctgactttatcatagatctgtctgtaccttgtaggcacaaatatatttacaaaataattaatggtgatttacttattcacaataagcagttattttgcttttggtgtatatgtgacaaggtggttatgtggagtacataaaggagtaaagtaagtccgttgacttcaagatgcttacagtctaatagaaaccttgaaatttccactgggcaaggttttcttgggattgctccaaccaaatgaatgagcaggcgtctaagtaaatgaaaatcactctcatcactttccttcacattatgttaactggtgacaggtcatgacgcatgggaattgcttatgtttctgagctttagtcttataaaaataagtttagatagtccatcatgttcttcacattagacactcattacataaaaggttttatatgtattgtagatctttctgaaggtcatctatgtgaatgtttaaaaaagaagcaagaaggtgctataaaaagcactagaggtcaaatggtttgcgagacaaaatgaaactctccagctctgaaatccaacagagtatgatgaagaaagggaaaaaatagatcaaaaaatggcaggggaggaactcggcatcaaaccagtgataaagcagaatgtggatcagatccagacatccagtagtctgtgagcatctccatatgggatgtttgggttgagagttcaacccatcaaatacattttatccataaccataagatattctaagatcgaccaagtagagtaagcaatgtagaatcaaaggtatcatctttattatgtcctatttgtgtttcctgcttttgaggttcttagtccttttaattaactcctaatgaactaatatagttttgtggtcaccagcttctagctagcacaggcacagttgtgggttggtaggagaatgagcagtaaagccatgagctaacacaccaagtaatctgttgtgttcacaaatgtccaagagaataacaagagattaaagaaaggtaaatacagccacctggcaaaaatatttacccttttaaaaatgatggaagttatatatagaagaaatgtttttggtaaaaatatttgaaagtttgttttataatcataagtagcttgggctattttgactagaggggtgtgtgtgtatgtgtgtgtgtgtgtgtgtgtggttggcagggagagaaggagggaggcaggcagctggtagggactgtggagtgtgtcagttgggagagggaaatgagatgattaagttagtaagaatagaaaacatgtaggaaggcggatcttgaaatttcagggctattcattagtcattagttgaagatttcacagagaaatggtagaaaccaccagtaattaagaaatagcattattgtttaaaaaaaaaaaaactcccaaaccctttccctggcattctggtagaatatagttttggtctaacccaggtcccctctcatttcctttcacatccccttggttctagccacgctagactgtctgggttgtctgtatatgttctgatgtttgttttcctctgtgctgttcttctggcctcagaatcctagtgtccttgtgcctccttctgcatatgtctggactttgcttagctgatgagatccagttcagataccaccttctgtacaatggcttccttaattcctttaatttctcttaattgcaataaagctatttgcagaggaatgaaagatgctcccctttgcgctgggtacaggatgcactgaaactttcagcatggggcgcggtggctcatccctgtaatcccagcactttgggaggccgaggcaggcggatcacctgaggtcaggagttcgggaccagcctgaccaacgtggcgaaaccctgtctctactaaaaatacaaaaattagccaggcatggtggtatatgcctataattccagctacttgggaggctgaggaaggagaatctattgaacccaggagacagaggttgcagtgagctgagatcgcaccactgcactccagcctgggtgacatagcgagactccatctcaaaacaacaacaacagcaacaacaacaaaaacccaaactttcagcaggagagtagcttggttcagcccagcaacatcggtttgaagattatatcaagttttccagtcaaatgtaaccagtttatggatctgtgtttgcacggggtctgaacctcccctcctcaggtataagctcttggaggacagcctgctgcttaaggtacaggagaattcatctttgctggacatggtaacgtatgcatagagatctggcaacagaacttaagatatgtgggagaaataataggcaaaaactggaaagagcacaagtaagagaagagaaatccgcagaagtgagaagtaacagaattgctggctgaggttggaggcatttaagtgtgtgggtgtttgtgggaggcatggtggtctcctgttccttgacctcattgggcaaatattacagcacgaacatacaggtaggaatcaattgcatccccacctgggcaccttcatcggcagttggggtacaccacttgctacagtgtgatggaataagggacgatccaaaggcactcagttctcccacccatcctgtgcacaaggaaaagacctttgaattgtgtctcccctgttgtcctttgcattgtgaaagtgcatattagttctcccatccactcttttctctttaagctttagcatacggttgtttgccaagaatggaatcagatagaatattttcaccaggaagtgaaatttaaagtgcttgaaaaagatacaaggatatctggaagttccagccggcgccattttatattttaaccatgacaagtagctgtatatcacggaactttggaaaacagagattgttccatttatttttcacagatgaaaaccagagtgctgtgtggggatcaggaagagggaaatcaaccaaataccttattttagagatttttttttttttctgggaaattggaaacagcgcttgtttatagccaatgcagcgtccttgaaactctcctacttacagttctggagctgtagtttcctccctgaagaatgggttaaggcaggcagggtaatatgcatagatgggagtgagagtggatggcctacagggttgttaacctctaagtgcaacaggaatatatgaaggtacttgggctggtggtcctgtgcagaaccagccagtaggttctaagagacttgatagccgagggtccctgggccctgttccacctttttaaaatttctatgacttagtagcggcagtaccatgcccatcccccagtgatgtttggggtacagctgcacccttggccgtgcctctgcactcactcacgagtgtcatctgacatctggctcttgaccaggatctgaggttgcttaagcaggatccaggtcaggttttttgttcatggaaggtggaattttggacctttcccccaaaaagttgacataacttaaagagaagggaggtatattgagaccagcctggccaacatggtgaaaccctgcctctactaaaaatacaaaaatagctggcatggtggtgagtacctgtgtagtcccacctgctcaggaggctgaggcagagaatcagggggcggaggttgcagtgagccaaggtcatgccactgcactccagcctgagtgacagagtgagactctgtctcaacaacaacaacaacaacaacaaagagcagagtggtattatttcctcactggaacattaaatggttcctactaccaaagagttcctgttctaatgggggtttaatataatagtaacattttattcactgggattcactcgggggaaagtattcaggaacaaagtgacaaaattaaatataggacatatgaacattgtcattttggttctagttcttacaagggcttatggtagcaacccaaatagaagtatttgctctaactaacagataaattattagcacttcagttgtttacatatgagtcagagcatctaaaatttgttcccataagtaggttgagcctccttctcagcctgttgtcatagggtctaaaaatggaaacgtgagtccaaactctttccagatcataaaaataattctgaattagtagagcataaatgaatgtgattttattcgagtgtcattttcaagttccccaggccaggttgagaccttttaagtcatccttaattccctgtagggaggattaagaaaatagtagcagctttgcttctggccttagacagttttctaatgaggtcagagcctctcaccctgggagaagcagattcactttgccccttcagcattggtttttgagaattgctgtctgaagctattgcatagacaaggtcactttttaaaagggtacatttctgaacctggagaaggagtgggttctgaatgactggctcttctgattaacagagctgtatatcaagctgtgctgaaaatactcctcagatatattaggccacatttatgcatgagtgagctcactgtcgtgacatgggagtgaacctttgctgattcgagatcctggggtgccttcactttggaacactgattctagatatttaatagcagttttaaaattaggctaaatgtagtctgactgcaggattcattccagtgggaatttttttgtttgttggttagttttttaagcctgaatatgaacccaaacatgtttcccaaaatgtgaaatgaagagtgaaaacctaacaatgggataagaaagataatagataagagattatagttcaaactcggcctgcactcaggaaatggaagcaattcctccccctcatcctgcccccctcctcttcctccacctcctcctcctcccttacctcctcctccactacttcctcctcccccttcatcctccacctccacctcctcttccacctcctcctccccctcctcctccccccctccccctcctcctcctctccctcctcctgccccctcctcctcctcctccacctcctactgcccccctcctcttccacctcctcctcctccacctccccctcctttacctcctccttctctttctgcacaccccacccccgcccccactagggacagtttactcttccccctcctttcttagaatgccaacaactagcctgttagttccattacttacttgccttgtgactcataacgttttcatcttgggtatttttctttcttggtctttgtaaaaattctaagcatcatagagcatatcacctggagaaaagacctacgttcattatttaatgaaggtaaaaagtaaagaattgagtctgcatcctaagaaattagaaaaagatcaactaagtaaacaaaaaaatataaaaactaggagggaggaattaggagatgataagatttaaaagttatgtaaatccaatagctggttatttgaaatgaccaataaagtaaactctcattatcctaactcaggaacagaaagaaatcatcctaacttagaactagataataggaatgagaggccgggcatgatggctcacacctgtaattctagcactttgggaggccaaggcgggcggatcacctgaggtcgggagtttgagactagcctgaccaacatggagaaacccatccatactaaaaaaatacaaatttggccgggcatggtggcttatgcctgtaatctcagctactcaggaggtgaggcaggagaattgcccaaacctgggaggcagaggttgcggtgagccaagagcactccattgcactccagcctgggcaagaaaagcgacacttcgtctcaacatcaacaacaacaaaaaagaaagaaatagataataggaatgagaaaggagacacaggagatatcaatagactttataagaaaacattacatgcagccctgtggcaacacatttgaaaatatagggctgacttcttaggaaaatacaaattaccaaagttgatccaagaagcatggaaaagttgaatagaccaattactatagaagagataggaaagatgattaaaagttaccattgagaaaggcaccaggaatccatggatttccagctgaggttttgtttgtttgtttgtttttggagatggagtttcgctcttgttgcccaggctggagtgcaacggtgcgatctcggctcactgcaacctccgcctcccaggttcaggtgcttctcctgcctcagcctcccaagtagctgggattacaggcatgtgccatcatgcccggctaattttgtatttttagtagagacggggtttctccatgttggtcacactggcttgaaaaaatagaaaatttgagtgttatttttactcttccaggacatactaaaacatggaaaggttcccagttcattttataaaaccatcaaaattttaatttaaaaatctgatgaattaaaaaaataaaaataaagatcaatattatttatgaaagtaaatgtagaaatttaaaataatttattaacaaatagactcttgggtgcatcaaaacacgaatgcactataatcaatagttattttccagtaacaccagggtgattaactgttagaaactcatcactatcatcagttgttacacaatcatattgaaggagaggaatatatgaataagtcagtagaggctagaaacctatctgaaaaagtttagtagccattcctaatatagtacaatctgagaaagcgaactaggaataaaaataaattacttaaacataaaggccatatatgtgtacacaaacacacacacaccacagcaaatatttcctaaaagacaaaacactaaagccattcaattaaaattaggaatgagagaagaatcttacattttacaattagtatttaatattatcttagaggttcttgtgagtggagtaagacaatgaaatggtcatatgtctagaaatcgcaagagcatctagtaaaaaatctaaaatcaacagaaacaattgtcaaggaagctggataaaagataggtctctagaaattatcttttctgtgttttgaagataagcacctagaaatggaagttaagtatttctttcacaatagcagcagataacctaggaagacattgaactaatacctgtaaccttcttagtgaagaatgtgaaatataatctagagaaattaaaacatgtaatgcctgaatgtatcttattacaaaattaataagtaaatttcttgtgattccggttagaatttccaaagtggtgggttttctctttaattgaataaaataatcctgaagtctttatagaagaataaatacgtactacctgagaggagccaagacaaatatggaaaagaaaaccggtgagggcagatttggcttacaagtaatgacaacatgctaagaataagaagtcttcgtgatcaaagcaatgtggtattgatccagaattacataaatagttcagtggaacagactagagaatctaggactgtgtctcattaagagagtgaatgtataacaagatgatagttcagtactgttgaggttggtactggcataaccagttctttatctggagagggggttgggggaacagcacagacctctatctaatatcataatcagtaataagtcccggaatcttcaaacacttaaatgtaaacaagcaattcaacttttacaagaaaatataagaacctattttgtataatcttggagtgagggagaatggttaagcaaaatttgatacgcacaagctataaaaagagacacactttgaacatatattttatttttatttgtttattttttgagacggtctcactctgtcaggctggagtgcagtggcgcgatcagggctcactgcagccttgacctcccagactcaggtgattctcccacctcagcctcccatgtagctgagactacaggcaagactcactgtattagttctcatactgctaataaagacatacctgagacggggcaatttagaaaggaaagaggtttcacagtttcacatggctggggaggactcacgatcacgggtgaaggtgaatgaggagcaaagtcccatcttacatggtggcaggcaacagagtgtatgcaggggaactcccctttataaccatcagatcacatgagatgtaattcactatcatgagaacggcatgggaaaaacctgcatctgtgattcagttacctcccaccgggtccctcccgtgacacgtggggattattacagttcaaggtgagatttgcatggggacacagagctaaaccatatcagctaccatgcctagccaattttttgtggagacgaggtttcaccatattgctcaggctggtctagaactcctgttctcaagtgatctgcccacctcagcctcccaaagtgctgggattaacaggcatgatccaccatacctagcctgaatatatatttttaaacttttctgtggcaaaagatacgtgattaagtcatagatcaagaagggatatttgaaacagacatggggttactatctataacaaaaaacttacaaattgttaagaaaaccacagaggaaaaatggacaaagaatgttaatatagaatacacagataacaaatgcagacagctagctggcaaacctatgaaaaatagttcatttttgctagggaaatgcagattaaacaatgagacgttactttaaacccatcagattggtaaaaatagagaaaaataacactttttgatagcaaggctgtaatagaagtggcaagtggtattatttctcataatactgatggaaatgtgaattatgggcagttgggaaattgaaaagcagatgggcaatgtatattaaaataaaaaactatcatacctttcttctaagcaacctttgtcctcggttatttgtcttttagaaataaaaaatgtgtgcaaagtcatatgtataaggatatttattgtaccattatagtggcaaaatactgaaaatatgaaaacccatcagttgaaaaacggccaatttatggactgtttgtaccatgtaatattatgagagaactagagctgtatgagagttggctgtggaggaatttctatgagaacttgatgaatgagaagcaatgtgtagaaaaatgtataatatccagttctaaaagacgcattcctcctgtgcccatatgtgtaaatgtgtgagtgtggagaacaagatgaaaatgctcattctgtatgttaagcagggagtggggtggaggttaatgtggaatggtgggagagtggggtggcagggatttccaagtcactcaccagtgatgagtgttaaccacatccccatttttttcctatgaaggaagctgcaatgctgtggtttgaggttaaacatgctggctccttctcttaggtcttgatttggtttttgttgttgttgttttttttttaattctagtctgttcttgttttgctgtgctgatatcctcttagattttacgagcatattaattgtgagtatttaacattcttctttggtttattctgagaccccgtttgcctgccctttggcatcattggcagtttttggtggtctactggtcttcctgtttgtgcctctcgtttgcccctttttcactggaatgtgccaggttgaagcaatatgtagggcccggtgggatgggccaggaggtggcctttcagatgtggctcctgcatggccctgcttgctctcttgagctgcctgcacttcagtcttaggaccacattcctgctttggcctacatgaagtgcaaggtagcagtgggaaaagcagagaggaaatgaagcttcctgataaatcacctgatcgctgccccagggttagtcactctagcccccttggatctcttgactccatctcttgatttgtttcttttgaatttctggcatctggagaatacttgtacagcagcagtcccctggttttgtttttctttcaacccaagcccatcccatatctgttcatgtgatgatactgtgtcttattttcccaagattcttatgactgtgatatttagtctgaatcagagaaagagagagatagaaatgtacactcagagggccacttggatggaaacttctgttgatctctccaagccttagtgggatcatctgtagagcagggataataacagcgcctatctgttactgttagggttactgcaaagattaaaataggtggtgctcttaaaagacttagaacagtgctgtcatatagtaaggattccataaacattagctgctcggtttgtgtgtgtgtgtgtgtgtgtgtgtgtgtgtgtgtgttttgttgttgttgttgttttaaacgggatcatgctggaaatgatagattgcaacagagctttggggttttttctctaattaatagatctaggatgttttctgaggtgtgtcatgtttttaaaactctgtggtatttctgtttctttctttctttcatttttttttttttttttgttgttgttgttgagacagagtctcactgtgtcacccaggctggagtgcagcgatgccatctcagctcactgcaacctctgcctcccaggttcaagtgattctccttcctcagcctcccgagtagctgggactataggcatgcaccaccatgcctggctaatttttgtatttttagtagagacagggtttcaccatgttggccaggctggtcttgaactcctgacctcaagtgatccgtctgccttggcttcccaaagtgctaggattacaggcgtgagccaccatacccagcctggtgtttcgtgatatatctatgtgtgagggtttctgtagttaagttcccatagttgaattcctggttcaaaggacaagaacatttacaatgttcatagacgttgggaaattgccttctgtagtactgcactagtttccactggctgtagtggttgatgagagtaccagtttttccctagttcaatattaacccattttatcagtcttttcatcttcgacattatggaaggtaaaaacatctcattttatgtcttcagtcagtgatgccaagtatctcttcgtgtatttatatttccatttttatccagtgccaactcacatccttctgtcaatttttcctttgacctattaatttttcattgataagaattctttgtaaaatgggcagtttaactccccatctgtcatatgttttttctcatttgatttattgtatatcttgtatagcaccttttaattttaacattgtgtttttaagtgtcttttctttgttgacttggaaagctaacaactacttacagcataatttccttctgttaaaaacaagaaggaatttccccactctaattgtgaaaattatacatttttctaagtctgaaaaaaaatagaggaaaaaacagaaaaaacaacagaaagaacatcagtcactcttaatattttggcattttccttttagttgttttttaggagagaatgtatatttatacttcgcatcataacatagatatagtctattttggtgatttattccaatatgtaatatatgtttctgaatgtacaatatcctatttatcatatctgttaagtttgtttccagtttttcatttaagagagaaaggtactgggaatatctttgtgcaaaacaagaatttttttttttttttagtcagattctgttcctatgatacctccctggaaatgggattcctaaattaaagaatattaggatttaaatacttttggtatagattaccaatttgctttcctaacgtgtggtactagtttatgttgcaatcagcacaaagactcactgtgccatttatcatcagcagagaagagagcagccctgaagatttgggggaggagtgttcgtagagaggcacgtgaaagtgagtttgagaggtttgagaagtagccaggtcagtggggctggggaagggagagagttcatgggggagggctggagatgaaggtaaaggagccatggttctttagggctgtgtgggtgctggggaatttgcatttcctgcttaaggttgtagtaagtcagcctggagagttgcaagaaaggagtggcttggtgtgatttattgtagcaagtgagagtgacccagaggccagttaggaggctgttgcagaggcctgagtgagagaggatggtttaaacaccaaaatggtaacattcagaatggagaggaggagatggtgggagattaaatttggggatggagcccttaggatctgttgattgactggatgtgtaagagagaaagggaagagcagaactgaggaaatgtcctcttgaactggctgggggccactgagatgggacagatgcgctggggagcagtgcagaggtggaatcactgctccttttaggtctaaggcatcccttagatctccaagtggatgtgtgaagatggtggtagaggagaatggagctcaaaagaggggccagagtcatttccatttagatggtctttacagcctaaggaactggcagatttcactaaggttgaggtctttctttcctgtgaaaatgtgatcaggatcctaagtaacagccctaaaaattaaacattaggaatacaaggtttcataaattaggaactgtctgtagctgccagattctaaatgttttgaggatacaaatcttggggtcttttcaaatgctttgagcagaagaggtacatcgtattgtgtttactgaatggcatttaaagatgcaggagacctttcccccttcttgatgaaacaatttgcctttcagatgttttgttatagtgagttgattgtaggaccttatgaagcatgtaaaccacacatttgtaaggcattggaagaaaaagctaacgcgagttaggagggatttaagaccatgtgaggaaattcaagcctatgttgttatcaccaaaccttgcctgtgttatgtaaagatttttgcctgtgtcatgttatcttcgttgtgttcaatttattcctccccctccaagtgtcctagtttctcctctactgtagctggttttgaacaaaatagagaaacttgggtctcctctaccctcagcatctgaattcttctcatttggttactcactgtgttaaaataagtgatatagtacattcttagcagtttgtttatttttaattttattttttatggggctagggtctcgctctgtcacccacgagtgtggtgccatggtgtgattgcagctcactgcagcattataactcttgggctcaagtgatcctcctgtcttagccccacgagtagctggtattacaggtccatgccaccatacccagctaatcttagcaatttttaaataacttttttttccgactgtaacagatttagatattggaaaagataaaacataaagcattgatctacctgtagagccaaatagccacagggatataaattggttaccatttaattttatttccatctatatttggctatatttatatttatgtatatggaaatagtttatgaatttggaatcatactatgatattttttagaatgatgctttttaaactattttatggtaagcattttagtaaagctcgtaatgttatttttaaaaacgtacttttcgaaggctgcagagtatggataaattcatgatgactttttagaggaaaatatcaagatgatctcactaacaaatcctgagattaaaaacaaaagcaaacaaaatacaaaaactgaaccatctttggaatactatgaaattcagattttatgttcttaataaaatcctgttttgaatgaaatcagtcttcatgcttttcttattccttttggctatgttgcctacagttgaattaactgtttttatatacttcctttgctttgcattgaaacaagctgatccattgtgaccctttgtggtatttcataaaaccacaccctaaaaactgcccagtcttttaagtgtagtcaacagtattgagcaattttttgggtaatattgtcggaagtgttaggtgccaaccaacaatggcttattgcttacatttaagtgtaagcaatatacaattaaaggaatgtcatgactttttaacttcattttgaaatttgagtttagaaaaaattccaagggaaatgagcaagaatgaaagcatcctctcctactgccagacttctgggagacccacccctggtcttcccaggtgtctcttcagtgaccttgttggtcgttgagggctgtggaaagttctagggaggctgctcgtccctcctctccttttgcttattgcattctgcccagattataaaactgaagtatctgtcttaagacgccagcagctttttcttcatcaaatccagacacatcgaatcccccacaaccaagaattacccagccacaaaatgtcagtagtgccccggtaaaagaaagctggttttagacttagtctcagaacctggccatcttccatggattatcccgatatgtgcatccttgtctcttttcactatagcctggtgatcatggtggcagttttcattttgggacactggtgaggttagaatagcttcaggcttccctcagtgaatagtattgtgaaggcagtggtggtaacattgtgttggagctggtgtgagggttgaatccactctgtagcctctgtccctagatcatggcgctgctttgattgggccctaattttctcctctagacaaaaggaattgaactaagacttccagcattccctccaggcttaacattttttcatttggtgctgatggtcactgactattttccagttacattttaatgcaagtttggcagaagccgatttctctgggttagggaaaatgacataggtggcagggaggtggatgtacaccatttgtttgatcagtttgcctagaatggaggtggcagaattggagttggaaagatcaaatgtagcctttttttcccttccagaatgaggcttttctatgcatttttttgaggcatgagaacctcatgggacaaggcaaaagtgagcatactcaagtgaagtgtatggttatgggggaatggttattagaaatgtcaattgtctcaattttttagtattaattttcagagggaaacagtggtgtaattagtgttgtgattgtttgccagggcggtcgtaacaaagtagcacagactgggtggctcaactaccacaaatttgttttctcagggctctggatgtccggagcctgcgatgaagcaggattggcttcttctgcggcctctcttcttgacttgcagatgctcctctgggtcttcccaggtcatttgtgtacctgtgtccgtgtcctaatctcctgttcgtataagggcacagtcatattggattgggacccacctactaacctcattttaacttaattacctctttaaataccctctctctaaatacagtcaccatctgaagtattaaagacttcaacttaggaattttgggcaaatacaattaagcccatcacaatcaggtaacatttggtaggacgtgtagatgctttttatctttaagggaataggcaaatcgttaaaaataaataaataaaaacttgttcaacttgtttaggtacattttcttatagtgtattgtggttcttatttttttaaccttccagctagtgtgtaaattggaaacattgtagcttaatttgatagttttagacataatcaaagatgatggaaatcttgttcttaaatttagtctattcagcaacttgtgtatcctcaactgctgaagactgaaaacttgagatgttcctcttgttttaagaatttgactgaaaacgggctgggcacgatggctcatgcctgtaatcccagcactttgggaggccgagatgggtggatcacttgaggccaggagttccagaccagccttggcaacatggcaaaaccccaaaaatacaaaaattagtggagcgtggtggctcacacctgtggtcccagctattcaggaggctgaggcacaagaattgcttaaaccccagaggcagagactgtagtgagatcgtgccactgcactccagcctgggtgacagagtgagaccctatctcaaaaaaaaaaagactgagaatggttggcactgtccccctgtctccaggagggtgaatgtttctagctgaaccctggtgcccacttgctcctctaagccttcagcagtcctcccagcctcaaggggtgatccgttcatcttccccccacctctggaaatcccagcgtttgaacgctggggggaactgcaagtctagtttacagggtttctcagctgagatgccaggaacacttcgcgagtgagcatgccaccacatttgagtgcatatagaaagttagctgtttgctacaactggggacacttcctattagagccgcatctgctggggtggagggctgcatgggttggagagtagggtgtgacttcttccagcaagaggaaagagaagtagcatagtgcccatcgcaggcagagagcacatgtttgacttgctcttggaatttctgtagagtaagggtggtcaggttgccagactacccctcaaacgaggacatggtgctgctgggtcccagggtagagctctgctggcaccttcaaggccctgatttacacctaagggcacacaactgggatctgaaaactgggatgcacagtacagactgcagatttacagggcggggctgtctctcatctgactattgattcttttgggggctgtagtttgtatcatagttatttttgttcctgtttttttcccctcttcaagacaataagcttttggagggccaggaagttgtgttcccatctgccgagtgtggggcctcgagggccagaacctcagaatgtagaagctgagttagtttgtggcagggtgaagggctgacctctactgttggaaatgccaaaatctctgatctggctttaaataagcaaaacagccccgccagacatagagtcatccacaaaacctcatgacctctgttattgcccatcctgtgtggaagcccactgagaacttcacttgaagatgctgcaggaacaactgcagggaacctggagataaggccccgggtgatgatgtaagctaattgctgagctgggtggagctacttaaccttatggtaggaggtggagcttgacgcaacccccttttccaccaacaagcatttctttctacctgtcattgaagtgaatcatcagtataagtagcgagctgggcgcattccttctcagttgtgttaaaacttgctggtattcccccggtatcagcagaggtgtgtacgggcactgctttaaaactgggaaggaggaagacgaggccagggagccggagggtcaccaaggtagatttccagcagcgctagtccagctgaacactttccagccttgtttttcagcagctttgaggaaaagtataggtaagaacaaagacaccactgtatgtttgctatatgaatgcataacatctgttcttggtgtgagtttgatgttggtttaatactgtttttatgtcagcggcatagttctagcatgtaccaagattttcaattttaaatgctttttggtgttcacagttagctataattggtcaattttaccctccttatgcataaaaagaatgataggcaaagaatgagccttgaaaagaattgggatcagaattctggtcccctgttctttgcttcttaactttcttgactgtttagaaaaatgtacagcttttcttccaaaaaccaaagcaataatacttttatttttgaaaataatggaaaacagagaccgctgaagttctatgaatgaggttttctgttttagaaatcacaggttgaggaggaaagaattgtgttttccttcctgttctgtttcgagtctcagtatttctgacttagaaacctcctggagaagagggagataccagctctcctttgtttcaagtaaaataccatcttaggtcataaaatagtttgcttggagaataattcatggcttatatctgaatttttggttggtagcaacagaaatctttctcttcctcggtatgagtaatttggcttacatgatttagactaaattttattatattttttgtttgagaaaacaaaagtcaaagcccagaacatattcaactgagtttttccctcaggttttctatcattttcccacccttcctactcatacatgtgaatatgctgaatgattaacatgtgatttttgtttctttactgtctcatttcatggtgattcataaactgttagttaactggttatagtgtatccatatgttggcaaagcttgaaataaatttgagtgcaggccacaccttcgtattaatgagccgggttactttcagtaaagtatttctgatgtcattaagtgttaagatggccggaattctaaagacaataaaaatgtatcaacaatatgaaatatcaaagcctacagtcaaatctgagttattctttagtacttatttcatagctattctttaatgtttattctttaatacttatttcacattgaaaagtactttacacatgtttgaatgagatattgccagtgaaagaaacaaaaggaagcaaataactctataagggaagtgggattttaaagtatgtttgtgctggccccaggctggtgagtgagtttcattagcaatgaccaggaagagaaagaatgccacagtggtgggtgctgaccttttttttttttttttaaaccttttttaatgtctgtaaggaatacaaggtgaactttaattcttgtgggaatctagtaagatggaagtcaagaagagaggaagaaatgctttttatttagttaagaggaagtaaacatctgtattagttacagatgttatgccttaacctttttcattcctattgtttttatgaaaatttgcctttttaagttaaatgaaggttttctggagtcctgtattgcaactaaatgttgatttaaaacgacacatttgggacattttcttggcactgtggaatataatgaaaagatataaaatgaaggcaggtatgaaattatatgaattctgctacttgagtgtagaagttttattccaaagtggtttgtttggtggatgtggtgatggtggggggctctatgtacttattaaggcaagtgatgggacaggagcttttgtggtcttgacggttctgttgggatgggagggttgtttgggatttttatgtttcattccaggcaatgtttattttttcagcctgtacttcttagggttttaccaagtcagttttcatgtgaagccattttcatatcgtttctttcaccttgatggaaatcttttccttcttatgtgctttgagttaaatatgatgtagtgtgctagtaacatagacggggctttcctttctacaggtgggcttgaagtgagcctgccactcgctcaccttgaatcacggaggtttcagaggccgttggccttcagggcaatggcagaagcacatgttctctgctgttttctgagtctatcttgactgcgttcccagtggcccagaattccccaagggtcactcgacacaccctcgtctacagtaaatatttgtgcttcctctgtgcctggccaggttttctcagtacccaggagcacaggtgggcagtgggatgtgggcaggcggtacccagattccctcccacaggggccacagggaggacttgggcgcttcctgccaagagccccctgcccttcagactaagtggaaatagagatccgggagtccagtggactcagtggagttccgtagaatacatggaaaacgcaccgctttcagtgatgtaagctgtcttgttcacttcacgattactcatctggcctgcagcaggcaagaggatcacatgcaattataaacagcctcctctgactaaggtcagtgactggaaaccctgtcacgttatcagaggtcatttggtcatagattcttgggcagaagccattgagagtcctgggggtgtgatctttgagcctttgccagtgctggggtttgactccttttagctcaattaactgggtccaggagtttattttggccgagatctgccatgctgagttgacaggcttgacactggaaggaagtctctaacttcattagaggaaatggcgtggcaggctttaaggcattttgatatactccactttttctctcttgccctgttttgttgaggttttcagggccataactgtacctgaggttaatcagtgagtgatctatctgaaaggaatttgttctctttgggcaccgtcctgtgtggtattatatttgtataactatttagcttaactcattcaaaaggctatttaagtcacttgtcctgttcattacttgaaaacaagttgtcttctctttattcttttagtcagttaccaaatatttcctaagtgtctcttgtgctagacattgaggggcactccttctccctttcacttgtctgtttttgttgagctacattttttccttaagtcagattgttcttttcctgttacttttgttttcacttgatttgtttatttatatttaaatatgtactttaacagtcttgaagcattggtctgaatgaggatggtgatcagattgggaaaatgccccttaattttggtttaaaaaaatttattttctttaaattatttgtttattgataggggccacccactccaggtgagtggtttctctgtgtgtatggcagaggaatgctctgtgtctggaaaaaaaagtcacttagcttgaaatattatgaaagctgaagagtacaaatgtcagagagaaaggggtattgggggggaagagaatgagaagacaagacacagtcagggccctgtcacccgtgtggaactgcaggtccctggagagatgatgcatttatccctttttagagatattgccattaaaagttgatcttgagcatgacacagaactgaaagctttgatgacaaagccagcatctcagtttagcaataaccaggttagggaaaaaaccccagaaactcaacagtgagattcagctcagcaatgtgggcggggaacccactgtcccgccttgggcagggagcagccccagccgcttcatctgcctgatgctgggttttatccgcttcacaattaaatttcctttttgttatgcttgcgcacatctatatttggctttgcttcttattttttaagaaaggggagaagtgtgggcaaggtaaaatacagcttgcaagctcccaaatggcaaatgcaccagttagagtctaagtggcctcccaaccttaaggtgaaattcatttattcagcaaatatgtaccaagcccatcagggaccactgctcgagataccagtgcaaatagaagaggccaagggcacattattaggtccggagccagtggcctgcacagccatctgtgaccacctacctctctgcttgcagggaacttcagcctggtggaggagacccataatagccaagtcaactgataatagaattagtagtagtgttgagggacataaagaaatcagggtaaggccatcacaattacatgggtggatgatcttttataaaacagcacagttttgttttcttctgccatggtatctcctaacattttccagtgtgtctacttgcagttaatatggaagttgcggctgacactaggttagtggttaaaagaaaacaagaaaaccaacctttagaaatctttagaaacatcattatcatagaaagctataaactcttatgtatagaagggtaagtggccattgatcttggagcagaatgaatggatatttcctggaaaaaaatatttccactcatcaaagatactcaagtctcttctcatctaatcaatattggaaactaggaatatccacgcctatggaatatcctcagagagaattaattattctgccctctaagaggtatagtagtttagacttagaagtaaaggcctgaacttgaggctgcaccattgaaggcaaaagtgccctttatctcccagctttgtcatttgccaaatgcaattgtgttaaattaagtgacctccaatagcagagctctatgttttctcccctgacccccaagtcaaaattgattatagtaatccatcaaaccaggcctggcaaatgatgttttgcaactaaaggataaatactgagggggagggacgaatgtgaacgcatatgcagagcaacacagtcatgagaccattctattacttcctaaatttcttaaagcttttctgtcttttctgagcttctcaagtgagcaggggcatgagttcctgtgttgtgcctggggacagggaaggctttgggacctactgtggtcttaagtctgagcagtgctaatagcctcggctcaccaagtgctgggcactgtgctagagggtgtacaaacctctcatctcatgaggcctcactgctacagctgacagagatgacatccagttgtttttagttgcacatggcagagctagaaaacaaaccagggtgtgtcagactccagagcgcatgccctctgtgatgccgctgtgttaccctagatcaaatcaaccaagccatccgttaaaaaaaaaaacctgatctttgtcaaatatgcaattgttatatttttgttagagtctgcctctccagtgaacgatattaatttccttcaagtggctactcacagatatcacaaaatcagaaagctgcctaccctgcagcctgtatctgcctccacgtccccacatcagtcctccttgctgtgcttcttgtctctttagtttttatcatcttctaacactgtgaactttagtaatttattctggattgtttgctacctgtctccccttggtaaaatgtaggctccgcagaggtagagcgttttgtctgttttcttcactggcatatctcaggtgcctaaaacaaccatgccagacatgtagtggtgccagtgacaacttgttgaatgaagaaatgggagaaaaaagcagaccccggagacttaggagggtctgtgtgagggagtctccaggcagtcttcctgggggtgtcctgaaggacctcctgatcgtgattttggtcagtgtggaggctgtggtttcttctgagctgtcagtatttggaggtgagttgtctgcaggtcacctcatcccacctttacacattagtaaaatggaattcgctgggtgattcttaggactgtgcggtcagtcgaattaccagacgtccctgcatgctctgtctaagggctggagtctgctttccttgcttctcttctagaaagaggtctgtccacaagggattagcctcgcgaagttcctactgttgttcattgacccagtgagtgttttacccactgtgggtttttcctacctaattgcccctctggttttcagtgttcaacatgctgcagttacgtgttctgctgtggttttacttagcttaatcctttattaattgcctcttgttcaaactccctaagagcagattatccttctctttcagcttctgctccattgctgttgaacttttttttggtcgtgacatcagaaaaataaccaagtgtgagtctgataatagcaagtaaggctattttatttctatccaatttaccccaaatttgagcagtattacaccttaaaataatagagctggctcttgcccagcatgtgaaaagtgtatgcttcacgatggacagatattttccagtatctacttaccataaatctcaagatttaccctaccccactccagccattacccccatgtcccatttgcctaacctaccctagggccatctcagtgccctgtaaagcaacctttgttgcagacccactgtgtgactggaatgtgatgcacacaagtgaccaaggcatggccctgttcgcaaggagcttccagaccaatagcagaaatggacacataagtaaacaactgcgctactgataggcttctgccaacaggagtggagcttgagggccaggaagccttcccagaggcactggagcttgttttaacgttacgtgcatgccaggtggggggcaggacatttctagcagaggagaaagcatgctgtgctctgagaactaaaagtcatagtcactccacttggtgacatgtataaggcacatggaatagggccagagctgggcagaccgtgtatgccacaatagttcgttgtaggttacaaagaaccagtgcagagtgggtgaggcataggctatttgattaataatttggctgcattgacaagatacggaaaaggcgaggttgggactttccgtgaattttctcctcaaggtgcttaatcagtgaggttgggatggccggagggggccctcatttgcttgcctggtgctcaagcctgaggtcctggcctttaatagtcagggaggtctgtgtggaggcagggtgtgagccccctccaaggaaagctgcagtgtgaaaagaggcccaggatgagcgttggggagtatccacatacaacttgatattcctaaagtctcagttctttatgggaaagcccatgcactcttccacacttggaattctttgcaaagtgagtggtatttgagcttctttagagtcttgctactcccaccagctgtactggcatcaccagggagcttgttagaaatgcagattctcgaggcgcggctcacaactacccaatcagactacattttaaccagatcccaggcaatccctgtgcacgtgaagtgctagaacactgctctgcggtaaaacgactttgctaaccatggaagagggtgatttttttcccttttcctttggtgttttttataggacctatttaccttttagaactttttcagaattatggactgcagaatatatacagtgtcaatgtcattagcaattcattagtgatatttggctagaatacatagttgtttccacacaaatgccatttcttacattgagatggcacatgtctggttaggacttgggctcatttgtaaggagccacgctgcaggtaggcatgctcccgggacattagttgctcaggtttcaaactgctgccccagcatagcagatggcacggtaacaaagtccctgtgcactctcacattgcctgcggtgatctatcacacattttgtcccctaataacctagctgggggggagctcatgtctctgtttgtgctaatgctcgctgtatccccaagtggcagtacttaatataattgtcattgctctttaatattatctcattccacgtcagctgcacaaaaatttgaggttaatcacaatgaatgttttctcaatccttgttattgagagctgtttaatagtttattttgtatgtgaagattcatatctagattgaggcttatacaacttcatttaaagacagctttttcggctgggcgcggtggctcatgcctgtaagcccaacactttgggaggccgaggcgggcggatcgtgaggtcaggagatcaagactatcctggccaatatggtgaaaccccgtctctactaaaaatacaaaaattagctgggcgtggtggcgggcacctgtagtcccagctactcggaggctgaggcaagagaatcccttgaacccaggaggcggaggttgcagtgagccgagatcgtgccactgcattccagcctgggcgacagagtgagactctgtctcaaaaaaacaaaacaaacaaacaaaaaaggaaagctttttcaggttggaaaaatatcaacagcagacatgaaaaagcatgaaaaatgacgctaagaatgtaagcaactggaaacaaaaattataatggtgcatagtgagctgaagatctatatttaaatgtgaactcccctttcagtttataagtgattactaacagcctcatcaggtttctggaattaaatgttttattatttcctcccaaagttagtcctcaaacattagtatttcttgtgttcttttgatttgaatatttgtttttaacacacaaggatatcaactctataagtcagttaatatgttcatgcttttagttaatcgaaagtggcttatgatttcagtttttggtatcaggtgatgttgcggaagtgaggttcactgtgaagcttcttctttttttttttttaatcattttgttgtttctttgagtgtatgtgagcttataactcaagacactatgtgaaatgaccctgtgtttcctacattatagaaaagaggaaaatgaagcaagttcaagaaaattagatttatgtggaaaataaattctgcatctagttattcattatcaggtatgagattacaggcatgagccactgtgcctggtgacctcatttgaactcgattacctctgtgaagaccctgtttccgaagaaggtcaacattctgaggtgccattgtcaggtatgaggtaaacacactgagaataccacattttggcaactcagacaagactattttccaaacatgtaaccctgggaagaaggtaacctatcatagtgtgtgttaagaagtcaagcaaccaagaaatgttaattgaaggcccgttttgtacaaggttgcatggaaaagacacactagcgtaagacatggacagtggccctgagtgacgtgcagccggtttaggcgaattaagatttacatacttgaaaagggacaaacaagtctggacgtggtgactcatacctgtaattccaacactgtgggaggtggaggcaggaggatcccttgaggccaggagtttgcaaccagcctgggcaacatgggaaaacccctgtctctacaaaaattaaaaaaaaattagccatgtgtggcagcatgcccatagtcccagctactcacaggggctgaggtgggagaattgcttgagcccaggagatccaggctgcagagattgtgccactgcagcctgggtggcagagcgagaccctatctcaaaaaaaaaaaaaaaaaaaaaaagaacagaaaaggaacaaacaacagacacaagattccatggaaaagggagtggtctaagtattcagactgtaggaattcagagagtggagaggctggttattatgggggtgcttcatcctggggagttgagggaaaggaggtgctggctgcctggagcctggaagaatcaaagatttccaaggccatggggggaaagcatgaaggatgagtgaatagacaccagggctgagcaccctgaaaactgtgaagatactagattgacctgtttggaaaaccaaacagatgtggctgttattgacaagtggttttgtttttgttttgagacagagtctcacttggtcgcccaggctggagtgctgtggcttgatcttggctccctgcaacctccgcctccaaggttcaagcagttctcctaccccagcctcccaagtagctgggattacaggcatgagccaccatgcccggctaattttttgtatttttagtagagatggggcttcaccatgttggccaggctggtctcgaactcctgagctcagatgatccacttgccttggcctcccaaggtgctgggatcacaggcatgagccactgtgcctggccaacaagtggtttaaattggattctccatttcccacctaatagaaagtcggaagcatagggcaaaagtaaaggaaggaccctgtgttctgctggttaaatataacagaggtctgactccatggctattataggagaggtgcattttgttctatgtaaattatcttgatgtgtcccctgtgcctttaccccatgattatttagcacttttttctccacggtcacagggacagggagaaacatacacccataaaacagtgtcatctagaggcaaaaacttgtaatgctcaagcatgtgctctgacgaggtggggcagggtgtgtaggaacaacactctactaattattacagagcttgctctgcactctctgtagaagtccttcaatatccagtctaacacacacagtaacttaagagaggattttaaaaaatcaaaatgccctcagatttgtattggatttaaccaggctgagatccctgagatccaaatataataatgtgtcctttttggatgaatcagacacaagcaaaaatctccagtgtgtgtccagctttagaggtgtagtaatggattccacagttcacgctggtgggccagccaagacttttaatgctgatgtgggcttcattctttctataaactccctttcttcttgatagtgcatgggcccaggggttccaaacatgggtacctgccgtaattgatctgtgtaaccggagaaaatacatatcctatggcacccttgtgtcgggatatagggggcatcaccgtaatgtggctctttttctgttgattatagttttttctttctgtgatcacacaattgttttatcctcgcttaaaaaatttcaagaagtgcagcactcagaataacagaaaagtcaggtgtctggtggtttgtttgcacatttaatagacttgaagataaactctctaaacatttattttgcaagttgtttttctgagagttgaggggaaacttttgccctttggtctccctgaggaattctaggatttcacaggtaggcgtgtgttttggactgcaggctgaacgtggttggcagggtggcatgaggagggcacatattttaagcgttcttagggcagatccacgatcctttacctgccatttctaagtccaaaaagccctgaaaaccaaagacatctttacaggtttgtaggaaattgatttgagagcaaaacctgatgtgaacagatttgagagtattctaggcatcttgtataacacttcattcaatgctttgtgcctcttgctgcacagatattaacattcacttatgggccctgccccatcccctactggggatgctatgcaataatcagaataatcaaactaataataataataataattggaataatcactgagtcattgtattagtccgttttcacgctgctggtaaagacatacccaagactgggtcatttataaagaaaaagaggtttaatgtactcagttccacatggccggggaggcctcacaatcatggtagaaggcaaaaggcacatcttacatggcggcagacaagagagaaatgaaagccaagggaaaggggaaaccctgtataaaatcatcagatctcttgagacttattcactatcacaagaatggggaaaactgtccccatgattcaattatctcccactgggtccctcccacaacatgtgggaattataggagctacaatttaagatgacgttgggtgggaacacagccaaaccatatcagttatctttctaaagtgagacaaaaagtcagaattctgtaacacattttttcccaagcgtttccaaaaaaggttggctttaatggagtattagtttgctaggcctgccatggcaaagcactatgaactaggtggctaacaacagaaatttattttctatcagtgttggagtccagaagtctgaaattaagagtcagcaggattctgctgtctctgagccctatgggaatatcctttctggctcttctagtttgtgatgtttgccagcagcgttctctgttccttggcctgtaaatgacaatcttctcgttgtatcttcacatcgtctttcctctgtgcctgtgcctgtttgtttctgtgtctacctttcccctgttcataagaacaccagtcatattggatcagggctcaacctaatgacctcatttctttccttttctttctttctttctttctttctttctttctttctttctttctttctttctttcttttcttttcttttcttttccttctttttttctttctttctctctctctttctttcttctttttctctctctttctttctttccttccttccccccttcctgcctccctccctcccttccttccttctttcttttaaaaatatttttcttttttttcccttccttcctccctcccttccccccttctccttccccttcctccctttcccccttcctccctccttctctccctccctccctccttccctccctcagggtcttgttctgtcatctaggctggagtacagtggcatgatcatggctcactgcagcctcagcctccctggcctaagcaatcctctcacctcagcctcttgagtagctgggaccatgggtgtttgccaccatgcctggctaagtttaaaaaaaaaaatcgtagagatagggtctcactatgttgcccaggctggctttgaactcctgagctcaagggatcctcctatctcagcctcccaaaggggcgagattacaggcatgagccactgtgcctggtgacctcatttgaacttgattacctctgtgaaaaccctgtttccagagaaggtcacattctgaaatactgggggaacatagttccccatcttataagatagagaatggatcaagacgagcagctccattctttgtttgtgtttaggccagtgccaagttcaagatcttgcctcagggctttcctggtacccctgggaatgtgtatcagcagcagctgtgtcactgaatgggtgtcacctggggggctgcctgttcagacattagaagctgccacatcccctgttaactccatgtgagggaggaatcccttccctccgacaatttcgcctgtgagaatcaagtcagattttgcagtgagaactgagctgagtgtagaataagttcccgaggtacttctggcaccgttgttactcccccaccgagaagcccagaatgttcccaggtgtgttcaaagattgtacgggaagggcttaggacggtgcttggctcatataaacactcagtggcaaagaggttgatgcttaagtacacaggaagtgtttaccagtacacataattgtataccagtgagctccaccattcaatttactgtctgtccggtacattgaccctgtgaggcccactctcggtgtggcactgctaacaggttttattgttgcttactcacttgaaaagtgtctcccttggctagacctttgtcctgagcactggacacacataggtgctcagcagcgtccctctctgcaatgcaaaagggataccgtgtgcctctgcatgtcagctctagtcctggcatcccaggagcatacggtgacagtggaagtgaagtgcaagccgagtcctgggaaccaatgtctgccagaattaattaaaagtaagcatctttttttccctggttagttaatccaggatgaattccctgagtagttcctgccgttagaacttgctctcttttttagttagacacagctcggtgttgcctccactttgacatcacgttcatagttcctgtgcttggccagaactgttttcagttgcaaggacatgggtgagactggtcaaggaattgactttcagggttccaagggaataattagttcagaagtctgtccccatacttgttttccagtacaatctgtgtctctgtgggtgttttcttttaaggctgtgtgctttataaactggagatagaaggagccagtttattataaaaaggataaaatataattaaacaattaaaagtatgtctttatagccgggtgtggtggctcacatctgtagtcccagctacttgggaggctgaggcaggagaatcgcttgaacctgggaggcggaggctgcagtgaactgagattgtgccactgcactccagcctgggcgagagagtgagactccatctcaaaaataaataaaaattaaaataaaaataaacataggtctttggccaagtgtagtggctcccgcctgtaatcccagcagtttgggaggcagaggcaggaagatcgcctgaagctaggagtttgagaccaacctgggcaacatagtaacctcgtctctacaaaaaatttttaaaaattagccaggcatggtggtgtgtgtctgtagtcccagctactcaggaggctgaggtgggaggatcgcttgagcccaggaggtcgaggctgcagtaagccatgatcttgccactgcactccagcctgggtgacagagcgagaccctgtctcaaaaaaaaaagaaaaaaaaatttatgaagtactggttgggttaacgtttcttcttctaaccatgagggaagtaggtgggctgttctggtgactcagtgtcctcccagactcactcatgagaggaagtattcacggactgtggtgatcttgtcttggaatttttttctttgcctcctggcctcacagccgttccttttcttttacacatccatgaaagggagactctaagatcttccttgccaaggttgttgtagggatgagcgatgatgtctctgaggcaccaggcacggtgctggcacccagaagctgcttaatgatcctggaagttatgaccattgctcatagtttttcctacgtttcagatcatccttaaataattgtcattggctgggcgctgcggctcacgcctgtaatcccagcactttgggaggccaaggtggttggatcacctgaggtagggagttcaagactagcccgaccaacatggagaaaccccatctctactaaaaatacaatattagcccggcatggtggcgcatgactgtaatcccagctactcgggaggctgaggcaggagaatagcttgaacctgggaggcagaggctgcggtgagccaagatcatgccattgcactccaacctggacaccaatagcgaaactccatctcaaataataataataataataataataacaacaataattgtcatttatcagcttcttcgagctcttaatatatatatcgccacctttcacaaaggcaaaatctgcattagaaacactgttgtctgattttggttcctctggaggaggggtagacagtctttttgtgggcagggtctgtgtctgtttacctctattccccgccccccactttggtgcccaccacagtcccttgtgtatggtggatgctccttgactatctgaggaataaaatcaattgtgaaacagtttccaaaaagggaacagtttttgtttccccgtttccttatagccttgtgagttgctatctctcttggctctattattaataacataaaagaaagagctgttttcttaacctctggtagttgcacatatatggggaaaaggcataagaaaatatgctggcaataaagacaagtcacagattgtcattttctttggtgactgaagggatatttcagtaatttataggtgaaatcttcctttttgtgacttccactgaacaacatttttactaccaaaagataagggaacaaaattttttaacaaactatttaagcttaaatatttaaacatttttattagtcaccacatattaataaaatatttttattagcacatattttattagtcaacacatgtgtacacagctctgatgatctctatgtagatgcctatataaatagctatatagatatcatcagagctgtgtatatatgtgttagagatagatgcacatacagttgccccctgtctcccaggggtctctgtgacccaaggttgggaccctcaagtgactagttatggatggcaaggggggctgcaaggccagagttggtcctggctagagatttcaagactcgagtggctgggaaggttttagaatgcaggtaaaccactagttgctccaaacaacaaaaccatcataatggaagcatccaaaagtgtgttcttcggcagcttcagagactatgcctaagcaataaagttttaatgtcttttttagctgcttaggtgaagaatgcatttgactgtaatctaacccattaatctcttatttttgctggaaaattgtacatatttaagagtagtggctcattgccagtattggtgatgagtgatatattttaaactatgcttcatacctttcagtaaatcttgggctgaaagatatgtacgttttgttttcaaaatttttcagtagtcatctatttaggtcaattttctgggcaaacaaaatatttgaagccctttagggtttgttattgagatgtaggctggccatgaaattacagggttcagtacctcattgaagtgtatatgtaactgttattagttttttgataacttttttatactcataaaagtagtacttgcttacagtagaaacttaataaaaaccataaatggaaaaataaaccattcgtaaacatcatatagagagaatgactattaacattttagcctaacatgattttaggggtttataatattctagtatatgattgtaccataatttatttaattgcttcccaattattggactggaagtttgcttctaattttttcttattatatatgatgctgtaatgagtaccttttaccagtaaatatttacctgcctctctgattacttctttgggattaatccttagaaataaatttgatgaatcaaagggcatcaaccctttgaatgcttctgatacttctgccatgttgtttcccagaaaagatataataattattccttccagtagtagagtattaaatgtctgcctctctttagaaagtattaccttttttcaatctttgacaatttgttagataaaaacttcagtttcaatattattgcatgtattcatggatatttttcttctcacacattctagattttttctatattgtttataaatgttttataagtgttattactttattgaggatagaaattattatgtaacacttgatggtaacagtaaaagtggaaaagaatgaggaaaccttcaacaaaacaagttgtcattaacaaaacgggttttgcaatgcaactttctgtgggttagctaaatctttagtgtgtcaggtagtcgaaagaaatttgctgtatagtgctgtgaaatatgctgcatccatgagccctctgctctttgcccatagggagcaaagacacaatctttttgcaagctgtcccagtgccatattgaccatcttccttttacagcaaaaagttattgcttcctttggttaaggttgggacacccctctggaggcacacttgaaaaatgaagacctttctcgttgttcttctgttatccaagtatcttggaagaacacctctatagcaggtagacaaggcagggtgtcattgcaatctggctgcagactgaatgtaatcccccttgacattttgccccttggaggcaactcctgccctcccctctccccttacgaccctgcccccttaaaatatgtggagctcagcaaagactatttattctgataaaaatgagcaaataataggtgtgaaagaacatggaacacttcagtgaatcaaatggagaggattaagcattaccccaataatgattggtcaggacgactgtccctgtggagtgtgtcccagaagggttgagcaatggagcaaacccagaaaatctcattctcaactctccctgacagatgacctcgtctgcgctgtcttttgcttcatggtgatgaaggtggaacaagacccttgaataagatttccatctctgaattctttaaacccatttgagatcagtgcaggcctgcagtctctctattagaactggagcagaggcccagaagagagaactgaattttcagcactggattctatgttgagaatgaaagagacaataattgaaaagcttttctcttggaaattttgcaaaatccgagtggatttttgaccaggatttcttggtgacctctcctgagagagcaggtgcctgaggatttcctgctgagtatcttggcatctgtcagactccttatgacttcattttagttcagggagtctgtttcctagccattgatttcatgcacaattcctggcatgtctcatatctctaaggtgatgtcacccttgtatttttttttcagatgtaatcttttatgtgacagtgaggtgtcttacttgtgagtgaacagctagaacctcccaagtggtttttcttttggattttgtttactcagtgaaaaatactgaggaacctgagatccttcagggtgcattttggtgtctgcccaaccttgacgtggatttggaggccaggctcaatgctcgaacttcttgttggagtggcactaaatcattaggatccctgaggacagacagttcaggccatcattatttggtaggcccttgcacacttacacacaaatgcatcattatgaacatggagcagaagattctagggccccgtgtgtaatggcacaatttgtcaagaggcctgagacctggagttggcatggattccctctcctcctgacccacctacctgctacattcagttggccaccctgttcttttgagtccacctttggatgagtagtcagtcctttctgatttttgccacctctgcattcagagctttcttattctttggcgcggaggccttccgttgggtcccactgcctgctgtcttatctccttctaatgaatatgatcatgatttttctgtatttagacaactccacgatgaggaggatgatggcggcagctaacatttatgtatgtatgtatgtatttagagacagattctctgtcacccaggtgcagtggtgcaatcttggctcactgcaacctccccctcctggattcaagtgattctcatgcctcagctccccgagtagctgggactacagatgcacaccaccacacccagctaatttttgtatttttagtagagacgagattttaccatgttgtccaggctggtccggaattcctgacctcaagtgatctgcccaccccggccttccaaagtgctgagattacaggcgcctgcctccacacccagccagcagctaacatttattaagtgctcactatactcctgccaagcactattataatttgtcttctaacaggctttttataagggaagtgctactattatacccattacatagatggtaaaactgaggcacagagaggctatgtaagtttcccaaagtcatgtactaattgatgaagacccagggtttgagctctgcaggaatggccgactccttgtggtttgagcctgggctccctctccatctgtcttttctccctgagccctcctgactgcagccatgccagactttttaatgttctgaaccccagctccagcctatcactggagctctgcctgtgatctttccacctcatgcctcccggttctatgtgtgccttcagactccatctggcagtggtatctggatggaccagtgcatagaaatcacatgagacactcaataaatgtagactcctagtgattctgactagcaggtctggggtggggccaggtacccagatttgcacgggaagtcagggaccactgctgctgactgcttttttcctgggtgcttggcacactctgtcacaatcatgttttcatttctctatgttccatttcaactggatagggacagtgtcttttgtttctggaacctgtctcttttcttggcatatagtaggcactcaggaaatagaaggttgcttgaatcctagtaccagtttactatctccttggaaagactgaaaggtagaatgtgatgtctaagcagcttcactaagcagagaaaacaaaaagtttgcaaaatagaatttgccttttaatctacatgttcttgcgtagcattgagcttcctagagagtcatattcatgctagccctgagttgtatcagcagcagccactagaacggtaacttgatgccaagagtgaattctgatgagcttcattgtgagtaagagtcccagtttgatcatctctacccagatcccgtgggacctccacactgtatgaataatgaggaggcgtggaatacgtagcatgctgcagttggccagcacccagtgtgtactgtgaggtaatcagtgtcaaatcagtcattgtagcaggagttgggagtcaaaaggagcaacagagaacctcacacgtctcctaagagaggaagcaaagaacagttaccttggctgtcatttatggggcatttgtattgtatgtttggaatggtgctgggtactagtattaatacatgattttctctggtctttgcaaaaactgcctgagttaggaattgtcattcccatttcattcatgagcaggctgaagttaagagtggttaagtaccagctgaaagggaggaggagcctgagagcaatctgggcacccgttctccccctcttcttatttatgaatgaatgaatgagacagggtctcactctgtccgggtctcactctgtcgcccatcctggagtgcagtggcacaatctcggttcgctgcagcctccacctcccaggctcaagcagtcctcccacctcaacctctgtggtggctgtgactacaggtgcatgccaccacacgcagctacattttttttgtatttttttgtagagatggggtttcgccatgttgcccaggctggtcttgaacccccgggctcaagcgatctgcctgcctcagcctcccaaatggttgggactacaggcgtgagccactgcgcctaaccctctcctcccctcgagcttacatcctactgtcctgtagccagctccaagatgttggcctttggttctctcttcaggctgaactctctttcagggagtttcctaatcgatcttccatagagttgatcataccttagtacctacctggatgagcactcaagatgttacatattcccacctgacttctttattactgctggaagatatggtgtcccacacctaagtatcccacccacagtccccagctgcatgtgtcgattattgtgagctattcaagggatacagactgaggtaaatgaaccaccagtggaagaatgtggatgttctattacaggaaatgcttagctctttattgcagttatataatagccggcaatcatgatagctgaggggcataaaaatgagagcaacagagtttatggtattctttataactgtggattctgtatgtgcgtgtgtgtgcacgtgtgttctgcatgcatctccacggcacattatctggaggtaacatgatcatcaggccttgagctcttttataagcaatagattgtggctggaaattgaaaatttagtttctgtagctagaaaatactcttttcaaatgccatctagaacagtagttctctgagtgtggttcctggatcaggagccttggtatcactgggaatgtgttaggaatgcagattcttgggttctaccccggattgaattcagatttgggagcggggcccagttatctgtgttttaatcaccccctcccccaggtgaatctgatatgctaaagcctgagcctcactcccctggaaagtgacgcctgattcatctgccagcccatgggcacccattaggaaggtgcttatgggagctttgacctgggctaggtgccggctcttgatccatctttttctaaggctgagggtgtccatagaaggagaagtaggtgcatccgcttagatgttatttaaccaaataaaggtttacagcttacagaaaagaggcaagattaactaataccttccaaaccataatgtaaaaaaaaaataaaaaatatttactcataatggagtataactgaacaaatcatgttgctaatttttttaggatatgttttgtagcttccattcagatacatcttatgggtaataaatacacacgtgaacacacatatgtgtactaacaatatttttcagacttttgattttttagatattgagtatagccttgttactaccaaacttttatcatacttccttgtgaaaggatttcatggcatatttattatttgaaatatcaaatagaaatcagtacagtctcagcattttaagatacttgatgtaatctttggaaatatcttagacattgcaaaataagggttaatagtcatagtatagccactaacgggcagttctgaaattacataaagttaatctgatgaactgatagcaatcagtttttggctatacataactagataagtgagaatttagagattgaatacatgagagccctttttatgattttcaggatctcaagtatgaagcaaaataaattcttctataccctaaattcttgcaaagtgatattttgattagatttgagctaccccagggctagcaatacttgaaagtgtgactagacttaacctcttagtagatagtccgcagtaatcctttgaaatatacatcttgctaaaagttcctttcccaaggaaataatgattaaagataatgtgatgtgtacaaggaattctgggacttgtagtcgagaaacctgaactttaatctagactactcaaatttataactttaggcaaatctctcttgactttctaggctttagttttctagggttttgttttgatttgtttttttatgtttttgtttttgtcttttttttggggggagggtgttgagacagagtcttgctctgtagcccaggctggagtgcagtagtgtgatcttggctcaccgcaacctctgtctctcaggttcaagcgattcttctgcctcagcctcctgagtagctgggattacaggcacctgccaccatgcccagctgatttttgtatttttagtagagacagggtttcaccaggttggccaggctggtcttgaactcctgacctcaggtgatccacctgcctctgcctctgaaagtgctgggattacaggtgtgagccacctcgcccagccttgatttggtttttaatctgtaaaatggtaggtgttgggtcacatgaacaatggctcttttacctccactaattacctagacgctagaaataagaatatggataagacctaaaccaaattttctagctaaattttgtaaagtctgaacaaaatctgtgtgcgttttaatctttcttgtaatcttttcagactctgtctttaaaattatatatatttttagcttctaagtaaacattattggcactggttttgataggaactttactccaagtgtattgacttagtagatatgttaaaaaggttattgcttagtttgtggaaataatacaagctgagactttaactgatatttgtattttcatttaggttccactgttttctcttttgaatgaaaagtataatcctattaaatctaaaatattttcttacagtgatccgtatgtgaaactttcattgtacgtagcggatgagaatagagaacttgctttggtccagacaaaaacaattaaaaaggtaggtgtcgatctttaaccaaatgtcatttaagtcataatttaatccaattatgcacagtcatgtgctgcttaacacctttttggtcaaggatggactacttacacagtgatagtcccgtgagattataatggagctgccatatacaagtgcatcactttttctcttttttttttttttttttttttttgagatggagtctcactctgtcgcccaggctggagtgcaatggcatgttctcagctcactgcaccctccgcctcctgggttcaagtgattctcctgcctcagcctcctgaatagcagggattacaggcacctgtcaccatgcctggctatttttttttttttttttttttttgtatttttagtagagacagggtttcaccatgttggccagactggccttgaactcctgacctcaggtgatccacctgtcgtggactcccaaagtgctgggattacaggtgtgagccaccgtgcccagcccactttttgtcttatatactgtattttcattttaagtgtctttcagtattaaatctagaagttttccaagacttttcagtactaacccaagatagtgattcaggtttttacttaaatgcctacaaaaacagtatcctgaaaatgtcataagttgtaacattttttcttgcacagaatacagcaaaaacaaggatttgtttttgtctttgtatgtttcacaaagaaacttaaagtaatttaaaatacatttaatgaaatggagctgtttgtggaattggtaggcacaccaggaatagtttaacttgaaacaactatttctaaaggaagcaaaatacttggttagctacatggaaatagagaaaatatattaataataaagctatacatgtatgtatatatcttattttcctaatttttatgtacatgatttcattaaaaatttgtttccataagtatgtcttttagttatttatttatttagtttgagatggagtgtcactctgtccacccaagctggagtgcagtggcataatctcagctcaccgcaacctttgcctcctgggttcaagtgattctcctgcctcagcttcctgagtagctgagattacaagtgtgcaccactatgcccagctaattattgtatttttagtagacgtgggattttgccatgttgaccaggctggtctggaactgctgacctcaggtgatccacccgccttagcctcccaaagtgctgggaatacagatgtgagccactgtgcctagccaataagtatgtcttaatttgcctatctccatgtatttatagacatatgtaatatatatatatgtaaatattttttaccctatgtttggaggctttattgaagatgcatgttctctattaaaaatacttggctgcatgtggtggctcatggctgtaattctagcactttggaggccgaggctggcagatcaattgagcccgggagattgaggttgcagtgagccataatgatgccactgcactccagcctgggtgacagaatgagaacctgtctcaaaaaaaacccaaaaaacaaaacaaacccctttcatctgtgctttagtatcatttatgggttactatgatttttttccttacctcctttagaggcgggtgcttagatagtctaacactttgctgaacattttctggacagcatgagtgctttaaaaaattgtaactgtcttgctgccatgcaggcacccaggatgcagccaggtccttttgtgtaaggaaccgtaactgcagcgtgtcctccacttggcattgggactggcattaaaaatctgttttgcaaacaggagccagtcttttgattagcagggaggatgcctgcgagggacggaggccattgttccctgtgttaggcgttgttgctggttcagtttctaggcgagtgggggctgtctagaaggctcaccaggaaggcagctgggaaacttggttgcctgctggatgtggagccaggaccaaagccggcgactggggctattgcaatggatttccttccaaagggaggtcctccttctccctccctttccacggtcgagggagtagctctgtagctgggtttgccctccttctcctgctgcccgcctcctggttcgtatgcctctgctgcgttcgggtgcgagaactgccgtcatcctcctctccttgccgtgttgtgactggttcttcgttcgttttgtgctctcctgtcttgttgctttcctcgcctgtcatttcccatgtgcatttccgtgaagctgccctccgggactgcagccagaggcaggccaggcctgctgctccactcccctcccctcgttcattaccatccttggcttcattcacatgggagaaaagtatgaaccccattatttaggattgaattcactgtggagttgtgggtggggaaagtgctgaatttttgaaaacgccggttcagtgttgtgtgagctctgtgtttcctatttttatgttgcactctgttgatttttttcatctccctgaactgatctattaaaggaaatagattgataaatatcattttgactaaaaatatctatcgctgttggtgaagtgatggtttttttttacatacaatttttaagagctgtctttaagaggcttatgcatgtgcagatgcatgaacacacatgtacagtcttccttcctagaacatgcttcctcttagttttgggggatatctggcagtcctttcttccatgctgaggacaaaggtatccttgccatctccttgtgagatgtacatttaagtagactgatagaaagatgaacagatggatgaatggagaggaagactgaaggataagtagacaagtattttttaacctggttatttttggagaaaaaaataattcacttttggcttacatttggtctttttttttcttgttataaaatctgatcctcagtatagctctctataaaatgttaagatttcaatatttatataaacaatgaacacattcaactttcccccacctgcttcgttactctgcaaaacagatttgtagcagggagagggaagtcaacaaagttcatttccttcttggtagaataatcatatcaatgctaatttcttgaagaaattttttatattttcacgatgactctttccaggcctttgatgtttttccttctggtgatagaagcagtttaaggtttcatacctatgaagcatctgtttcataaatacattccctccccctccagtttggtttgtacgctagtctcaaataatcgactaaatgcttctcttagctttttttaatcaaaaaaatgtttaagcaaatatgtagactgtattgtactagtaactgctaatgtttgaaagactaaaagatactacaagataatttctcttccagacactgaacccaaaatggaatgaagaattttatttcagggtaagtttttcattgtttggtaataattgttattgatacgtctaggtcgattatcacagtcaattcatcttgaggaaaagctcttaaatttttaatgagaaattccttttaggatgaaaaataggtagcctcctaatgtgtcccaaattttgaaagactagaagtagtggtcacagaatccggacttgtttcattggggagtgttttggagaagtcaaaagaaaattatccaaacaccatgtttcatcttttgaattcaaacctttctttaagaaataagataaaatatcatttatgagaatggtttaattctatgagacgggttatgaaatattttagagagagtaaaacagtagaggcaacatgattaaaaagaaacataaaaattaccagttatattctagttagggaggaaaattttggtaactgaaacacttgagtgcatatatatgtgtataatataaaattacttctggaatctaaatacaacagaattaggtaagatttcctcaaccttttatatttaatatttagaatagctatatgtcgaaatgactgaaatatgtgaattagcagagatttctgcttattgagcatttgtggttgttgctgtgttttactactgacattttggaactattagactgcttagctatttaattgaaagaaaggactttctcttcaaaacgaaggtatcttaattgtatagctgtgatattaaaaactgcttacctccagaaataatccaggtcttctgattagtgcagatttccaaaggccagtattgccatgaggcccattataattggtcctgatttcttcctctcaatcgcaatagtattttttgtgctccaaacttgggctactacatacagcatctgctttccattatgctcagagctgaaatatggcactgatactttcatacttggtgaaatcctatgtacagcctccaccagatgtatttgaaattaccctgtggaggactgaaaagctaataggagctgatagatgctgttggcctttagttaactctgaaatatagctttccacttgtgaacctccaaagtgtttagactcctttcagtggaacactggcacagttacataaatgttagtacatcccatacttttttcagctaatcttggcagtaggcacatttaagttctatttttgttagtttttctgaaggttttttttgtttgtttgttttgttttgttttgttttttgagatggagtctcactctgtcaccaggctggagtgcagtggcacaatcttagctcactgcaacctctgcctcccaggttcaagtgattctcctgcctcaacctcctgagtagctgggactataggcccgtaccaccacgcctggctaatttttgtatttttagtagagatgaggtttcaccatgttggccaggctggtctcactctcctgacctcgtgatctgcccgccttggcctcccaaagttctgggattacaggttcttaaggtctttatatttattcattttacaaatctttattgagtgcctattatgtgccagctcctgcctgtagcctgtggttgcattggtaagcagtgtgacccttcatagagcttctaaacagatagcaaaccccatctgcttgttctgtcgctaggctgcaggcagaccacggaccagaagcacaagctgagctctctgtgcttgtatggtcaagtgttatttcatgcattccccaccatgaagcagccagggcctaggtcacctctctgctttaccatttagagcctttgtgaccctggaaaggccacctgaggactctcaatctccctgggatccttatctctcacataggagagagaatccttacctgcaagggttgtttcaaggatttgcatgcgatgatgtaaatgagaacatgtagctctatgtcacacatgtggttggtgcttagtaaatgatacctgagtttggaagatgatatgggccattttggtgaggttttggtaaggaaaaggaagcaaaaagatatggaaagcccagtagctctgtcattgcctcacagttccaggtctctctcatggttcacagtctaggctctggagacaggcagcatagacctagtgcaggtcctggttgccctacacattagctgtgggctcttgggcaagttacttcactgaacctcagggtctcggctcctcatttataaaattgcgtgatagttatacatcataggattgctgtgaagattaaaggagatcatgggttgttgatatttaataacaagacagtgcctaaaaagtaagtgcacaggctgggcacagtggctcatgcctgtaatcccagcactttgagaggccaaggcatgcagatagcttgagcccaggagttcaaaaccagcctggggaacatggtgaaacctcatctctacaaaaaaatacaaaaattagccaggcatggtagtccaagctactcaggagagtgaggcaggaggatcaattgagcctgggaggttgaggctgcagtgagccatgatcatgccactgcagtccagcctgggcaacagaacaagaccgtctgtctctgtctgtctgtctgtgtgtttgtgtgtatgtgtgtgtgtgtgtctctctctacacacacacacacacagatacattcttaagctattacaatcttcttcattatttttatcattactattactgctatcaggactaagaaatatcctcaggcatagacattttttgatctacagtcatgagaatgccttgtacagaggttaggaacccgtcaaagctatttacaactatcctttcttattttagaaaaacagctaagagccttctcttcttttgctatgcctaaatttggggcagaataatatagaaatcagtaataggaaatttgatttagtacacatagaattcccagaacagcaggataattgttcatattatacaattgagttgggcgcattgtaaagcagtatgttattctttctgttccttacgtcgctgttcaaatgattcctgctcgtttaaaaaatactatttatgttccttataggtaaacccatctaatcacagactcctatttgaagtatttgacgaaaatagactggtaagtggatgcctgtatttgaattttgcttcatttttttattaactggattttcagagcagcgtctttaaaactctgtgtttatgttgtacttaggacagtatatgtgcccaaaaagaagactgtttttgtcccactacgagtttgatgttcaaaatcctaacaaatagttttatgttgctaggataaaaaatgtatttgtatgtgtgtgtatttttattgcagttaatgttaacgaaagccactggtgatagtaccagcccatatgctcatgctctaatgttgggaatacagaacggtaggcagatctctaaagaggccatcaggaatgtaaacaaactttgctcggtttttaaatgaaagccagaccatagtactgggatgcattcagtagcaaatctatggtaattctctcagggaaaataacaatctaattaacaacgtatagcaaaaagtgaatctacatttagcaggtaaagtcaagccgtattttaaaagtggttgccttcttaagagagaaccttagaaagtacctttaaagaaacaaagatatgcctgaggcatataacagatacaaactaacattttatatatagattgatgtatatataatatgtttatgaagatcgacacatacataactgaaataattatgatttcattttattgtttttaattttttttagagagagggtctccctctgtcacccaggttggagtgcagtggtgcagtcgtagctcactgtaacctcaaacccttgggctcaagcaggactccaggatagctaggactacaggcatgagccaccatgcctggccagatttcattttagaaatggaatttttgaagcacattttgctttcttaactatctaaaacgtgtacatcaagtagctgtgaaccaggtgttccaactatgaaaatgaacactatcatgttaagtccttaaggtaccttcagaagtgacactataattcagtgcagtcattctcaaatttaccctctctgaaacttgtatggtatgttgactggttaaaaggtgttcttaagaatcctttctgcagtattcaattgaaactccagatttttaatagctggacgttaatagaatatttgaattggaggagccttatacaataactcatttaactcctgttgttgtcgatgagaagaaccaggtctagagcctttacataaacacatcagtcagtggaggtgccagggtctgacctgctggcctcctaagtcccagcccagtgatagtttgggaatgtattgaatctcatatgattagtattattctccaaaagagaaaactaacagattttggcctaccatcctagtatcttttccattaaagtatgggatgttgggtgatgaacagtcgtacagtgtaactaaaccacttttgttgtatgcatcaaagtactttcttgtgaaattggatgagagattctgctgagggtgcagttcttgtctctccatctctcatccagtgaggaccaagtgagttaagcagtattgagtagtataacagtacgttcctggagacatgggtgtgtctgtagactaatccttattctccaattattgagtataatatctcttgtttaacatgaggaaagggtcaaatttgaggaaaaatggcctcttgtttgatgtgttttagttcattattctcttctattaagagaaattcactgttaaaaaattgtttcccatttccgtatctgaaataatgactgtagttgaggtgatcttgccctgggtctgaaatcatacttccaaaccaaaaaggactttgaatacaaaacttttaagaaatcttgtatgaatacaagctatatctgaaaaattgtgttttataatattgatgcctagttttgccccaggccatctgcagtgtggttactatgcaaagaatgctggtgttgctgtttttttttttttctttgttggctattaacccagcggagacaatatgtggctatggtagtacttggaagttctagcattacacagactagcttccatttctctcatagaggtcatttttggcatttaaaacacatacttttagaaaacagatttggatgtatgtaaacacagggttaatccaccacactctggatgctagagctgttgacaaagtcatgctttgcagattttaaaataaactttttgttactcttacagcttggtattttcccctcctattttttttacctcctctaaataaacctctttgttaaataattgatgtttctggatcatagaaaatagtaagtttaaaatacagaatatttccaagctaactacaaatctgatgacagttttttgagtgtgcacttttccttttatttcttaggtcctttttggtcctttgcaaacatagtaagattccatatttgtgtcccaactgtggtaatattgctgacttcttactggaaaacagtcagctctaggtagcatttcttctgtgtggtatttaagttaaattattaccaaaaaaaaaaaaaaaagcccacatgcactcccttcttcaattttccttttgttttttgttgtttgtttgttttttggttgatgttttctttcctacctgacatatggaagacaatgttttctccagctgggttcattttctctttgaaaaggagacactttggtgtctgccagtcatatgtgagctacacacacgtatacaccttttaaatgaaaaatgctgtgatagcaggagggctctgcttggctaactggttgtgtagcaagtcgggccccctcccctccacttagctattttgttacttgtagatcctgctctaattatttagcattaaacggacactaactctgtagggtgtgtaatcgtatttatagtactgttttattagtttgcattccatcctggtagtgtagtgatgtcataaataacagaaacatggtatccgatgcttgggaaggggtttacccggtggccaagccatattttacttgtcattattccgtgtggcggaaggtgggaaaataccgtgtgtgctgttaaacatgccaggtccctgcactggttagacagagtctcagtgctgtgctccgttgggaaagaagtgccctgcgaatgtgatgtggtttagatttatagcagcgtggcttgcagtgtgtttgctgccttagtcagctgtgagagcgccctgctggggccactcctttctgatggaaaagcagcagctgggaaggtgctgtttcaggctcttgctgtttaaaaaaaaaaaaaaagagcgagtaggggaaaactcctctaagtccagaagctggcattggagggggagagcgcggtcatgtggttctggccaccctaccctctgtcacagtgtggatgagagctttttgctcttatccaatcatgcctggaatgccgcttgccacttgggttatttctgctatctgtcgctcccggtgccgcagtgctaacagtttggcagatgggacactttttcttggaatttgtgtctttggtttgtgacttctggcagtgtcgggcctgttgttgccgcttgccctagccctcctggcccccctggtcaccatggcccatcggcttcggtttcattttggctctggtcgcagcaacacagcccccgaatcagacatcctagaccaggagagagaagacgacttcttcatggcattccacaccctaccgcggagaagcagcccgcaccccttcgcccagaacggaggggaggacggcggcggaggcctgcagggaggcgtgggtgcgcttaagcggagctcgtccatgttcatcccgcagctcttgaccagcatcgacgcccgccccacgtgcagctcctccgtgcagatctccctgcagcgcaaggccacggacggggccacggacgggtgcgggccgcccgagggcgccgacgatgggcctccatgcgcaacgcccgaccccagggaccaggcctccgccactgccaccacgagggcctcgccccagagtggctcccgggagccctcgccgagggacacccccgggagctcccctccgagggcagcccgggacccagggctccaggtcaacggcacgtgcggccgccgcgtgcggtgctccggccccgtggactgcgcggaggaggctgccccgggcctgcgcatccagcaccgcgcctccagcgccgacgtgcgccaggtgaggctgctgcccctgggccccgatggccagggcggcccggccgcggcagagcccaggcgctggtccctgcagcacgttccagatgcttctggaagctctgggaagcggtgttttgtcttccagttgcagcagccccaacaaggcgcttcggggccaggcagcgacctcaactttggcttcacgggcacaaagggggacaggttggtgaggtatcctcgcattcggctggagaggagcacctcgtaccccacgcagccccgaagcgagcgagggagccccacggaagatcggggagccctggaggcatcgcctcgagctggcaggatggctcctgaaatccgcaggacgaactccgcggagaggactccgcagggccaggggtgcacatttaagatcaggcaggatcagaacgcggggcagcagcattttagaattcttgtaacccgggggccggaagaagctccccagaatcccgaggagaaaagcgccaaaagccctgtttccacgggagctgacaccacggtaagttcacagcgtgtttacatgtgtttactgatttcaacttcgatgcttactctgcggcgtaaccaaaataaaacctcaccctctgttccgggagtttccctgcttcaggccagtggatctgaatgtttggccgagttctggcacgatgatttgtggtccagtgtttggtgcgcaaaacaccatttctgcaaatgtcttctgtaggtcctcaaagtcaaagaactttgtctgtttgggaaatccaagcagaataccttccccctgcttttatttttctgaatagaagaatttcgaataaaatttgttactttaatctgccaaaaaacaagtcagtgccccaacgtgctgatgttggaattgcatttaaaaagctgcttgcaagtatagcctgtgacaatactttaaaaataatcagttctcggaaaggggaggatattgcaaaggacctcagtttcgtctcttaatagttaaaataggtgaacgtaaagtttagtggaatttgattatctgtcatggcctgtttgctgcaggaggtcaggtcagtcgttgttatataatttgctttgttttttgtcccattaagtaatactgaacgagagtagtgtcgcttgtgggatagtgacattactatcccacaagtgacactgctaagatactaacagatgcgtttttaaagcacattgggttatggcccaaggctaggggaaactgatggggactcgttaatggtcagatggcgtggcgtgcaatttaacactgcacacttgagtgtccaagccgaggatgctgtatatagaatagtaagtaccctgtctccagctgtggagaaatagacgccttagaacagattctggccttcctgtttctctgttcctgatcgctccctttcagtgaaatggagtacagagagacagctgcacgctccatcgaccaggcatatgatgactctgcagctttcgtggtttagagtggaatgaaaagtttaatcagtttggtttcttttactagtaatcactagccagtgagtgctttctcctaaagaacaagctccttatattttgaattggatattttttctcctgaatttcatgtgactgccagtttgaggatatgattagtaaatgtctaggggacttttctttggatttcacttatgaattgtgattttgaaaagtgagcgtctgagtattactctagaattgtattgtcttttattgctttgtgttcagaaataagtttcgtctttcaagtaaactttatcactcctccatcattggttttcatcattttgaagatacaatcagatgcttaatgaaaatttatttttcttcttctctttccttccatgtatctcctttctttcattatctcaaactcttctattgggaaatggctaagtgctttgtcttggtctgaacctataccatgtattacacaatggtacaaattttgacagtgttttgatattatagtagcctttaacgcccacccccaacaaattaccatcatgacagttgtaggctttgttcggcaacacaattccatgctgaacttggaccacttaccgcatgaagattgacaaaaatatatttcctaaagtttgataactattcaattatattaccaaaaactgaaatcactttgcagttctgatgtggaagacaaagggattcatacaattaaactcaaaaaagttcaaactcatttggtttgaactttcaaatgtaattagaaaacaaatcgaataaactaaaacttatgtgtaccttgcttaaaagggctattctaacttgcaaggcctatgtagtgaaaaacaagtttctacacatttggagaatataaattctggaataaagagcttttcttggagagtaagttccaactagtgaacagtagtttgcattttcatatgtatgtatttttgtacacatacataaattagtacgtggttagtaagctggttttcttttaagcaaaacgatttttctttaaaaaacaaaaccaaaagtggtcacataacaaaaccgcctgctccattcagcaactttgtatgcatttcatatggacaggggtgttaagtttaggcagcagctgccaccgccttacttatcttgaaggaaaacattcacttgggcgtctacagtctggctgctaccaagcttttttggcgtttcaaatatccactgctttggtctaaaggacattacattattaagtttacatgaaaaattagctagaatctgttgcagtttggtggtggaatgatacggaaagtcttcctagatttgggaataccgctcgggattcatttgacaacgtgctcatatttcataagctatactttagaccttattacaagattaagttgttgagtacttttatctgtgcctcccaaacatcctgccatgactaaatctaaaatgtaacatgactccaaaaaatgttaaccaactaaattattagaaaaaatacaggggaaacccttgtgatgataagttttccacctggtttatcactgtcagtagacaagaattcattcgtatagtcatcaattataatcagttaaaaattttcagaattgttagaatttaccaattcagtctgtggcagtcattagtagtcatttagtgagtaatttagttattttcttataaattagcttttgggttattgggttctgagcctcttaactgcattagagttattctgaggaagttggaccaccatttaccagcatttgtgccccctttgtatgccattttgtgcataataactgtgaaactctgcattttacaagcttgaggagccagttttctaatctcattggtgttatgaagtactcaaggtctactgtgtatataacattacacccgttacttggaaagtttcagggactatctcagtgtcttgctgacacagtttgtaatgtaaacggagggaggagggcccacccggacaaaagcagtaattctaacacctactgcatatgctattggagaagagagcgttctttcagctcaagctctctggactttcctctgtgtcctctcagtggacatgtacttcacaggagtagtgtagtaatctcttgtgattaaaaattacttttattgaacaacaaaggaatatccaaattcttttcatttggggaaactttgagtctcttttacagaagatgtttttaatatacggccattttttgacattaatattagtcgatgtctgttttttaccctaaaaataactcgagtatccaatgtattaaccacccctttattttaaaacataacaacacaggaggcgaaggtgggaggattgcttgagcccagtagtttgagattactgtttctaccactgctctacagcctgggcagcagaacgagactttgtctcaaaaaaataaaaataaaacttaatattgtaatggagaagaaaaacaagtagcattcttttcattgacctggtttctgactggattcaatcaactttctttcttctctcatgtatagtaatgctctctcttaatgtggtcttagaataaaccaatatatatcttcaaatgtcacctgttttcagggatgttttgaaaagttggataggcagtgcacaaggttgacaccgatatgtttgtaaacagaaactgtacatggcttgcagcatagctcatgtttctgtagcacttcacaatttgaagaatgctttgtttatttcacttaatatgtatggctgtcccattgtggaggcattatctcacttgaccctcccatgtgaaatggtgttatttcactgtttcagatgaaaggatgtgataccgttgttaggtgtaataacattatgtgtatatcatagtgtatactatgataccactttgtgcacctataatgggaatgtgtatttatgtgtgtgtgtatatttgcacaattaaaaagtatatgttaagccaaaaagcagtttaatgcttcctgtgatgtgacagtttttttgaaaagtttagaggtggtaacttcatttggtgtcttgcagcactggcctgaaggtgagagaaggcttctttggggatccaaagagccgtcctctgcagttcactagcttttggtcctggagtacttagactccctctctaagcctattcctcatcagtaaatttgaggataaaaatgtccagctcgtaggttcatagttaggtttaaatgaaagtgtccatggaagtacctgattcgtgaaccaggtatctgtaatatacaagtctttcccctagcaggttaattaggttaattgtgaacaaccattttttgatcagtatggcatttaacacaaggacaacatgcatttatggcatacctggaaatgtttaataaatagctttgatgctctttctgttgtcatctcatctttcctaagtatttgtccctaacaccaaatacagtcttggaaaagaattgcttcctgaactatgcattatagaaaaggactcgtaagtatatttactgtgttgattttgaagccttataacattttggcttgcatttctagcatattttttaccatgtcattttgctgtaatatttccagtggttgagtctactgttactttggtatagactgaggcttttgagaaacaatatagtgttatatctacaaaatttccacattgtatgactttaaaatgagggagatatttgggaatatgtcttattttaagatactgtcttttagagagttttcataaatggtgcagctgcttctcttggctaagcctggtggcagaattcctagtcattgaaataaatctctaattttataatacatactgataagaaacttgctatcttttcataaaagttcacagtaccagaataaatttactttatgtaaaaactaccttaaaatgtaataaatgttggatagttgaatggtttctggatagttgatgaatatttctgtatagttgaggcgaatctaaatggtaatgctacttgtgcaactgtcaatgatctagcacattttttaataaaaataattacctgcatattactgtgggcgatacaggttagctatcctaaatacgtttttacctttttaactcttaattatattaagccatttgcaagaatgggaaaaagcaggaaattcataggtggtgttgaaattgctgattctacacaaaggtaccagaatgtctacatttcctctgtaaatgtcaaaggaaactttggaaacccacctcagagttggctggtgattattcggacaggttatcatcctgtctgcaaccttctagttctcttagttcataccaagcagcatgatattccatgtcctgcacaaaggagagcaccaaaacagccttcacctgctgcgtatgccccactctgaataaaaaattaagaaggccaaaggacggaatgtgttaaatattagcaaaagcaggtattgcagaatgtctatacatttctgggcaggtggagattattgaaagatttttagaaataatcttcgttcaccacattccagtgccaggccctggacttctgtctctatttgtgataaaatgtttttaagaaatgctggctgggcacggaggctcatgtctgtaatcccagcacttccagaggctgaggcaggtagatcccttgagcccaggacttcgagaccagcctgagcaacatggcgaagcctcatctctacaaaaaatacaaaagctagccaggcgtggtggcctctgtctgtagtcccagcttcttgagaggctgaggtgggaggatctcttgaacccgggaggcggaggttgcagtgagctgagatcgtgccactgcactccagcctgggcgacagagtgaaactctgtctcaggaaaaaaaaaaaaaaaaggaaaagaaataatcttctctcagtgagcatgttgaatgcataatgttctcactggagttctcctttggaatctcttgattattctgctgtggcttccttgggccaactaggatacagaggagaataaatgagtaactcagtgagacaggtggcctgatgtgagtgggcctgaaagttagcccctgatgtcctggctggtttcatgccatgtcctaaacgggcactttcctggtctctaggcatcaccatgttttgacaggaagcttagtttctttcaggatggaggatggaatcaattgtatttcaagaagcctgttttttatgccctgacaattttagaactgtggactgttctgacacttttgagtacagtgattaaatctctgtgaagggacaggtcatgaaatcaaataaaaggacggatcataattgagctggaagggggccctcctatctctgatttgactcgttgctacactttagtattcggaaactttgtattggttcccttaagtgcctgcacaacctccctatttctggaaaccattcagtgtttgttttaatgttaagcattatgccacgtatccagtaagcagagcagagtaaattcctccaggtagcaagagactggaatttcccccaggcagatcagcttttcacaggttcctagagtttacacagccttcttttgtgacttaatttttgtagatcacagtgagtcaagtgacttttacttccctgtataataactttgaggagcctacttgcaacccacatcatcactcattatcttgcttacttctttcttgggggttagatgggctggggttgttattaagcatgttaaatactttgaaattcaaatcgtttctgatagatttagtttctctttcttctattggtcattcgagagctggtagacttttaaaatacatttaatgactcacacatgtcataactcatccatttccttgacattttcaagcgtgataataaatcctacttcttaggcttttttttttttttttttctctctctcatgttcttttcaaatgcatggctaggtagttacctcatgaaggaaaacaactgttttggtccagattttaaaaattgagttgaatagaaaaggtggggtggaaccagcaatactgaaatgtaataatgtatattaagctccaaccaaacaatccagcacttcttcaaatccaggaggtcttctggctaggagttacattgcagaactaacatggactcttaaactttgtaaggaattagtcacagttgaacactggaaactatcagcatacctctgggcttcttttatatggtcttcctcatgagttaaaatgccttaagcatagtatctgttccataggaccttactgattatgcttttccacttgaataaaagagatattaagttgtaataaaactttaaatattttaatttagtttgaatatttaagttgaattaacctcttactacagtaattatcttttttgctaacttcttactacggtaattatctgcttttataaaatccagaaacgatgttatacacattagcacgcattattaggtgcccaaatgccaaggctaaggacacagcaatgctaaggacacagtgtgcctccggcctgcttgcaccctcggttgaaattatattagcaagagaagctcctgcattctgcagtatggcatttttctccagctaatgtatgcaggggtcatttttaaatgttagattcacagatttgcagagctgtgagttgccttggaaattatgctggccagttcctttaattttaaagatgaggaaagtgagaactttcctttttaaaaattgatacataatagttgtacctgtttatgggggtacatgtgatatcttgtacctgtttatgggggtacatgtgatatcttgttaacatgcatacagtgtgtaatgatcaaatcattacatactgaaatatttgaaatatctgtcactgcagacatttgtggcatctgtgtgttaagaacatcccaaatcttgtcttctggctgttttgaaatgtatagtaacttcttattaactgtcgtgctgaggacatggactactgtgctgttgaacactagaacttactccttcatctgaccgtattttcgtacccatttaccaaccctgagagctttacttttgcagtaatagagaatattctttttctctcttgagtatgaaataattatttttgaataatcactgcacgtgaagccctatccttcttgacgttggacatataaatacttagggagcttggtttatagagctttcagtttcacaaacagatgggacagctgaggtgaggcctgcctagcagaagaagccttactcctgatagcaggcactaagcaaggcattgggtgacagattgcttatgcacaggctgggagggacaggaactgtgtcatggaggggcaagactggaactagatgctgaaaagtgaccagatttgtctcagtgggccagtgggaggggcctcattgaaagactgaaggtagatgtgcctcccagggatgtggtggtcatattggctccaaattgccttgttcattattagcaggtttcagcaaattatttttcatgtgaaacgttgctgaagatttcttgggtgtggctgtcatcacaaacaattcctctcttttccatcaaatgtggagttggatgaattccttccttgctggcctgccttccacaaagctgctctctgaacacctgccaggccatgctgaggacaaggaaataccaaggcacagtttctgccatttaatggtggtagcagagacccaggaatgcaatggattattgtcactttcattataacatcatagtgtaggatcataactggaacagagaggatgaagctttcttttggggaattgagggagggagacagggtcttgctctgttgcccaggctggagtacggtggcgttaagatggctcactgccacctccacctcccaggctcaagtgatcctcccacctcagactcccaagtagctggaccacaggtacatgtcaacacacgcagctaattttttagtttttgtagagatgggggtcttactatgttgcccaggctggtctcaaacccctggcctcaagcagtcctcctgccttggcctcccaaagtgctgggtttacaggcatgagacactgtatccaactaagtaggctttatttatggagtttataaagaaactgtttatatatacaggggagaatttatcctgaagaaaaactaaagaaatgaatattttaaatacgtctctgcatttctttttgttggatatgacatttatgtaagaaaaatgctaatctgtatgatatgagacatgttaactacatatggtacatgtatttaaatatcatatgtatttagatttagcaacaaaaagggaaatataaaccatatttccaccatttgaacaaatcgtattcaattatatgtgcatataaccatttgaaaaaattataatgttgatcggatctgcaacctaaaccaagtgccaaattaaattcaggatagataatttcatataaaatgtttcacatcatagaaaaagcagtgaaaattgagtatcagatctgtgaaggatgatacatttctaaccttagaagcagaaaaggaaatcacagaagttggatagattcagccatataaaagtattaaatttctgaaccatgaaaaaaataactaaaatgagggaaacaccagatgtttttcttagtgattcatgtaagttctcatatgtatatcttttcagtgtctaattatgtgcatattttggccagtgggtttgtatctctgtagaaagttctagtaaatactggagaaatactgaggttcccccactccagctctttcactccattgcaaagtaggtcttgtaggtgaatcacacaaacggattaacaagaaagacagaaatgtccagctcccaggttcttcattatgctgttgtgttgtgccaatagaaaatacaatatatcaaattggagaacttgtggttgaaaataatatacgcagattgctggtggcagtattcatggatgtgactttggagtgatttttaaacacttaagtatttttaaatgataagaccaattataggtactaagagtcttgtgttttgaagtgttggagttaatccagataaagttacaaatctaagcagacaccttattaagagatcattattctctgcttttaaagtggacttgctttctatatagttatgaagaacagatagaaatgttttaagattactggctactattaaaataatctggtgactgcagttatatctgggtctaaggcattagactttttggaaaatggatgcttttaatctttccttccgtatatttgtcacccagaattttaaaatttggaaatttcattcattcagtccagatagagaattgatcaattggcaattttattatttttcgctcatgaaaaactctagggttacaagaatatgctcctgaagttaacatagttacttttaaaatgtctcaattctaatggttaggtattagtcctctgagttccggttgccccttaacttggatcttaatttacagtttacagaaaattgttcatatttcatattttaagatcatgtactctaaaaccctattatacttgaaatgaagacctgttatgttatactagaatctctcatgaaaatgtaacagttcccaaggaactttgtttctgtctccatggaccacactggctactgtactggatggagggcaaggcgggagctgagaggcctttgcagaagtgcatgtcgccttagtatgtggcagatcctggtccctggcctgtgctgtttccctccacaccctttgatttctccgaataccaggaaagatcatggattgtctcgggagttagtctcccccttagtacttagcctgtcattttcatgttgcaatgcctagaaaatgggaggtttttcttctccttaaggaagtgttatttcaagatgctttctgctgcctgtgtcatgccagggcgtgggtggatatatttttgcacttttgcaccagcgagtctgcttctgatttgcagattgcatttattataaggcgtattgtccattgatgaataatgtgtgggcattaaagcaaagctgatacatagcttttaaaatagctcatttatcctgcaagcttcacccccatagagaggcaggcccttcagaagcgttttccaggagcaaggtttctgcatgtttccctcagttttggaggtcgtcgttttttgcccctactgtgggggccaagggaaaattgctctgcgccttctgatggtcccctgaaaaatcaactgtcaaaagcccaattaataggagaaatgccatacaactttattaacgtgcatgcagattgattaccccaaccccccaatggggttcagaagcttctataccatcctgaggttataggaagaatggggctcagagcccgaccaaaaacagggtatggtggtcaatcaggttatggtggcaagaaagattcttggagggagagaagaggaggcctggctagcagaggtggccctgtcgtgtagatgaaacctcctaggtagcagccctcacagagaaggcagatgtttctttcagacctttaaagatgtcagactctcagtcaatcttccctagatctggacaagggagggccttagagaaagatggcctcccatcagtgcagtttcctccccaggtgcaaatctccccccacagacctgccctctgaacagccattcacagtgtatcaaagaggtatattttggggtgaaatatttttattcccttcacccctagtttatcatgtgtttccttgatgggctgagggcttgacagatgagcagatagacacaatcttagttcatggaaaaggcaagaatagagatgggtagcggagagtttttaagttgctgctgatgaaatagacactcctttgtctcagctactgaaaattttctttagaacgtggatttaaataaagaaagaaatagacatcatgctttgtaatgaagtcctttggtcatcgtaagtggtcacagccagtttatcctcaggcttctttaagctgaccagttaaggtttctgcagaggttctgtgtttgagggaggagaggaagtccttggggaggaggggagcgttctatgggagacagtgctcttgggagcattctttcaatctgatacccatgcaagggtgatgacaaggtatggccttcagtgactcagagcctcctcccttcccaagcctcaggcctgaaagtctggtgatcctccctggcagaaacctcactggggatcattttttccttttgaacaagtttcttactttgcctcatatgttccaatcttctgtcagtggccaggtgacatctgttggaatgctgatgtgtgttgccaagcaaaacagatgcaggaagacttgcccaaagtgggggaagagagggaggaaagggaggaaaagtgggaggtagagtgtgttagctggggagatgggatcgagcagtatttatctatagaacagatatcaaagattgggtaaatcatggcttaaaactctcagaaaagcattctaggttcttgcacatctttgcaaggctactgaatggctcatttttatttcccaccctgcattcagagtggtgtttaaatggctcaccgcagcaaaaaggattaggtattacccttgtgctcaacacaagtctgtggtcagcagatttttaactttatcctagtttattgatatttctgtcagtgaacaggtttaactcttaatggaatagaatctaccaagaataatgcagactggataaaaagaatttcactgattttgattatttagcacattaaaggggacccctggccagaagtagatgtattgcttgggagaggagggcatagtacccaggtggtacttcagggattctgattttcagtcagggttgagaaaaactgatttaagaagttaatgctactgacagcctaaatctgggtttccttgataacctttggtgtaaatactgatttaatgcatttttttttctcacccacttttccttcatcaccccaaatctatattgtgttcacatggttcctctttctagaggtgggagatgtccttttatggctcagaggtccacaaaataaacttgcattcaagcaaggttgtaaaatacctatgcattaagagcagtccagttgaatatttgcaaagcatatataaaagagcttctctcctaaaataactgaaatgaaaggattaattttctctcagtttcctactgcaagaagtaagtaaaagtggaattccaattctagccatggcaagaccggtctatcctgttatgtcttgtgtgccaataccacttttctccaggtaactaaagtatctccctgctgtaaatattaactgagtgcatttttgtggcttttgataactccacgtcttgaaagtgttggccagttgtcaaattttcatgaatttcagagaagtgggtaataggtggtttctctcacggtatttaaagcgaagtagtaaagaggaaaaagactgaaaaggtaacctgggtcaactcattttttagggcgcacagaagtgtggtagcggagcctggacatcaggtggcctgaagcccaaaccaccagctcccccagcacaggagagtgcaaactgtagctcagtcttggccatctggggtcttctgcaaatgaactgcccatagtctggccaataattcacactgttgtattgctgtctttcattctctcttaagtagagcgttctgaacatatctgaacaattttttgacacgctgttactctcctagccacaggttattttatgacctagtcattctttacataaataaacatttatcaacagtgctgtctgggcctagtaaggtatatagcctgctttgtttctgcattaaagttcttagaccgccatgatcttgagatgtttgctgcttattgtttctttctgatttctattgcttatcagttactactacttgtggctccaaggatagaggccgattccctcttctaatttgctgcctctcatctgcttgaagtttaggtgtttagtcaagctcactagcattgtttataaaggaagaataaataggttgagagtgaggacttagggtagttacctttttaataatgtatatgatctgtctttggtctttctccctcatatctctgctgattttactctcgtcctcctggaacgtctctggaatcagatagatttttgtaagatttggatgtaagaattcagtggaataatatatactagctgtttagcctagtgctcggcacatattaatgcttaataaatattagctcttattattattgtttttttccctgaaagagaaaatcttaattcctcacagatgtttaggaattggatatgtagcaaccctatccactgaattagtatcagcaaacacatttttagttcatcttgatttttatcttcattgggattatgcctttatccctttagggttaatgaatttcctactgtgctgttatggaagaaccctgaaaaaaaaatcaataaaatgtatccttaaaaaagattttatgattcacttgactaccaggtgtcagcaacttttatttttattactttaagttagaaggactttgaaggttttcgtggtttattctcttcttttttaaaggccaaaccaagatcactttttggtaatggctacctttcctctgaatgtatttctcaaaaagttctttctggtttttattaaacccaaacagttgttataatttaaaagttacccttttagagtgagattagctagaaaagaaattaaggattattttaagtaactcagcaagtaaccttttccaagaagcttagattataaattaacgaaaaccaaattataaaccaaggtgtatggttgattgtgggttaagaattttatcagcagttttgctgttgtatgtaccagtcgtatattttactactgagtagaagaaaagtctaaaaatcaagtgagtagtttttccttagctggttatcatgtttgtttgatcattatattaaagtgctccttttatttttcgttttgtatgttttcccaacttaataatgaatgtgcttctctctaatctaatctctgaatttcaggagtctattaataaagtatgtgtaaagaattagttgctaattttggatgtggctgaaatgagattgtcagcaaattacaacttcaagcctaggactgcagtgttatggattgcacctcatccttggttattgaagatatattcaaaatttatgaaaaatagaaaaaccttattacttctgaatttttccacgttagactttccttatacttttaagatagtgaaagtgttattatataagatcatggaaagtttgtctttccagacctattttatgttaggattttacaatattaaattcataagataatagtagagactagaaaacaaatccttactgataatgaatttcctaagtagtaaatacaaatgaatatttatttgtaaacctgggtgattaagtaatagctgttcagtgatattgatggaaggaaattaatattatttaatccaaaggccaggcgtagtgactcacacctgtaatcccagcgctttgagaggccgaggcagatagatcgtttaagctcaggaattcaagaccagtctgggcaacatggcaaaaccttgtctctccaaaaaaatgcacaaattggccggtatgtgcctgtagtcccagctattcgggaggtaggaggtaggaggatcacctgagcttggggaaactgaggctgctgtgagctgtgattacaccactatactccagcctgggtgacagagcgagaccctgtctcaaagaaaaaaaaaaaaaattaatcccgaccttcctccaaaaaagaataaattaagtccagaaagtttggtgattcacttgctgttgccgcctttataaacataaaagtcagtaaggctaagggacacttctgaattccttctgctgtccaggtactgtgccgagttctagagatgcaagtagtacataagacagatgtggcccctgcccttgtggagactgcagaccatggctctttttcatgaatggtagagacactcataagtcaaatacctacatattttcatgaatgtgccaaaggaggcaaacaggaagctgagacaggaaatcatggggaggcctacttgaagagaggtaaggaaacccccaactcaggagtggcctgtaagctgaggcctgggaaggacccctgtgggcatggccagtggaactgcagcggaagcagccgttcgcccaaaggtcctgcgctgggaagagagtcagagatgctggaggatcagaaagggatcatccaagtgagtggaggagacagtggtccaggatgagcttaggggaaaacaggggcccctggattgttcacgctgtagaacacagtcatgcatctgatatataaatagcatggagataccctcagtagatgcaaaactcaaatgagctcagctgctctgaagcctgggaaaagtcagcaatttgtaaaattatgacacatccacattttcacaggaaaaacaaagactagtatgtaacatctcctttggtatttacagaggatctctctctctctcgttgttactcttacaaatgataggaggccacttttgttttccaaattctgtgccagatatcttgcctttcctgagatatagacacggtagagtcaggagtgtgtgtgagggcttgcagacttctttttatgtctttagaatccttcttcacttttgaatcatttggtccaggagtttaaggccttttcatttggcttttgttgttcatttgttgaacataaataactgtgttcattatgcagacaccgtgtcattgttgacaatttggtgttgtagattaaggcaacgtgaccatgtaacaagttgggcaaatgcacttatccattcagtgagctctaacctacaaggtgttttgcttcagaccaaaatggtagactgcagaaccttcggcgcggattttaagtccatctttaaaaccataggtagagattgtatctgtgtgttcttctttaattaaaaatgggaaaatgatgcgacagagcaaagacggccatggatcctttttatccctctcccatccacacagagagtttatttcccctcccctggagtccaggctggccttggggttgccctgaagtgatgccgggccctttctacacgtagcctttcaaaggaccggcagcttccacttcctgccttttggaaaagcttgctttagggatccagctgccacctaaaggccctgaagtgagccacgtagagagaagttccagctttctagcccatctccaagtgtcaggcaggtgagtgaagccatcttggatgctccagcccatcaccatccaactatagtcacataagaggccactgatgggcccagtccgtctccacactcctgagagttagtaagtggctgtcgtgttgggctctgaagttgtagactagtttgttagtgacgtataaccaaaagagagagtgtacttaacatttagtcctgggaggttcgaactttgcctccgcctgtacgtgagctccctggagtgtgggatgaaggagtgcttggcccagttgttttcccggaagctggaggagggcagccatgcacaggttgtgtagaccaaacagttcagggatgcacttggcttagacagctgataaacagctgcagtgcccccaagggagttgaaagagtgggtattttgttgtcaggagtagaattattcaccttgaagaacagaagatttgtagtttaaggaaattcaccatattcttaaaagttgcagaaagagaagagttcttagcctaggcctgcaccaagatccagttcttttgaatctgatttaataggcagatgatgaaggacttattcccaataataaagaatagttcaataggaggttggtagtcttaattgtcttccttgtcaaatcctagtgaatttcacatcagatactgtgccctgtgaggctctatcaccttagcacttggtaatacgttttttatgtagtaggtgctcaataaatgggttgagtttctataataatttgatttctgtagcatctgatttaactaagtttgctataaaacgaaatctgctattgtattcaacatcacaataagcagtatcagttgtaaatcatacctacatacagttaacccttgaacaaagtggaggttggggtgtcagcatcttaacacatagttgaaaatcttttgactcccccacaatttaactagtaatagcctactgttgacagaagccttactgataacttaaacagttgattagcatatatattttatgttataaaaattaaatactgtgttctcataattaaactagagaaaacgttaaaaatcataagagaaaatatatttgctatttattaagtggaaatggatcattgtaaagtctacatcctcactgtcctcacattgagtaagctgaggaggaagaggaggggttggtcttgctgtcacaggtgacagaggtagaaaatccttgtataataagtgagctcatgcagctcaaacccatcttgttcaagggtcaactgtacttgaatggatttttttccctgtcataattaaccacccacacacatcttactagaccaaaaaagaaaacttgtcaagcaaataatctcccatttcttgggtcatttggagagataacacaggccaggttatatgtcctgaaagatgagaatgtgtgaagtccccagagagtctgatacgaggccttcttccagggagtagtggtctggccgctgcaccagcctgccccctgccatgccctgactcacctgcacatcatgggtgctgctgatgcccaggcttcatggctgagcatggcacccttagcacccctcacctgttacccaacggagatttgtgggtcggaggcatttcaattggagaaggatggaatggctgagggcaggaaaacttaacaagcaggaagtctgcaccctggctgcacatgagaatcccctatgggcattgaaagtagggggagcattgaaggtagggggagcattgaaggtagggagcagtcaggtcccatttcctaagcggctctgcaggcctctaagcttgtcagtcatctttttggtgctgtgtggactagtgccagcaggaacaactggatagttttaagtctttggcctcttctgacactttttaaaccaaacattttattaaattctcattcaagttaatagcaaaaaaatattactactggtttcatgtttaggtctcatttgcagtttttaaaacaacctaacggagtatagtaaatacataaagtactcgatttaatgtgcattttctttttcgttttttttttttttttttgggtggggaggggggtggttttctgagacggagtctcactctgttgcccaggctggagctatctcagctcactgcaagctctgcctcccaggttcaagtgattctcctgcctcagcctcctgagtagctgggaatacaggcacatgccaccacacctagctaatttttgtatttttggtagagatgagttttcgccatgttggccaggctggtcttgaactcctgacctcgggtaatctgcccacctcggcctttcaaagtgctggaattacaggcgtgagccaccgtgcccagccctagtgttcattttctgacaagttctatgaaacctggtgacttaacttttctgaatctgtttccctatttgtaaaatgacaatacttgcagtagagtttatgtaaggaattaatgagggtaactttaagatctttgtaaatgctaatgtgttttacaattgtggtcagctataataataataataatattattattattattattaataaaatgcttactaggcgaagttaatagctcccacccattcccaaactacttaaggaggattttaagctggaaacagttaaggaaagccgcatgatgccatgagcaaagccttccatctgcacttggcatattgcagggtctgtagttgctggaatgcctatgtccctggttacgagccttgatataattgtgctaaggcattttggtggagtggaccgtgtcctgctgttgatcaaacatttctgtgtggagagactttgtttttcccttggggagtatttattttttagtgccaggctccgggttggctgtgctacgcttggcttttcagtgccaggcatacaaccatgtcagaagggggactgcatggtaggtctcaggaagaagggccgaggaagaggagaaaagggacttggctgtggacggggaatcctgtgtatcttggcttctctgagccagctgtgcctcagaactttgatttgatctttgtaccccatgggtcctgccaggtgaggggcacaatggagaagagaaaaaaaaaaatgctctgctgaaaacataagcaacaaataaaatagaggatagtaatcctaggataatccccgaggcagcagagaaaggcaggctctggcttgcatgtcaggagctctcttcctgggggcaggagggagggtggtatagtcccagatgagtgcttggcaggttgtttagagcctggtagcagtgaaaagaaatgtctaccaggcatcttgtgcatgtggtagatcttgacttgtaattgtggcagtctcccctaggctcctcggcagctaggtgacagttgcctgctagttcatgggtcaccttctcaccctctggcttgcttctcagtgggtgtaaatggggtaattaaaacctgtggttttagactttgctccaaagactgtttctggggttctgcagacattgacctgaaatttatttttattatttttaacgtttaccacctgtgaagatactgtacatttaaagatataaaatgtatcatattaaaataaaatagcctgtatgttttacattttgagattctgtttatgctgtttttttaaaaagttagaaatgtattggcatgttctgatagcttatttttaactacttctccattgttgtaatatcataacaggttggactggctaggctatggtcagaaattgcttatcagtgttttatacatacccaagggattccaacacagggtgtccatggtcctctttgagaaaactttgtctaaaagatattgaatgatgcctcattaaaaactcctcagaaatattttctcctggcttgttttcgccttccgtgtcattgtttgagaaatatccaagattccttcttttttacaattaaaaaaaaaaattgaagcaagtccataatcccatgtagttctttgatagaattaaacttcagataggcataagaaattcagataggctttctctccactggaaatgcatgcctttcgcaatcaacagtgtatgatgtggtctgttctggagttggggtctgacccttcagcatggccagcgctatctgaagatcagaaaccctggaagccccttgtctctttttcatcttccacatctgtctggcgtccaggccctgcccctcctgcctcttcactgccactgctgtggccagcctcttattcagaggagtttcctacctggttagacacttaaccacctccagacggaccccttctaatccacgtcccacattatagctcaaaagtatggattttacagatcttatcctctcctgttctgccaaaaccccatacggtcctccattaccaatcaggtgaatcgacttgcatttcccagcgtgtccccacacccacaaacactccatgacactgggcccgtccctgcctttattccctgtggcccctgtgtgcaggagccttccctcccctttctatcagtccctcatgtacaggccttcagccccctcactctgccctgttcctacctccatcattgtgccatttatgtttgcatgtctgtcttctctgtcatatctatctcaaactaggttgaaaattttttgaagatggagattttcagaataaaattgttcacacagttatatatttgactgattatacttttatttttatttatttattttttttgggatagagtctcactctgtcacccaggctggagtgcagtggtgcagtctcagctcactgccacctctgcctcccaggttcaagtgattctcctgcctcagcctcccaagtagccgggattataggcatgtgccaccacatccagctaatttttttttttttattatagtagagatggggttttgctgtgttggccaggctggtctcaaacgcctggcctcaagtgatccgcccaccttggcctcccaaagtgctgggattacaggcatgatccaccatgcctggccgattatacttttttaatgtgttagttaagatgagagagtccaaagtgatacagcccctgcccccacagagcttccagtctagtgagagaggcaggtaccaaaaagataatgcacatgacagaatggactgaactaagtagtagtagaagttcaaacgaagaagaagacacaaatggataaaagctatggattctcaggattgaggatgctgaaaggctgcacaggatgaaaggtgcgaccaagggtcctgaaaaaggcataggatttatacttgcaaaggagggcatttccagcaagaaggcttggaaatgagaaaatctcgggagaataggcccatgttagaaattcggtacacgattgagaggaaaagaagtgccactggggaagtgtgttgaagcaggtatgtggatgttcttccctatgcagtggtgtcagtaggattttttgttggtgtgagatctgggatctgtttgtaagccgtctgagagctgggactttgcattgatcaactttttgttgcacatgctctgtgatgtaattggcactgcatgatttgacaagaatgtgttttatgctctaaatcaggagtgagcaaactttctgtaaaaggccagatagtaaatattgtggcctctatttagtccattctgaatgtacattagacacaagtttctaaagtacattcacaaataagcattatacacttagttgtaacatacacggatgttgagcagagaaaaagctctctgatttttgtggttcctgctctaagccaggctaagtggtgttgtcagggttccaaccccttccatccctgaagcacactcagcaaaccatctagtttataagccacagtgtgctagtaggtgctgtgtgtatttttttgcggggggaggaggtatttattttgtttttgagatggggtctcactgtgtttcccgggctggtctcaaactcctgggctcaagtgatccttctgcctcggcctcctgagcagccactgcacgtggctgcatcgcttttaaaggtagatgatgcctctggcctttctcattgcctctgggtgtgtggcccatgtcactgtccagcgcattccactgtccagcccattccactgtctggccccatgccactgtccagcccatgccactatctgtgtgttccgtgccactgtccatctgtgtagggaagagagcaccaggggctggcctggtcaggagagctttctgggcaggggttgagggaggcacatgtgagctggactttgaataaaaagaaaggaaagccaaggagcagaccgggcgaggctgggtgcgaagaccagatgtggcagggatttaggaggcagagcgagcacaagtctgtgcatattggtaggttctgtagacttgtcggttgtgcagtggattcatggagcctgtcgaggaagctacctgtgtgcttccactaggaaagcacagccacagagagaagatgaggggcagggaagcagtattgtggggaattcggagtgagggctgaatctgagaaatattattttaaaattatgttaaatacattattttttgctgtctccaaccatcattactatgttcactgtagaaaaattaagaaagtcagtatggcatatagtcccataaccaagaaattcattcattgtgacctatttgagggtcatttaaaaatgactgatgtaatttggtaaaagattaatcaacaaaatgacttatttcataattaattactttccactaatgtgacatttctcaaactctgcagtatttccttttcttcttttcttttctttttttgtttcctgagacaaatctcactctgttgcccaggctggagtgcagtggcatgcaatcatggctcactgcagccttgaactcctgggctcaagcgatcctcccgcctcagcctcctgagtagcttggactacaggcatgcaccaccatacccagctaatcttttatttttttgtagagaaggtgtctcactatgttgcccaagcagatcttgaactcctgagctcaagcaatcatcctgccctggcctcccaaactgctgggattacaagtgtaagctgctgtaagctgctgtgcccagcctatattttcaagtctctctccttttttttttttttaaactggaaaggatagctgtgatggaaatggaagacttccaacagaataccttagttagcataactgtgtagtacaagatgtaaaaacctgttgaagtgggtggccttttgttatcattctgtctttctgcccaccctgtggcacagttctcaccatattttctgtcaactgctaccacatggtccccttctttatgttataaagtctcttaattattaggtaattattcattgtcctagctctccatgcttaccaaacaatattaacaagagcacggtattacaaatgagtcaataacaacttccctaaccttatggcagctgttttggaggaaaaagaaaaaagaaaaaaaaactgcctttttttttcttaatgcgttacaattggttgatcagaacagttttaaaactataaaatgttggctgggcgcggtggctcacacctgtgatcccagcactttgggaagccgagacgggcggatcacgaggtcaggagatcgagaccgtcctggctaacattgtggaagcccatctctactaaaaatacaaaaaattggccgggcgtggtggcagtcacctgtagtcccagctactcgggaggctgaggcaggagaatggcatgaacccgggaggcggagcttgcagtgagccgagatcgcgccactgcactccagcctgggcgacagagtgagactccgtctcacaaaaaaaaaaagcaaacaaaataactataaaatgtttaataaacatattttaaattaaaaggtaaggttgtatctagttatttatacagctatttttaaaagtcaggttggcaaaggtctctctgagtttcacaaaatatccgcgtgagtggtgcatagtttgtgctggcttatttccatttgttcgttgtgtttatggtaaccagtagcattttctaatttggttaaaatgctgtcattagctggtaaatgcagtcctgtcacctcagaggaggaccaagaaggagctctttctagaaagggagggatcgaattactcctcatcctcatatctacttatctatctgattttaagacaccactgaaatttatactgcgagcaatttaaatgaatgcagtaattgattgcaaaacatgtttgtaatatcagtgactgaaattaaataaaagataagtcagtactttttggatcaatccagttgatctaaaaataaaaagtagacatccactgaatggttgggtaaatgaacgaatgaattttggcttatgtcagtgaattggcctgactgggccttgatctacatagcttctcttgacattttgttgcccaaattgagtttgagtgtttttagtaggcagggtaaattagcggtatggatgggtataacattctacatttagttttgctactgtatatgagctcatgaaatggacttcccttccctaataatatagaaaaaagaaaaacctaaggaaatatagagaacacattcaatttgggaaattcccgtctgtatcagtcaaggataggctagatcatgttgatcatgctgcgtaacaaaccacatctcagtgaattaacccacaaagggggattttcttgctcacaatacacaatctgtgtcagcaggagagcagaattatctgtcgtcaccaagagtccccaggatgatgacggctaatcccattgtgccttcaccatcactgccataggtgaaaggaacgtgataaattgcacactgccttatttatttatttatttatttatttatttatttatttatttagagactgtgtctcgctctgtcgcccaggctggagcgcagtggtgcgatctcagctcactgcaacctccacttcccgggttcaagcgattctcctgccttagcctcctgagtagctgggattacaggtgcacgccaccacacctggctaatttctgtatttttagtagagacggggtttcaccatgttggtcaggctggtctcaaactcctgacctcaggtgatccacccgcctcggcctcccaaagtgctgggattacaggcgtgagccaccatgcccagcccatacactgcccttttaaagcctgtgttcgaaagtggcacacatcactgccgctcatattttactggccaaagcaagtcacgtggccatgccatttcagattgggaagtacatttttaccattgcccagaggaggagagagatatgcaatatttgagaatagccctaaagactacaatactatcccttagtccacctaaatgatcctgaggctttggggcaattaaaaaatccttactcttaaaaaatgtcaggcagtaagtcttgaagccagctgctggtgctacacaacatacccttgtcttgtgaggaatcccttttgaaaaggtaacttacctcgtcacttcattattgctcattgctacaggttgaattgtgtccccccaaaaagatatgaaatcctatcagtacctctttgaaaatagggtcttatttgaaaatagggtctttgcagaccctcttgcagatggagtcaagttaagatgaggccatgaatgtggaccctaatctgactggtagccttataaaaaagggaaaatttaggctcagaaacagacatgcacactgggagaatgccatggaaagatgaaggcagagatcaggtgatgcttctacaaggcagggaactccaaagattgctagcaagcctccagaaagcaggggagaccatggaatctccctcagccttcagaaggaaccaccctgcccatatcttgatcttggacttccagcctccagaacttttaaaccatcaatttccattgtttaagctactcaagtttgtggtactttgttacagcagttttagcaaactaatatgctaatcaatatatatttttatcatcttctttggacctagcaaggagaaccacttgggaaattgaaacaaggaccctctcgggaaagtttggtgaaatcctggccaacatgatgtctaatgctgattgcagtgaaattgagtactgttgttgatttttttttcctcaaagtagcttttggaagtgaagagtaaaatgtgttagtgggaactcagtattagcaagaagagaaataagggactatgctagcaaaatgaataatctgtctttattatactgtcacaggtggttatcaagatacagtttttgtgagacaaaaagctttgtggggctggagttgcttttgatggtggtggcagagggagagttatacgaatagaagtaacttctggtagtgtcttcgttgcatgtgggtacacccagtcttatgggcaagctgattttatataatcttgttcttttcagtaaattttgtatatcaaatatttaatcttacttctttgaaaaactttttagataagtgatgtttgcaaattgaagcatattgaaccatatatctggatattttgtttgattataaacccatttttacaccatggccatagagaatggtgccgtgggcactatcaggagtgatgtcattaaccccacagggctatgtggaaagcgtgtggctgggactgctgtgtggttgggacaaggcagtggtgcacatgggccagctcctgtaactttcctgtttgtggctctcatggggcactcctgctcctgctctccccgtcctcatccatgatacatactctctctcatctacgtgctcataaatttcagcagcaagaactgcatgatttttaaaattctgagtagatgcttccagcaaaggatttcctaactgatcactgccagagaagaagaggtgctaaatagttgccaagttacatgctttttttcccaaatgaagtacttcccctgctactgcttgtaaagccctgattgtgtgtgtgcgcagaacccacatctggtgctggaagcctaaggactagtgagtggtcatgtggtttatggcccctataaaaggacccattctaaaagtctccaagaagctaactccacaatgagatgatgtgtgtgtgggtgtgtgtgtgtgtgtgtttgagatagggtcttgctctgtcacccaggctggagtgcagtggtgtgatctcggctcactgcaacctccacctcccaggttcaagcaattttcctgccttagcctccccagtagcttggattacaggcatgtgctaccatacagaattcagattcctctcctacccctagcctgatgccctttcattagctatacaaaggtggttgagtttcaggttaggcttattatcgtttaaactataaactaaatattcaccaaagctagcccagcctaagcccaggaataatcaaggcagcttgaaacctaaaagcaagaggaggctgggttagatcagctcactgtataatttttgcaaaggcggttttattgaaacctgttcttttttgaaagctggctctttctaacattcaaatgcttttgatcaacctattttatggaagcagaatattgaaattaaagtaaatattagatgaactttatagccagttgttttcctcattcttcaactctttaccctacaaatcttatttaaacaacatgttcagcaagctgttatcttgcttacgcaatgaatagaacattatgttctaaggtacagtttgctcacctatgaaaagaatttaacctcttttctaagtagctatacacaattgtcataccttaagttcttatttagatgcatttcagaatattagagcattttgcaagtagatgcacgttcttacccagtgtcagtgtttatagacagacactcaccatgggtatatttaagtctagggtggtaaagaatataaatgtcatttattaaaacctgaacatagccaactatgaattatttgtgttaatgtaaacgtcgaatgagcactgcaaacatttgatgtttgaatatttgcctgtagaagtgcagtactatgttctatagaatataagtagatgccaccccagtcctcaaggtttcagtgaggtcatcattgtatcaataaaggtgccaatttaagatgctaactggacattggaaaaaatttgttgtcctattctgaaggatgagtcttatataaagtgtttttaaaatactttattgaaactgccatgttcttttcaattttggtagctcccctgcatttaatttagtcataagcgtctgtattaatgggtgtgttcaatatgaaggcatcctgtgaagacaataaattatattatacttatctagtctgcactctttatcatgttgataaaatggcccttaccagtaaaaaaactgtttcagaatgtgtaagagtaagtctgtctcagctgactgagggcttcatcatgttcatgataatcccagcagcttgaaatgtcaaactggtagctgatccatagcacacagtagtgctaattgagataggttggtgtggataattgaatttaattgaatattaaacaccagtaagtgctatgctagatgttgggaccacagtgatgaagatgacattatcctgacccgggaggcgctccttatgtgcataaactgcatttggaaattttcatgatttgagagtcatctatggttgccagtagagattttcccagaaggccaaggatatatggggacatttgactgttctttgaccataattatataactttttatttgcccagaatgaacaactgcagggtaacatttatacaaaaggaatttagtgtgcttagagtgctgataatacttgagaaactaggagagctgttttaaagcacttctttttcttttttttttttttgtttttttctgggctgttagaatttgacattgttcaactttaactttgtcctcattgaactttatcctgctaaggagctaaaaggtccatatgatcaaaaaggcagctctcaacccagcacgaaattccaggctcattcatttctgtttacctactgccaaataagtcagacaactgcatacttgctttacagacgaatagaggacagcatgttgttcaataattgtagtttaaaaagtatatgtaagatacatccacaagaagaaagatagagggagcataccgtttgtcttctagtataggctccctgcccatggagatcacagagtagaattatgatgggtgccttagagaccagcctccctcaggatcatgagttcacctcggcaccacagctctgggcaacgtggaattagacaaattaaagtagttaagttctgacttcatagaacagaatctaaacttttgttcatactgcttttgtgttcttgggccatctgaaaaccttttctgtgtaaatattcctgcaatatgcggtcttacagaggtcttatcacgcatatttccctttgcttccttatgtatcgtattttttcaagaagaagacattcaactttagagacaatggaatcattgtgttgtggctttaattcaggtcattgtccttttgtgagttgcacgtgtgcgcgagcctgtgtgttttgcttggaggaatagtgaataagcaaggagcagagtccatttgctttttctaacagagggtggggcagattctctcacaaccattaaagaaaaaaataagataccagcaataatgataatcagtcatgcatatgtaatcgtgtgtagttcatacttcagattcatatacagctgagcatgatcttgaatgttacaggaagcaagcttgaaagtcaagttacagtagaactttgctaattcatgcctgactaatttgcccacccagtagttcctactgaaatcttgccattcctctaccaactttcagaaaaatttgatagcaggctgtggagaaggctcatgttacttcttatgtcaaggtgtaaacaaaaaagagagcacaaaatacatccatcagaccacatgaagtgaagagagagaaaacatctgctgaaagccggattctctgtttttttcctgctttttaaatgtaatctgtctttgtttatgcatgccctagaaacatgcataagtaaccctgagtagtctcttagtttaagaaaacctactataaaatttcttgttgtaaaataaaattctaaaaggaataagttgtggacatataagtatcagacagtttatgtaagactttacataggatgcaaggtaggctgtaatatgatttggtaattgttttatgggggaattttgttttgtatagcgaaaaagaacagtgagtgatttaactgaattttatagtttaatattgttgttgttttaactaaaatctttggtttgctattgcaaaatgaaagagaaaggaaattttggttaatgttaactttatttccaaaaccatgtgatggatgctgaccaaatgtgtctcaatagtgccattgaggtctgttgcctttttttttctttgaggtgctaagtgaaatgtgttttgaaccttgaatgttcactatgcgacgttctttgcattacaggtagatactgcaaacttgcttcaaaaaaactaaaaagttcaaataactaatggttcatatttgttccagttagtaaatatcacgacaaggtatcatcgtcatcccatgttctcagtatagattcagcttcatttcttacaccacacacccagaggcataaatggaagtacacagacaaaaggaaaggcctgagtttaaatgtagttatcatgttcagtgttcgacattttattctgagaatttaagtgtttctactgcagtaccacaaagtcaatctgcatattactttaactagatcacttgtaaaaataaatgaataaatgaccagtgatggttcagtgacaagagtgccagatgagtcatgaatgttttcacaagtaaatttgatagtaaactgctaagtttactgtatacgctgtgtacaaattagctcagattcaagatttttgctctaacaactgaacgctcagttgcatctttaaactttttgttgcgtgagaggggctgaggggcaggtgggaggaagtcagcctgcaggtgggaggtttctgtctcaggattgctgatacccctgcatgctgctgggttgcagccttggagtatatggcctatgagacatggcatgtctgatttgatggaaaaagcagcggagaaccagtgaaccaagctattccgtgtattgactttttaatacgtttactacaagaatctgccttttaaagtacttttaaataaggttataaacataagtgtgttttggacacagcctgcagcaagcatgcctctcgaggtgtaagatgagtcagctacacatgctcaggggcccgttccaccagccacagtagctgcagagggtgagagcaactgaagcaagagaagctcttagtaattaggggaaggaagcctccacttgacaccgcatcaccaccaagtatttattgagtgtctttggtgtgcaaggcaggagaatatcttctatggattctacatatttcagggttaccagagttataaaatcccttgaaatctatatgcacaaattgtaaatacgtatgcagctttttataagtgttcaaattctgccttaattgtgctcaaggatcagggtctcaccccagcattgtataccattgatagtcatgatttccttagtgaaattaagtaaattgactttcagagactttatttcatattcatcatgtccccatgtagccatgaaaaaatgatatgtttaatattcatctatttgtatgattaaaacaaaatatccgcaactactgacgattcaatgatcagatattttactgtaaattaatatcatcataaactcctagacattagacttcagacattcagagcccactcgatgcttggcacaaagcaggcaccaaatacatatttatagaatgaatgaacaaatgaaggaagaaacaaagaaatgactaatgcaccaaccatttatcaggaagtttaacagggaaattcaacaaccagatttgttttgctaatcttattaaagtgcaacatgtttgttgtaaaaatagatccacattcgtcattgaactggacagtctaaaatagatccaaacccattgtttgattatacttcacaaatgtaaggtaaaatagatgatactatctgtcatttgcttgatgctattggcaaatgtgaagcagttaccagcataaaagcttggaggttactccgaatgtatataaacaacagtggctaggctcacaagtgggagagagtctaaaaataggtaggcgatcccttatctcgttgcattgaaaattgtgtttatatgaagtgatattattagaaatgatgtgtgagaaaagaatttctgcaatgtctcctacaaattagagtgagaaaatgtatctttatgcagctttgaacaaaggattattattgctggactgtggaccaaaattttagtcaagttttttttttttaatgaaaagaaactgttcatttatgcagacatacaactttgtgtcctatagagacttgtcatctgctcttaaagttagcaccctatttttcctctggatgtccactgagaaacccactggtgtgatggtcattgaaaaagagagttgtgtcagaatgccctaaaatcttagtggcttaacacattcccaagtttatttctcattcacactacccgtcaacataggttggcaggcattcggatccacagggtcacacagagaaccaggccgaccgacccacatggtcacacagagagagaaccaggccgaccgacccacatggtcacacagagaaccaggccgaccggcccacatggtcacacagagaaccaggccgaccgacccacgtggtcacacagagaaccaggccgaccagcccacatggtcacacagagaaccaggccgaccaacccacatggtcacacagagaaccaggccgaccgacccacatggtcacacagaaaaccgggctgactgaagtttgcactggagcttttcacagcccccactcagaggtgagataggtcaccttttctcattagccaaaactggtaagatggccttccctgaccacaaggatgctggaaagtgtagtcatcttttctctgtgcctggagaggagagagaagtgaaaattggtaagcaatatttctattttaaaagtggttagagtgtagtgcaatgaatctagcaccattggttcagttttaaatggactgattccatttgtctaattctgtgtcagttggctgttttctgacccctgagaataatttagtctggctgattcccccattgtaccaattgcctggcatatgacaaatgcatttttgcctgtaagacaatctttgcctaggaaagacagccctaatttttatgtcttgtattttccagtaagctaatctggagtatcagtttttaagactgatacacaattagatgaaactaattaaggacaaaacatttgccacttttaactgttgataagtgaaactgagatttccccccaccccatggatacagtgaacatttgtcagcagctggtaatggctagtataaagatgtattcagttttcccttcccttcctctccctccagccttccagccacccccttcccaaacatttatgctcatttagagaaaagcaaccccagttctcttacctgggatatcaccagtataaaaagcacattcgtataaattatctggcctttaattacctgtaaccctgtaggaaaccccctgggaaaagtaccacaaaagaacgcagctctgggggtctgtgagaggcacccagttcacacccctaaaggacagagcgagcactcaaacgcacagctttgggtgccctctgaggcgtgcactggctggtagcagtgggtatcaaccatggaagttcacggaagattaaaccgcaagttcccacgcaaggccaagtggctgccaggacttggaggcactgaccctgagtggtccttccacctcagcgtatactgtcactgctgcctctgtggcttcccctttccctccaagtagagatagatgtctcgaggtgctccccaccccagccaggttgtcctctcctgggtggcattttcctttctactctctggggctttcaccaccccactgggcataactctccacaggctcccctgggaggggtgcccccacctcacccgccacctcacttctcagcccctcttcccatccaagggctccctgggctgcccccaccctagtcatgatctcgctcctctactctctcgtagtactttatttttaccttgctcctggctcacattacatgcttatcttgtatttatagatggttctatatatgtctccttttgcatccttttctcaaagctcctgtgaggccagggatggttttatgccttttctcatccccttatgttctagtataatgctttacacatgattaaattctcatcagatgttgaatgaatgagcttattatgcattacttcttagtacaaagaaatatttggaacgtaagctctgaaatgttgatattctgtggatgcttggattacatacaatgtcctaaataaacacttgcctgttaagtagaagtcagtctggaaagtgatacctttagatccataaaatgtttataaggcacatgaatggacaaccacgttgttttttgctcttttatatgtttaggttactgacagcccaaaatacattagcttgtctttgggctaggaggtacctaaagttgtatttttctctcatgtcattttcctgggtttttatcatatccaacttcgtaatgtccaggaatttgagattaattcctcaaacttgtcgaataatacaagaggaaacttgtataatacagagcaaacttggttggtgagtagctgctagagcaaacttggttggtgagtagctgctacagcccatacatggatttgtttcttcaggtggggggataattgtatccatggactcttcttcattaactgacggatcaaattattttatgaagctatgatgagaaatggcttgtgctcttgggaaaatcaatgccaatgtaggtaatgcaccagtctagctggtttttaatttaaagaacaaattatcttctggaatagtaataaatccccctttggaacagcaagaagacatcagctgttggatatgggataattaccatatgtttcaatgtcgtaaaaaggcacagcaattttaataacccaggttgtgtacaagaaagctcttgcttctgaagaatccatcaaccatgcgctatgatcatgtaataataaactgctgtttacttaatgctgtttttatttaaagttttaattaacataacctagtctttgcaaaacatctgattacctttgactcatatgttttctggtatataataatgggttctcatgagttgtttattttataagatctcctgtttactcagagtaaggaaaattttttttgaggtaaggtcttgctcaggctggaatgagtggtgcagtctcaactcactgcagcctctacctcctgggctcaagcaatcctcccacctcagcttcccaagtagctgggaccacaggcacatgccaccatgcctgactaattattgtattttttgtagagatggattctcactctgttgcccaggctgatctcgaactcctgggctcaagtgatccttccaccttggcttcccaaagttctgggattacagtcatgaaccaccatgtccaaccaggaaattttggtattaggaagtttcccacataccatttgtctttggtgccatgaacacctattttgtctaatttttataccaacctttcactttggcacatgggaaatctgataaggaatcgatatcacggaaatacacatcacactttctgcttgccgctttcttccaaaataaacccaaggattccccttttccaccaccaccttaatttagataaccaagataaatgagaaggttttcgcacttgatggtgggatttcttatcaaggctattgaatttggtttggcactgactaattttggtatccatgtgtttttagagtaagttgtagctagggtggtggggtgatggggagactctcactgaatggctctaaattcagtattttattctttaaccaagcagctgttcacacacatttcttaggaagtggctaaataaaaatatggcagccctggaatgaacagaaactgttgctctttcaaaaaccagcagctacaaatagtgatttttcttccacaaatacttgtttttctgtgacattctcattggttttattcagttaaactcccagaccatgttgatttttttttgccttttattttttgagctcataggtaaaaggagttgaagtgattttattttctgtttttgtcttttttttttaagtttttgtagagacaggggtcttgctatgttgcccaggctggtcttgaactcccgggcctcaggcaatcctcctgcctcagcctcccaaagtgtacccagtctcaagtttttttcacattatatatttgtgttctttctgtttttaactaatggtctccattatttaggctatattaaaataacaataaaaacagagcagatacaacagaattcatttggttggccattggagctgtttttcctttttctttttaaactgactttatttttttggagcagttttaggttcagagcataattgagaggaaggcacagaaatttcccatgtatttcccccacacaggcacagcctccctcatcatcagcatcccccaccagagtggtatgtttgttacagttgatgagccgacattgacacatcatcacctaaagtccatagtttacactagggttctctcttggtgttgtacatgctgtgggtttggacaaatgtataatgacatgtattcactattatggtgtcatacagaataatttcactgccctaaaaatcctctgtgcttcatctgttcatccctaccatgcccctaaaccctggcaaccactcatccttttactgatttttacagttctgcctcttctgggatatcatgaagctggtggaataatgcagtgtgtagccttttcatagtggcttcttttacttagtaatatgcatttaaggttcctccgtgcctcttcatggcctgatagctcatttctttttagtgctgggataatattccactgtctggaaatgccaccgcttagttagtcattcatctactgaaggacagctgggttttggcaattatgaataaagctgctatgagctttttaaaaaatagtttaaatgacatatcaatactttaatatttaaaatatctcagtgatcatatagcctcagaaagcacagttttctgagctgggtgtcatgttgagtggtgttagagtgccgtgctgcgtgctcaggtgctatgctgtgaggaaggatgataggagcagattctgtataagcagatgcacaaccacccacagctgcactttggcacccagggcagacaaataaaaagggggcaagatttttttaggggagattcctggcagatagagattttcttcagaatgtacagatttatttttggggggtggttaggggcgacagttgttttaagcagagttttgaaggagtttggtttggtgagtgaaacagtatttcatttttgattgcctttgtttttccagcaagaaagctactcctggtctgtgggcacacaccaaaaggctttgggcaagacagagggagcttgtgtgtgcccccagaccggagtcataccacagttgtcagatcactttgcggcagaccttccgacagtctcctcatctctcttgtggaatttgagtttgacccacaggtagcattttttattttggtggtaccctgatgtttataaggaacctcaggacactattagttaggaaggagattgtcccatgcaattcagccttgcaagagcttcctggttgatctagggacaaggtgtctatcactcagccctccaggtcttttcttcctaaagcaggctttggagcaaagcctgaccggtctttgcctatgactgagtttcccagggctgctgtaccaaactactaccagttcaacttaaaacagcagacatttatcctctcacagttttggaggccgcttcaaagtaggtgtcactgaactgaagtcaggatgtccgcagggctgcgctccctccagagcctctaggaacacatctgccccttgcttcctccagcttctgggggctgccagcgggctccagcctctgccgctggggctgccttgcctcctctgctgtgtcagatctccttctgcatctctcttacaaggacacttgtgggccgggcgcggtggctcacgcctgtaatcccaacactttgggaggctgaggcaggtggatcacctgaggtcaggagtttgagaccagcctggccaacatggtgaaaccctgtctctactaaaaatacaaaaattagccgggcgtggtggtacgcacctataattccagctattcgggaggctgaggcaggagaactgcttgaacctgggaggtggaggttgcggtgagctgagatcgtgccactgcactccagcctgggcaatagggcaagactctgtctcaaaaaaagaaaaaaagttaaacgagtgtcttggcactcccctgtaatcccagctacttgggaggctgaggcacgagaattgcttgaacccaggaggtggaggttgcagtgagccgagatcacgccactgcactccaccctatgcaatagagtgagagtctgtctcaaaataaataaataaataaaaataaacaaggacacttgtgactgcatttagggcccagaacaatcccccatctgaggacctttcatttaatcacatctgcaaaggcattttcatgtaaggtaacattgaaaagtttcaggggtcaggacctaataaattttgtgggccagtattcagcctactgtcccctagttacaacaaggatggggcagcttatggacgagagtgtcaaaaaattcagattctgtcctacagggatcatcttaccctgcagctgagttgagtgattattgagaacatactacgtgttgatgctgttgcttagcactgtgggagatacagagatacataaaactctgcttgccctgaggttgcttgtggttttgttggaagagaagacgtgtgtgtaaaattagtcataagaaaaaggtcgtgtttgatcctgagagccagatagtggtacccagcagtgagcatccaagcccttatctcccaaataggagactttgtaggctgaaaactggcccacagatttattaggtcctgacccctggaacttgtcaatgttgccttacatgaaaatgcccctgcagatgtgattaaatgaagggtcccggtatggggggttgtcctggatgagctgagtgggccctaaacgcagtcacaagtgtccttttaagcccctgctgtgcctgttctcttggtaaatatctctgtgtgctggaacatttgaccagagagagatttcggtgatcatatccatatttgactgtttcctattccataatttgtcgctgtctccgagtcttttcccgggagccccctattacaagtgcacctttctgtgtttattcttccctgttgtgcttcgatgatcccttttttctattcttcagtggctttttctccagtaaaatagcagtttaaattcttgaagggaaacaattaaaaaataatgtctctgggttaacaagtatgattaccgtcatctaaatcagtgatactacatgagaataaaatcaaggagacttacatttacagtagatgaatctatgataatatgccctaccgttttgggtaatttaaatttatgctagttcactctgtctacatgcatgtcatatcttagtgtaaattatagaaatatccctataaaagaaaaaataatttttttctgtatatgttttaagggaacctgaatttctttgggttgtaatgcatgatacagatagtattctgggaatacctgatgttcagcttatccctggaaccctggttatcttagtaaaatatgcagcaacaatatagaagacaatcctgaattttccactgcacaattagggcttgattcaccgtatgacttgggcaaattacttaactttttgaaaccacacttttctgattttcaaagtatgactaataatggtttctgccttaggattattaagatgattaaatgaaataatgcatgtgcaacgtttagaacattgctttaaagtttgtcttttccttctctctccccttttttcctttaaaataaacaaacatgtttgagggctgggtgagttgatgggctccctttagtgcagcacttctaagtaatcactgttccctctggttcattccattgagcacatgatgacaaacatttctggggatatcatgtcaccttggatatagaacagtctcctaaattacattttatatgacaatgtctcactgtatttttgtcctcttgaattgcagcatagcatattatttcttccagcaaaaagcaaaattaaataaataagtgattaagttgctggctgtagctgatactgattcatgacatgactgaggattacttagccatcacattgaattgatgacagttgccttctaaatattatctttagtcacatccctcgaatgtttgcagtgactttcactcctcaactagaatatgcacgtttacatacacatgcgataaggctgaagaaggcttgtggctcagcacaatttggtcttgtatgcacagtaatcattctgaagtgtatgattctgttttattagaaattctcacttgaatttcaagagaataaaggaggattcctcctacacaaagctgctaattgtttgcacactgtgtgcatcccgcatgataagcgatttgagaaggtgccacatcagtgcctttatccaagtgtcacctcctgtctacagttcccttagcagggtgaagggagaaagatgcaaagactgagcttggctgaaacaaatgtatttttgtccccttgacttcttgaattgcagcagagcatatgaataacattgatatatttcttggctgctagacaacaacgtatttctttgacagattgacgcctgaaaagaaaaatacagtatgtactaatgaatcaaaacattttttagtacctttgtgtatactaaatgtattttagtttctatctggagctagttgccatttactgtgggtttgaaatgccctaagttatcttctatggatgggtagaatcaatttacccacacattgacagcttttacagataggtcctgtaacagatataattaagttaaatttcataaatagataggcagtctcctccccagtcctggtccctttgggagatgaattggggtgggggtaatggagagtttcaaaaaggctttccggtgtctttttttaaaaataaggttttaagagtttcatggtcagctgttctcagtttttctcaagatggtatccaaagtaaggctcaaatttatgatttatcttccaaatgcttaaatggtccatttatgatctgccagatgttacaatgactagctccccaaggaacgatcaagaatgtgccaatgtctgggcaagatttttatccagcaaaaagaaaaaaaccataagaattggaggttttactttgaaaagtaaaatcagccacatccatgacttaagagactgtacatattgtcatgggtaaggatttagatcttggctccactgcttactcacagtgtaccctggacgagttactaggcctttctgtgttttactatgctcttttgtaacacagggagagatagcatctatcttctaaggttgttgtgaggattaagtgaactaacttgtgcaaagctcttagaatagtgctgggcacagagtggtgagtgccttgtatatgctaatagttgttgatttatagcttaaaattaattgtgtgatgcaaataggagggttaccaccccaagcttaaatggaagttttgcagcactttgcactcttgaggatgtatctgggtttaatagtaccttccatctagtgcacaagtcttctcccaggctcatcctcccaaacacctctcagtgttatccccactttgcaaatgcagtagtagctgggctcacagaagttaaataactacaccaagtcaccatccaaaaaggttcagggccaggaatagagcgaaagacagaatacggagccatgctctttttgctgtctttctcagtgctcagttctcagaattactcaggaatgagagcagagaaactctgtataggccatgcctggagttttttgcacatggcagtcagagagtcccagctcagttcagtgcagtattaccgaattccagtatatgctgggctctgttaggtgcaaggggttccaggatgaatgagtctgtggcccagtggacaaggtttgcccctgtgtgcagctctgtctgctttactagatttgctcctcagattctaaattggaagtatgtgcatattgcttgatttacagattattagagaatttttttcagttaaactttgtccaaaatagacactaagggcaaaggaaactggtattattacagcagggtgtatctcataagctctgagaattgtacatgtataaagaatctttgaatcgccgagtcttagccccacgttttatacagcacagaaatacagcacagaaagtttaggtgatttcccttgggttccatagtgtgttagtcaccaggttcctttaactctctcagtactctttcctttaaactatggaagagctcaaatgattaaatcaataaaagaatgacaacttatagagctcatttacgtgtctgaatatatcagtttagcccagagtatctgaactcctgggccattgctattcactgaccccttctcctcctcgtgttctagtaaaattcagcccatgaatatagtcattagaagttgaattttaatgaaattgggcgctttgatcaatgggaaggttgaaagttatgtgggaatcatctatatagtttatagctgtgactatgtaggccagctcctaagtgccccctgcaatgtgtcactctctctggttttctttccagggaggtaccctgtagaataacagtctaatttacctctcagacatctgctgtctttcagaccttatgctagttttgtgcatatcttcatgattcctctaataatgcattggattataaactattatctccacttgagagacgctcagagaggctagggagcttactcagggtcagagggagtgcagctgaacagttctgccagggtccctgtgattgttggagcagcctgtgttttttcaagctgttgtctgtgaatcgtacggtagaaacatggtgcgtatttctgcagccttagttctagccattgaaatatcatggagttgaatgcagaatacccattaatgtttaggatgaccaagaaactgtgcccaggccccaagcccagctctgtcatcagaggtgagttaccactggtgccatgccctttgattccctacaggcgccctatggaggtgcccaccagtgtgcacttggaagtgtgatggaacgcatcacatccccttgttgcccctgccccggtgatagggggattcactaagaacttcagcatagtgagagaatgtaactgaagctcctgggttagtgctgcttggtatcccagttactttgtagatttcggaatcttttgtcgtctagcctgaggattactgttgatgacacaattttctttgggattataggcttcatgtttcatacaaccagcatatacgtaaatggcctcttcagtgtatcatgtatacacattggtgaatagcttcccactagataatgttttaaaggggaaaaaaagaagtcatttctaaaatcccaagagagtgtccccgttttgaggttagagcacgttttttagccttatttagtcttgcatcttgctccttatgctacctttcattgctttatgaaattattttttaagggatactttctaacattccatcccactttttttaaagctcgttcatatactttgtcctcacagaatagaacagggtttctcaaattgcacacactgaactctgcaacacaacagttccttcattggagaccagatgaattgaaccactggctttctgaaaataactgtatgctttccagttggccagccttggcagggacccactactactcctatttctcaacagtcaatttaaaatattgacagtagcttaataacattcaatagtaacttgcagcagcctttcatataccctgacatctgagatatgtaccagtttatgaaatagaacacgcagatggtcttagccccattttccagatgaggacccttgtccagggaaggattggtgcccatttagctagctctttcccagcaagcaacagtacccaaggctccatgccccaggcctgggaggacccctcccacggcgtacttcagatctccacctgtgactttgaacacatgcttcgaggtgatgtacttcttggagatagtgctttcctcatctcttctaccttgtagtcgtcagtagagggcatgcagtgcaacagaagtggatttcaggactgagactagggtgaggcaagagaggcatcagaatgcaaaagtgaagtagacacctgccgtcagcactgggcagccctgctcctggggccttacttgactcatcctggtgggttttccaaatggcagaggtgcacaaccacttcttgcaagcatgggcacttgaattgtagcccatgtacacagtgattcttggaaaaagtcatgagtaatgaatggaacttttctctcccaggttgatcttgtgttttgagacataaagagtcaaaggttggtgcctaggatgctcattcttattgtttttggtagtttgattgttgaaggcttttgacacgacattgaagtgaatatttggggcattttgctcctctgggcttttctctaaagcaccctcacatttcctctctcatgttcctgggctttcctggctttgatgctagccccactgtgtgttcccattaatagccctatgtagcctggctccttattctggaaactgtgtaacttttgctcttgatcttaaacacaactcagtcttgcaaggagctccgcctttggtctcagcttcttggggatttccctggcagccacatagtgaactatgtcacactctctgttttacccgttaataaggaaatactctggtacatggagctttgcttgctgatctttttctaagtactctgggggcaaaaggaaaagcagctagaggataaggatgtaactttcttcaaattaagccatcctgacccgtggtagagattagccactaagaaatagtggaaacaaataactgtttcactcttgagtgttagcatggaagagattctggttgaaatcctagtcctgccactttctggttacagaaacttacattacttttcttttgatgtttcaaggagataggagttaaagaaaaatgaacaccagattactagaacattcttatagagttgcccaaagatggaatggacaccttccagagtggaggggagggagtaggattggacagtagtcctcaactgggagcacttcttccccctgaccccacacctgcctcccagggacgtttgacagttttggattgcacaaaactgaggggtgagagttgctgctatatctagtgagcagaagccagagatgcttccaaataccttacgaagcataggacagccctcacggaaagaattatctagctccaaatgttaatgatgctgactttgagataccctagtcagaagtaacatttattggccaggggcagtggctcatacctgtaatctcagcactttgggaagccgaggtgggaggatcacttaagcccaggactttgagaccacctggacaagaccctgtctctacaaaaaaaaaaaaaaaaaattagcctgatgtggtagtacatgcctgtagtcttagctactcaggaggctgaagtgggaggattgcttggacccaggagtttgaggctacagtgagctatgtttgtgacactgcacttcagcctgggcaacataacaagactctgtctcaattaaaaaagaaagaaagaacatttgttgaatctaattttcccatgtaatatcaatgactgtgcaagataaagtggtttttatcctcactttggatgagattggcctttggtgattgagaaaccttcctttggttgttcagctacttctagatagacatgggattttaaactagccatctatatgtccaaaacccatccgctttccacaaacccattatgtagttagctccccatcactgatgatgttcaaagctaagcagggtgagcaaccacttgaaagaggggatggatgaggatacaagcctaagatgtatgttgcactaaatgacttttgaggtccctcctaaagatcacattctctggttctattttgaaatgggatttgtctttttagccccagtgttagagtggcagccagatatcccttggctatgaccagtgaaatccctgtgctttgtgcacctgtgaatcttactcctattaatatcccagccctatcaggccagagggctagggttccaaacaggggcagccagaaatgcaccatcttctgcatcccatctgcattccgggcccaggcagttatttttacctccatatgtaaatgggcccagcgatttctcatttaggagaacagcagaggcacaagtgaggagagctggagaaggaggggaacctatcatatactctgagattgcaatttagtatcagtttgctgatcagtgtcactccactagtttaataagtaattatagtttctcttttgtgaacaaggaaaacgggtagcttcacccagtggttgtcagccctggccaaaaattagaataagatagagggcttttaaatcacacctacaactgagcccctccaccagaaatttaattttctgaggtgaggcctgggtacagtgatttgagaactttgcagggattccagtgtctaagcagcctgggcacctctggttaatggcacacctcagtgctgcgcattctgctccagtacctgctggtgttactctgtcataaagagactagaaaaagagtgagttgggccctgtttctcagtgtgtcttcagtggattgtagggagaaggaggcccatactctctgcctaaacgagcacctgctagactccgaaatctagttaatggaagtttctcctcatccttggacatccttgttttatatggtatacgttcaaaatacatataatctttggtttaatttgttttacaaagttttgaagttttcctctccacacttttctcatcaagctggtgtgtggaaagaaggaatttttcttttccattgctgtcatctaaaattgttgtgtcgggtggggaggggagggagccgggagacttagctttaactacttagaagttttcagggaaatgtttttataacaacctagttaatagtttgactttatgatagattctgttccttcattattttgtcctccagtggcttttatacccagcaaagtggaccatggtgtatgattcaagaagggtgaggagtatgtctttctttggaaaggcagggatggagggttgtgatttagaaagggtaagcaggaaaggagagccacagaaggcaagcactgttctcatgccagatcggtttcaaggaagaggacatatggaaggatctagaaaatgatttctctagaattgtccatgtccaagtcccctggaatgtctttgtatatccccagagctgtgcatgctccagtttgaagagctctgctttaaaagatatcaggggtgggggagatgaggggggtgaagtaaaagaataaaaactattcaattccatttgttttctctttcaagctcatacgttactcatttcatttttatattaaaatatagatgaggaaggaagggcacatggcaagatttggcaagcataatccatgaggggatatggagttggggatggcagcatagcatactaggatttttgaggagggattcggggagcctgttcatgttttccttacaactctggtacatgaagtacaggttctgcatcatgatggaagactgcctgggttcatgtttgggccactacctactagctctatgactttgggcaagtttctttcttcttttttttttttgaaatggaattttgctcttgtcacccaggctggagtgcaatggtgcaatctcagctcactgtaacctctgccttttgggttcaagcaattctcctgcctcagcctcccaagtagctgagattacaggcaaccgccaccacgcccggctaatttttgtatttttagtactttagtacagaccgggtttcaccatgttggccaggctgttctcgaactcctgacctcaggtgattcacccacctcagcttcccaaagtgctgggattacaggcgtgagccaccatgcccaggcaagtttcttaacctccttatagcagtgtttggcacatgatagatgagctacaggttggcttgttattccttgcaatcctgagtttctccccagagtaaagctggagcttttcccccagccaactttggtggagtccactgggcagagatgtgatttcagccaaaatatggctaaaggaggaaaggatctgagacagccaggtggaaatggctccccgggagagcctctgaccgacccgcacactgggaggagtgcgcactggggtggagccttgggaagttggagccatttgcagcagggaggagcctggcccctcgtcttcttggatggtacctaggattcagtctgcgaggcaggaagcacactagcaggactccagcttggtggagagttcctgctttcctttttttcctttttgtccaataaatcccatttttctcaccctttaaattgtgagcctaatttttcgtagtcatgtgacaaggacccctcttaagctgaactaaggaaaagtcctgcagcagatctaactagaatgccaatgcctacattgaggctgtttaatggagagtttatgaaaagttagctagtgtccttgtgtaaacctgtatgactctagttcagagtcttcagtaattgcaattcaagaataaaaccacacggcacttccattcccgtgtaatttgttgttgctggcttgtgacattctacatatcccaactatgagacagccaggcagtgggatggactgtgaggttcagatgcccggagatatgtgaggaagagcttttagcaataaatatgaaaatgaaatcaaagtaaaaactggcattgaacccctggtgtacttaggcttacttttacccaaatccaaatcatttcttgacactgcatggttaccaagagtgtctgtcattcaatatttcagattaagatctgttctttggtagctaagttcagagaaaaaaatataggatctagaagtatcattgctattttttccttgatacatttagtctggtattaaaattgcttgcagaagatttgattttaaaaaagtagaaaagagacacttatcctggtaaaattatcctgaaatcttaagaaattaagacaaattgcaccataaaaccagaagcacaaaattaaacaatattatattaagagaacccagtgacacattttccttctaaattaactttaaaattaacttttaaattaagttcaatctcatatcagtttgctttgtaagaaatagaatatatgtacatgtttgccttatttttagcatgttatattcattaaaatgttttagtttattcagcagatacatttagcatttctttcacaagaaagacagtgaaggaacaattaataacaggaccccagtaatacctggggggtttctacatctgcattttttgcaaaaatagaatagccttctaagaagctgtcagtggcatttgtgcagctggacagctttgcagcagatgtaacagtaactgtgatgccaggctgtgccccagaacctgtaagcatgacaagctctggcttcttccctcctctgaaaaggtacaacattgaagaggcagtcgtttcccctagatctgtaaccaagcacatctgggtgaaaggggaagacatctcttcacagagaggagaataaaggcggtgaccatcagggtgacaggcagcatggactgttgccacctgtgctgcaggcagcttcagtgcctggatggtgggacagctggtcctgcactcagcacgagtctcaggcagtggtctggccgcgcctcccttgggctgcttcttcctccaccgtcctccacttttgctttgtgtctgcgtcaagtcagtaacgttggtctgcagctcccatccctcctgatgggcactgcactgaggccttagtgggcattacctgatgccctcatcacccagtgtacaaacacctgctgacaagaagcgtccctgagcggaacccttctgctgggacaccgcaccttccgtgtcctgagtgggctgcaccctcgtggtgctcaactgggtgacttcacgctgtcctcagcgctgtcctcggcgctctctctccagtcagctctcctgctcaggcacctttttgggacacagtccttgccagttattccctgtttaatgtcctcatgtgtcttcacttgccctgggagactgtcgtcttgagagagcaagccatatgggaccctgaggcctggcctcagtttccctcccccccactgccccacggggccacgcctcatcagtggcatggaccttttagtcagcgagccctcagccggatgctcccgtgctggccactcctgtcatccctgctctgtcctccctgcaaactcctccctcaggaccctgcttgaagttacgtcctgcacagtcatccctggccttccctcagcagaatctgtcactccctcaaggtgtccctgcagtattctgctcatgcccctgctacgtggcagaactctgttgtcctatcctgtccagagctccaaagcccccagaccctgtggctgctgagcacttgaaccatggacagtccaggtgaggatgtgcggggagagatgcctcctgcctgtggctgagccctgcctgaaggagctgatgaggaaaagctcctaagcacaacagtgctgctcacctgggcatctagttggcagagtcctatcccagtgttcgcacccccagtttcctgggtcttaagttcagattatcaagtgctcctcctgcaaaaaaaaaaaaaatggtgattcttgtggcccttagttgaccccgcacctgggatatgcttatatttggtgtggggcagagaactgagtgttcttgaaccacttccacccaaccagagggaggtggggacatcaggtacacctcatcccctgatgtcacagccaagtacctggagccaccaggactccctctgagcccacaaaggagtgtcttctcaccaccccgattatactggtctagttatgctttggagttaaagccaggctgctattgcagggctgctgcaatccttgcaagcacagttgttctttgcttgcgcttgctctcgctctcgctctcactctcactcttgctcgctctctttctctctctctgacttcagtttaactttttaaacttcagtaataagtgttcctcaaaatagatggtcttcctggttgtaggtacagccagcagggttgagttctgctgccttccagcatggttttcctggggcctgtaaaagtcctgcaaatttgctctgacactctgttgacatggaggtcctgtttgttgttataaataaggaccagtgtctctaggacacaccttactgtgtataactgaatggcagattttgtcccttacttcttaaaaattaaatggcagaggagctggccatgtaaaagccctgtgtgtgtttaccaaaaagtacttgaattttgtttgggttttgtgttctggtgcatatgaagtgaattttggtaggagtatgtgcattcagagaatatgtcatcacacttttttctttatttgagtgccacttggctcttatttgattaaggtaatttcagtgacatattttgaagcaattcaccttgaaaggcagaggcaccacccaggtgcagaaaccttccttgggttatgcaacgcccagcgtgggtggaaccgcactcacactttacctcttcctgaaccacagccctgctctgattgcatgatggaagctgaggtgcctgacaagtggaaggaggaaaaggaacattctgccttccttttctctgtaatgccaaagctggcgtcatgcattactgagggcctctgtcagcactggggccggccagtggcacagctgatggggtagctgcactcgctagtcctctgggaaagcccaggttgtttttctggcttagtgttagaggcagctgtgatgtttacctcgatctgtaacatacaaagatctgatcatatgctgtctttgcttacattctattattgtctgacttatgttctaaattctctacaattcccttccatttgtcttaagaaactctaaacctttttttttttggaaatcactacttaatgattttgaggatggaaccccagacagttggtaatagtggatggttttccttttctgtagttgagtggctttctaattcttttgatggcacacaaaaagaaattaaccttagatcacaacttagtacacacatttatgtatgcatgtaactgagatgagttcctcaaaatagcacatacctgtgttttatgtgaggcactgatattttctgttctatattatgcttaactttaaaaaatacttcctgtgtaccatttgtgggactgtaactcacaacttaaaaaatattaccttgatacatagctccagaaatacacatgggtcattttaccaagaatcaccagtgcttttgctctgttaccccggctggagtttggtggcacgatcatagctccttgcaccctcaaccccctgggctcccagctgggggtctttaggaccccagcgtgacctgtgggtagcccttacttcctttaatacttttcttctgcacagtcaggtgctctccctttgagcttccgtgtgaagttcactgtgcacccagctctgctaccaccgcctctgtcttgaaaggaatagggtggggtggtcattggtgtatagtaagattcgaatcacatccttcaagtacagttctaccctaaagataagagtccctgtggtttttgttgttgttgttgttgttgttgtttgaatggatgtgttctttgagaaattgagtcttgagtattttgtgaggacatctaagcctggcgtccacgtcagtgctgacagatttgacctagtgtgcactcccatctggggaaatgcccataggctataatctctttcactggagcgattataatagcccccgggcttcaggtcccagtggcatccacccttggtggcagcatacccctctgcatgaacagggcgcccacttgtcccctccttcttacttagtagtgatttttaaatgggagggtggcagtcctgaatgtagttcatcagtatttaccgcacaagctctaaaggacacagtgttttatttgtgtatttatttaacttttccaatatcggaatatgaatttttgtttcacctgataggacacgtttcaggggctccattctacattgtcatttcacaggaaaaatatttgatggctcattagaagggaacatctattattttgttactgaaaggcacattttcaaccttgagaattggatggcaggtaatggcatggaaattgacagcattttaccacttaaaaataaccacaagaaataccaatgttcaccgaatgagttgaagttaatttggttttgtaggctattgtagttaacttgatgcttgatggaaataattttgtattggaaatcattaaaaattgatttgattaatgcttttataatgttggtatgaggtgttgcactgtggtggtgatgacctaagggtgctgtgatggcctcaaacgttgtccctccggggcccacaggcaggatcccacacactagcacacctcccagttcctcttaccatcaaacagaggtgttccttcaacatgcctgctcctccctgtggcataaaggcaccaggaggttctctgatcccctgttagatctcctctgcagggttgaagacattttttgtttgtttgtttgtttgtttttgagatggagtcttgccctgtctcccagactggagtgcaagtgacatgatctcaactcactgcaacctccgcctcccgggttcaagcgattctcctgcctcaacctcccaagtagctgggactacaggcatgagccaccaagcccagctaattttgtgtttttagtagagatgggatttcgccatattggccggggtgatctcgaactcctgacctcaagtgatctgcccgcctcagccttccaaagtgcttagattacaggcgtgagccaccgtacctggccatttttgtttttaatcggtgtagtgtccctaacctaaatatttcacatggcctgaactttctgtagttttagcagcaatgggatgctttgaaacctagatctctcaccaactacatcttccattgactggtgaaacactagtttaagccaattcattttgaccatgtgcatttttgtgcttgatccctattttatttcaaaaataatttccatctctattcatgtaaactaataagagccttccgtttcctttaatggcaaattgtctcatcttttactgttttaaaacatttttttaacatcatgagaaaacgtgataaaaggtataagtgtagtttcctggcttttgcagtacctcagggaattcggtaaactgtattccatttgaggaaaggaacggttggagtaggaggtagtgtaaagataacatagcaaataagcattttaccagaaccctctgaagtctcatcagactgtgccatcatcagaatccctcccttctcatctacaccgtttaaagccagcatccagtcagaagcccagagctggtaccgccttgctttcctgccagttgctgacatatggcacacagtgtcagttaagggcacaggctgatgggcagcttggccacatacctctctggcttcctatctgtaaaatgggcacaatcattgtacctgcctctgaaggttgttgcgagaactagacgcagccttggcacagagcccacagagagtgagcactgtgtaaagactggctgccagccattagtactgggtgcctgtcttttggtgtctgggcaaagctttaacctgttttatcagtttagaactcagatgtctccctggcaaaacaacacgggcatatagatattttgtgaagttttgttgaagtgcacttaggttaatgattcatgggcagcctttcaaagctatcaggctgtgaaacagctttgaataagattgtcttgtccttctgctgattgtcttttccttcccacattagcagccatagcaggaggaggagaggtggcaagtggccacactactctgctcacattaagcagacaatttatggtcaatattcagtgaatttcttttttttatagtacagttaactgatatttatattagctttaaaattatagcaaaatcaggccaggcatggtgactcacacctgtaatcctagcactttgggaggtcgaggagggcagatcgttggaggtcagatgttcgagaccagcctggccaacgtggtgaaaccccatctctgctaaaaatacaaaaattagctgggcgtggtggtgtgtgcctgtagtcccaattactcagtaggctgaggcaggagaatcgctttaacccaggaggcggaggttgcagtgagctgagattgcaccactgtactccagcctgggcgacagagcaagagactctgtctcaaaaaaaaaaaaaaatagtgaaatcagccaaatagagaactaacaggcacactgcctaattccttgtgtaactgtcattggtgtgagtcactggggcagcgtgattaggtctgtgagctggatagcaaggctgtcattattctcaaggccttctgctgactgctgctcttggtaagacatacagaatctgtgggcacctcctcttaccgctctatgctagatgaggcgtctccacgttgagttgtagtagatacagctaagaaagtaaaagaaatgaaaatctcatcaaaaggattggggctagtctcattcttcatgcatacccaaaccgtggtaactttgatttttttattatccagaatggattgtttagaggagacagatggctttccagttcatcaaattttttcaattatctaaaaggaattcctacgcttggagcaagtcatttcaataaatctcattcatatttacctgctgcttccttttaaatggaagaagagaatgtttttcaagtacacttgaaaaatagcatatgtgaattagaaacttcctctgtaaactagcagagtagaaataagaggccaggattcagcaccaggtaggctggattccttcttaggtggctcaagctggctatggggctggtctcatcatatctaaagaactgcccagcttttacgcattttgaatgtggtggaaccagctgcatctttttatatgagagcggcaaatagtcattgtgttccagtttgcttctcgggtcatctaaacatcagaggccatgccacaagcaccgtaactgagggatatagtgtgactgtggtccaggccagtgacctctggagctgaatcatgacttcccagatgactcccagagcctgagaggggactggtgcgtggctccaaatgattttcacctgggcctctttgaagtcgggagagatacgtgcagtatggtagatgtggagagggagaggcatggtgtgtccaaaaattagcaggacctgatccatatacgtggactctgaagcagtgcacttactagattaaaaaaaaaacaatgtacttactggatttaaaaagtgtgtatttttttgtgagatgcagtttgtaagatgcattggtaactaggccatatactttttccattggctctcagctctcaagaagctctttagtttttagcattggatcagtaaacacttattaaaatgttcccagcatttgtttgccatcttctctttcagctgggcccagctgtgccctcaaaccctgcctgtctcttccctgactgatcatgttctcccagcttctacagaggcttccatagcattgtgcttggtagcagacaccagacagaatctcagccagctcagtccaggcgcacgggctcctggtctcccggggtgtggttactcgtgtctcctcggggccttccgccctccacattccagtgccaggccctggacctttgtctctattcatgataaaacatttttaggaaatgctgacgctcagtgaagaaatggaaacactaactctttgttctcttcctaacagacacgagacgacttcctgggccaggtggacgtgccccttagtcaccttccggtaaggacagtctcatgtttgatgcttcgtgctgggggcgggggtttctaattgtttgtagtcagtgtattttcagagtggcatttcttcaccacggtgaagaaggctgaaatgaagcacgtgtgctgtggccttagtcctttctggaaagtggtcctttcaaggggatggaggagaagctggctgtaagagtagtcaagggtgcctgagtcgtgcgcttgcgttcccatccaccagctccctctcttttctgcacttcagctgctccacctttgtgtatcacatcttacaaaacagacacctccttcactcaggcctcccttcttgtcacttactgtctctgcttcctaatgcatcctccgggtcccatcagatgtttgcactctttgtctggaaccgcacatgccatttctcttggattcctgtacacaaactataatagcatttcccagattttggtgtctggctttctcagtcagcatggtgacaaaagaagagcctgttcattctgagtgaacttgtcagctgggaacacccaccctcgctggaacacgcactgagttagcatgtgtggtgctgccatttctctctgctcaaagtagcggagcagtcgaggctgttgactagtgacgggcattagggctgacacccgaaacaggaggcagggcagacagaatgtgtaggtaggacctggaggccttgagaaaggtggatccccatctcctattccagcttcagttttccggcttgtcccagccttcctcctggccttcttccctgggcagcacaacgacgtgatagaagtagcagctgagagaggaaaggcgaatgtttctgccttacaagggcattgtgttatttttttaaatgctttgtgtgagcaaatagcataaatagtctataaagtaaagtgactttactttatttactttatttaaagctatttaaagctagcataagcttcctgctgtgtggaaattatggctgtttccatatgttaaataccaagtaagctttgaagatgtgttgtgaaggaaggtgatagcaagtaatttactcttactcactcaggggagctgttaaggaagaaagtcgcaaggttccaaaggactggaagtgaaagtgatattcttaaaatatcttgtttgtttctttttaaaactctgaagctccagggtgccacgggaggggcctgcccagggcttctgcgtgagaactactccatgagccatcagaaacctgactgctcttctcaggtcacgttgggaggatgtgactatttcaccttttgtgagcaaagacctcgcatccttctacgttgggaggtcttctgtgtatgttcttcagactgaagctgcgatcctctcacacttttagacagtgttggttgatgggccagctcttttatggacgtctccagccaccctttccctaatgtaaaaaccacatcttggccaggggaaattattttctgagaggcaaatattctaatatttggtaagaggcaaaagtgacatgtttaaaaaccttgctctgacaagctcttttttgagtgagtgagcagcacctggtcttgaaaggttgagtagggctcccagaaaatagaaaaaggttcctcctccgaggccaagtcagtataaagaatagtttagctttggattctgagtggaggcagggtcagtgagccttcaaagaaggaagcggtgcagaggcacagggcaggaatagaagccagccgattgcagagggtagagccgtgaacgcccagagaggaccgagtgcccctagttactcgtgtgcccagagggtaacttgcagtggcgtgcttcacctccatacttcaaactgactagctgttcacagccaactatagtcagagagatggaccacaaagaaaacaaaaggagaggcgtgaaggtatattctttattcatgtggcagtagaacccaagttgcgtgttctgaatgcacgtggcttttgaatccaggatttcaggtgctttcgtgtgtatgtttggtcgtgtgtataggatgctcatggggaaattacagtggcattctgtttgtgtgatagcacacaggtatgagtgtggagagggcgggagcatatgcgtgtattttgtggatcgaattatggatgctgtgttcttgattagtatatgaccattgtcaaggtggattattaacagtctgtagattcaaaatttgtcaaaaccaccaagctttagataaaaggaaatagaccaggcacagtggctcatgcctgtaaccccagcacttttggaggccgaggcaggaggatcgcttgagtccaggagttaaagaccagccttggcaacatggcaagaccctgtctctatagagaaacttaaagattaacccagcatggtggcacatgcctgttgcctcaactgtttagaaggctgaggtgggaggatcgcttgagcatgggaggtcattactacgctgagccgtggttgtaccactgcgctccagccttggagacagagcaagctctccttttgcttttacattcagagaccaagagcaaacttagctgtaactgtaccatcattgacttttcaactgccgttttcacatttgtctgttaaattcagtgcatcgttgtctaaaaattcatatgatatttgataacttgaatctattaattatttagcgataaagagaactctgagatctgtattaacagagtgagatttctggcaggtgtctgcctgttgcaccttcctcttgacttgtcagctctgtctccccttcccctggagccctcagtaacccacctttgcccagccacaaaatctcttcgtccctgggaaaggcagtggggcagagagagctattttaaaacattaagttttcctaaatcccagtcatgtgccacttaagacaaccatggctgactctggaatttaaattttcctagatgaggcattttcagggtggtggtattatttgatgccctgcctgtacttggaggtagctcagctgaccaacatccttttaccccttttgtgtttatggctgatggctggtagcaggtagcaggctgatggttccctctcatgagtgcagaattcaaaatcatggagtttggagggacttcagagacactgattcactcccagtattttccaggtgaaaaagcctgggcccagagagggaggggacttgcccagcaataagcaggtcattggtggtgctggatctgaccctggctctccagcatcattgtgagcctgtgatgtggtcaagggtgtgggcatggggtggattcgcccaaggcttaggtgcttgcagtggttgcatacaagtttcgagtctagggacccagcagggccctctccttccatttgcctgcagaatcctttatctcactctattccatagtgaatgcacctaggctgaaagcaactactctctttcaagatgaaagtactgagtatccagattttcttctgaatgcttttaccctggaacgggggcagcattgtggctattgtggctaatagcactgtttgcagcagtgtgtttaagatggctttccaccaggagcaccctcaaagccatcctgggaggctccactcagctctgctccagggaacaggatcagattggaacctggatgaatgccaagaagaatcttgtagttatctataagatcatcttctaattcaggctagagaatttcaatgaacgtgaactttgattttaatgccctacctgttactgcttggcattgagttggcagtactgacaaatgatatgaacgtgtagaattggccaatgaacatggctagtgtttgttgagtgtgccaggtgcccttgagaactttatagaaaccaactcagttgattggtttgatcctcacaacagccctgtaagttatggttactgccccattttatagatgaggacactgaggccaagagagataaggaacttgcccttagccacttggctctgtaagtaacaaagccaggatgcaaacctaggagatctgccttttgacctgtgtgatatcagtcatttaagctgcatagggtatggacagactcaggttcagagtccctctaagctccgtggttttccctcttcactctcttgcatgttctctgctgctcctagattgctcatgcccactggtgatcctgtaggctttgtcatactgtttgatttcctatgtttaaactgtcctttctccctgttctctacctctcaaagccttcccatcaccctgtattgtattgaactccacatccaaaaccattttgatttccaagtcagagtccgtctgttccctgtaccccaagtctcacagaatgtaacctctctgtgtcagtgaatttgttctgccttagcttctagtggattgttgacatgatggctcttcccttgtaattgtaaccataaggactgctataccatgttgtatccacatgtcgttgacataatattgctctcaaattatttgttggttggcagggcatggtggcttatacctgtaatcccagcactttgggaggccaaggcaggaggacgtcttgagctcaggagtttgagaccagcctgggcaacataggaagacccccatgtctataaaaaataaaaatattagccaggcatagtggcacacacctgtggtcccagctacttgggaggctgaggtgggaggatcacttgagcccaggaagttgaggctgcagtgagctatgattgtgcccctatactccagcctggacagcagaagaccctgtctctaaattaaataaataaatgttggtttaataaatgaaaaaaggaaggaaaaccagcaatagttttcttaataaattatccatttatttccttatatatatttacaaaccttttggtagaaaatattttcaaaatgtatgtttattactgcctcataagaacagtctagaaaatataatttacttcattcaatgatagtgaattttgagagcctccatagtttactacagatcagatgaattgagtgcttacgtgagtacctacttggtgccaggcaatgttcttggcaccggtgatccaatggtgagcaaattcaagtctctgttctcatgggcttacattctggaagtgatggataataaactagtatgtcaacaaatgaacaggtactttcagaaagtgatatgaggaagatacagcaggacgataggatggggggtgataagggtggctgatggtgggaactctaaaggatgagacctgggatctcacacttggatggcaaagtggaaacagccatgccatccagagtcagctgtccagcagagggacctgcctgtgcatgggccctactgcagtacatataatctgcatccatggcagatgaggacaggatggttgggagtacaaggaaggaagagagagactggttcccaatgaggttaaagttgattcaaggccagattatagttggtcttctaagtcataggaaagaattttcagtttattatgagaggagtaggaacccattgagagtttaaagcagagaatgacataaacagataacatttcaaatagcagtgcatacgtacatacatgtgtgtgcatgcacgcgcacacaaacctgatacagtaaatcactggactggtttatctcttgctataaaagtatttgaaattgtgtttaattgaagggtctaggtatttgaggttttactgaatatatagtatttaaagattaatgaaatagtcacacttatttatccaatttcctgctttggtaggaacttcacaatgaacttcacacaatcaaatgaacactgatttctttaaaaatgaacaaatactccacttgtactcatagcttcatgaactgaacctcagcagaaggttgatcggtgctgcttcctggggtgatctctgtgcaggagatagtctttcaattctcttaggctgatgttgtgagattttaatacaaaaaacaaagtttccctcaaagattaaatcttgtatattcttctgtttactccacccatatgtgtctcgagtcacaggcatatagcaaggcactggtgaccgctggttctccgaagtgaatcagctctgtgagactgaggccacaccctgcagttagaaattttacttggcaatgacagctgtaattttgtcatttgtctgtggctggggctggctcctaaaacccggtgtggatagtgacatctagtggatctctagtagatcagttccgtggactgtcaggtaccaagtgaagaaacacattcagcggtgccacattctaaaattcaaaatatattctctgtaatccagttgcctgtatctaaaacatgaaattattaggaatattaaaatttaatttactgttttttccccacagacagaagatccaaccatggagcgaccctatacatttaaggactttctcctcagaccaagaaggtgaggcttgtgggtatgggtgggtggggatgcctgccctgcatgctgtaggtataggtggggatgcctgccctgcgtgctgtggatatgggtgggtggggatgtctgccttgcttgctgtggtgtgggtgggtggggatgcctgccctgcatgctgtggggatgcctgccctgcgtgctgtgggtataggtggggatgcctgccttgcgtgctgtggatatgggtgggtggggatgcctgccttgcatgctgtgggtgtaggtggggatgcctgccttgcgtgctgtggatatgggtgggtggggaggcctgccttgcatgctgtgggtataggtggggatgcctgccttgcgtgctgtggatatgggtgggtggggatgcctgccctgcgtgccgtgggtgtgggtgggtggggatgcctgccctgcatgctgtgggtatgggtgggtggggatgcctgccctgcgtgccgtgggtgtgggtgggtggggatgcctgccctgcgtgctgtgggtataggtggggatgcctgccctgtgtgctgtgggtatgggtgggtggggatgcctgccctgtgtgctgtgggtatgggtgggtggggatgcctgccctgtgtgctgtgggtatgggtgggtggggatgcctgccctgcgtgctgtggtggttggcttttgctgaagacgattttaagtgtcctttgaagtcacaacccttctaaccaattttcttccattatgtgtgcagtcataagtctcgagttaagggatttttgcgattgaaaatggcctatatgccaaaaaatggaggtcaagatgaagaaaacagtgaccagagggatgacatggaggtacgtggagggcgtcaggcctctctccttgccttgagatcatattcatgttttgctttcaaactttataattgaaggaaataaaagtttagaaagcttaaatataaaaaaaagtacatatgtccgcaaattggtcattgatagtctaccagtgcagttatttgttttggttaaagatgaactttttatgttacaacaccaatcctcggagagatttctctttagacaatgccatgcctattccccaattttagccccacagctctgtgaaagtctcctcacacattgaatcctattattgctatggacttgcaactctttgtaaattctttttagccattgaggtcgcttcaaagtgggtggaggaatttagaaaatcacttttttttcaagtttcttactcatttggccacaggtgacagcctgcagtagaaaaaccctcctctagaaatgccattctgcaacgagctgaccagaggaatgtcccttttttccttcctgacagagccgcctgtatttaccttgtcacagactgatgctgtgggtcctatcgtaccttttcagcacacacctcggccagtgctgttttgttaggcaaattctcatattctcaaagtgtccattaaacgagacctctctagggcttattctcacatctgtttgcagctgttgcatatatgtgatatgtgaataatgtgtgtggagaagttacccgaacactcctccgcctgagagatcatatttccaggcattatttcatttacaagccttcatctctctatatacatgaagaggaataatgtgggtgatagaaatttatgaatgttaacatttcataagcatgtcaacagattttcatctcaaatccaaggaattttttacactcttcttgccttccaaccgcagtaaccagtgaattacttaattttccagtgattttagcagaggatgttaggaagggaatacgtaatgcctaaaatacgtgctgtaaaaatggaactcgaattttggtaccatgaaacccgttggtgtggacacagccagtgtagagggcctgagtagaaggcagcagcttccagactcctggctcctgcggttgtttgggatgcaaagaggaggcttctctctcaaagcccacctccctggggagcaacaggactctgggcctctggtcccctgtgccatgagttctgttagaacacaggtgcagcgcagctcatcttccctgctccctttacctcatagaggtgttgaaaagatggcagctgtactgtgacgcacatcattggcagggctttgtacagccttggaggccctccagtcaaaataacaaacatgacgtatggaaagagtatgatgtgacttaagtagtgtcaccgactgtgcagatccaaattgtgttgtcctgcaatgtagtcatcttagagggcagcacaattaattggccattactcagaagatttttgaggcctttctagaattgatatatatatatttttttggccttcatttgggaatttactcaaatgtggccccgaagccatggctagagccagagagccccagagcaaggagaagggcatgcagggcatgctgtgatgacctcttactcacagccgaagaaccaacctcataatcgtccctttaactttattccgcagcatggatgggaagttgttgactcaaatgactcggcttctcagcaccaagaggaacttcctcctcctcctctgcctcccgggtgggaagaaaaagtggacaatttaggccgaacttactatgtcaaccacaacaaccggaccactcagtggcacagaccaagcctgatgtgagtaccgtgtgatggtcaggaacacgtgcacgtgcactgcacagctagggacaaatatggcggccctttgggacaaggctgggaaataaatcatatgtctataagagcagatggtggtgtggtacgagattcctctccatttacgtaaagcatgcaagagcagtcagaacttgtatattgtaagcgattgcctttgagtcacatgctgctgttttcaatatgagctgatttattttctatgtcttcttttatgtcgattcctgaaatacaaagcagaggttgtttttcttagacttattttacatttgttgattatattgttttcttcttcacctttctctcccaactgacccagaacagaaccggcaagcaaattggctttgcaattttctgttttctctaagtttttggatgtttactctcttcaatgcattgatttggaaacctcaaaaatttttttttctttaaggaaatttgagccccttaatataatcagaaacacatgggagagttgcaaaatcagaattagtaattactgtgtattttaatccctcaccagcctcagggatgcagtaaaccaattcctgttttgttccctcagcaatttgtggtttgattgatagcaaataaacactggttaaaactcatggactttaaaaatggttttgtagcagcttgtttttaaatcattttatacagcaagatctaagtctattgataatacatcgaagggcaaaaagaaagtcttaaggaaaaggaattttatcctagaaattatgagctgcctagcagccaagacaaggaggaaattatcaatgaactatacaactttcagtatgtaataaaagcaagtctactgggtagtataattttcttgtctactcgaactctgaaagaaagtggctaatgatacattttagacaacaagcagtatgaggtatcatgttcttaaaaaccttttatctttagaaattgtaaagatactccacatatgactgtgggtggggagggtggccaagttttctggtctaggttttgtttaatttagagataaagcttgcagaatctggaacaacgaatagcctgtcttctctgagcccccaggtgggttctcgtgaatgtcagctgttcgtgatcagctttagactacccagcacgggcattagctcaggacagcaaaatggtctcaggacagcaaaaatatcagatcagctgggtaatgctgaactatcttttgttaaagttttttcccatggaaatagcttggttgattctttttgttttttatattattgcttactatttccttttgattaatgcccatagctattagaattattgtaatccattgtagctatttgtagtaaaaatgaatttggacccaccttgggcttggttacatgtagtgactagaagaatcttggtagcaatatcctaagcaaagcaccattacctacctttgctcaacagcatgagaaaggagtactgaaaaggtagatcctcatgcgacctctgcagaaaagtggccaggagcaactcacaaaggaaaaaatcctgatagctaatatgtatatggaaaaatattcaacttcataaataaggatcatgcagattagagtttgtattttggggacaaatagggataattgctactttctctgcctcacagagttgtgaaactaacgagggaattcttgagaaaacacttcatacattttaaaatatatactatttttttgatggctccacaggtgtagacatgtccccacactcatcaagaggtgtacgttaaacatgaacagctttttaatgtgttgattagacctcaataaagtgatttaaaagagaaaccatctttggtggcagtgtcccagaaactaaaacaaaaggtataacttgctggctcttcactagtctagagcaacaagggaaaaatgcagttctttttctgttgttgtttgagacagagtctcactctgtcacccacagtggcaccatctcggctcactgcaacctccgcctcccaggttcaagcgattctcctgccttggcctcctgagtagctgggattacaggcgcccgccgccatgcccagctaatgtttgtatttttgtgaagatggggtttcactggcttggtcaagctggtttcaaactcctgacctcaggtgatccgcccacctcagcctcccaaagtgctaggattacaggtatgacccaccacgcccggctgaaaaatgcagttcttaatccaagttcgggctcacatgtagttttgggagaaggcagaggcataactgccccatcaaggaggcagcaatgccaaagggagaggctgagccaggaaggacacagcagaacttggcagaacctgaggagcgcctccttccaatgggcataacttctagaaggcaagaggaaagttagttaaggaaaaagagtttccaccacaacctctgctagcaggccctttattgggatacagtataagttcatttcagaatgtgtgagaaaactttaaaatttgtgttttagaaagagtctataatgagtgttcttgataagtactatatttcagttagtctgaaatgacgatttcaacttttgagatactgacttgtgacataatttttgttaatgggatatgttatcttattgaaagtatctgtgagagttttccctgaaaaaatttttggcatttaaacttgtacactaaaagcctctgactagtatttcccccaaagtatgattgcctataatttactgcaaaaaaaaaagttttcttttttctttttttttttgttttgttttgttttgagatggagtctcactctgctgccctggctagagtacagtgacatgatctctcagctcactgcaacctctgcctcctgggctcaagtgattctcctgcctcagcctcctgagtagctgggactacaggcacgcatcaccacactcggctaatttttgtgtttttagtagaggcggggttttgccatgttggccaggtacgtcttgagctcctgacctcaagtgatccgcccgccttggcctcccaaagtgctgggattacaggcatgagccaccatgcccagcccaaaaaagtcttccaaattgaatcaaaacttttagatcctgaattgagaacatcacatgacaaaaaatagggtatgatgttttggtgttcttcagaccccggctgacttgagaggttatctcctgatgttattaggatttttaaagtagggtaaaggaggtaaatgcagtgtcacgattttgagattctgttaaaatgagctagaaagcagctgaaaaaaattcatgttggatcaggtgtactttcctccagatgacagctttgaatttgtcccttttgtagtctttggtcaaattgctggtgaccagaagtagctgccttgtcattgctggacttctagaaggattgggactgcccagctgctgtgtgaacttgcctgtcacctctgcttccagaggtctgacttgtcactgtggcaaatgggcagaggactttgatttctgttttttattaaacactgaggtatattttgaaatgtatgcctgaaagatgctcaaaatggtgtgactaatgcattttaaaactgcatttatttgattgaaatgaaccttaacctatactttagccgtaatatggtgggagaattctcacattggatgaccagctagttgtcagtgtttgacgctgacactttagtggccatctggccctccgtgagcattgaactgtcatgaagggcccgatctcaaccacttctcttcttctctttccccctttcctgcatgctcagggacgtgtcctcggagtcggacaataacatcagacagatcaaccaggaggcagcacaccggcgcttccgctcccgcaggcacatcagcgaagacttggagcccgagccctcggagggcggggatgtccccgaggtacgatgtccccagaatggtgcaaagcccggcagctccttcttcccatgttctccagcttgattttatatcataatttcttctgtcagtaaacattgttgagaatgtaaagattacagtgacgcagggaattaattaccatctgaatattaatttgaaagtgcctataaaagccgtatttgacaagtataggtggctctatattatagaaatgggaataacattatttttatttttattttttttgaagacagtgtcttgctctgtcgcccaggctagagtgcagtggtgcagtcttggctcactgcaacctccgcctcctgggttcgagcaattctcctgcctcagcctcctgagtagctgggattacaggcacgcatcaccacacccggccagtttttgtatttttagtagaaatggggtttcaccatgttggctaggatggtctcaatctcctgacctcgagatccgcctgctgcctcagcctcctaaagtgctggggttataggtgcatgccatcacaatggctaattttttttttttttttttttcctagtagagacgggtttcaccatgttggccaggctggtcttgaactcttgacctcatgatccacctgccttggcctcccaaagtgcttagattacaggcgtgagccactgtgtccagcccacattatttttcagtatgaaaatcttaagatatttttagtttgtaatttatttttcacaggggtctaaccatgtctcattaaatgacagcttgtttttatcatagttgagctgttgaatgagccctgtaacttgtttgggtatcatatgcatatttttattgagtcgctttgacacttggaagagatttattaccatgaaaatataaatttaggtgaacagaaatgtgtaattttccctttaaatagttatggtatgttacttaaaacgttatgaattaaacaacaaattagccataatcttccatgctatcttaccagctctgtttatgtactaaaaatccattcttcttagacattgtgttaggaagatcatttagaatgcggcgattcaacttggaaaagcaaaagtaatgattccataacacattcactctaagttattttataccattgtttaattacagcgtatagcttctatgctgctcccacggtgaatcctcagtggttaaaagtaaaagaaaatccatgacaattgtttataaactccagagaagtgtgtgtgtgtgtttgtttttttgcccacacatatagtaacaagtgctggaaatcagtcactgttcagagaggcattgttataaagtggttaagagcacagcctctgtctggaaccaggcctctttgattcacatcatggccctaccacttgctagatgttaccttgggcaggttattttctgtgcctcagtttcctcatctgttaattgggggagttatcttcctcgtgattattgtgaaggttgtgtgcctcatgagaggcacttagtaggtgttaattatagttatcaccggggctattgttgttacatggtttcattggggagctgggtggatccctacttctttctagtgtttaccccagtgtctccttctctgaaagccttgggagaccatttcagaggaagtgaatatcgctggagactctctcggtctggctctgcccccaccaccggcctccccaggatctcggaccagccctcaggagctgtcagaggaactaagcagaaggcttcagatcactccagactccaatggggaacagttcagctctttgattgtaagtagtggccttgtttgaaagaaaagctgagcaatgttttattgttttttgttgcttaaggagaatctcttacgtaaatagtgaccaagggtcttccagctcccagctaactctgacattttccaaagttcctccttccctaggagaagcaggactgtactaaaattagcccaagcaggtgagaatctttcttgatttggaaggcagctttgctcacccttataccactaacactttcttggtttataaagaactcaaagaagtaaaactccatgatgtctgtaattattagctttaaccttgtagaattcctttcccagccaaaaggctcatgaaaatagtacctttatcacaaaggtagtatttcacagtaacaattaaaagccatcaggcctaatcagtcctcttaagtcatattctgcaggatttatcattctcatttcgctgataagggcacaatgcttaagtggctcatccaagacaaggtttgagtgggagatagaagacgtctcctaagtcccagagtatgaacccttgagaaatgttgtgaaattgtgacactgtcatcaaggtagcattttaacttgggctctcaaccatcagaaacatactttctagaagcttcagatgggcccaatgcctgagcccaatggaatcagtcacaaagacttccatgtttgacaatacaaaactgtgcagaaataacccatagaaaatccctgcttgtgcatagaattaagagcaaatgaagtctcagtgtttctcaagaaactgaacttaaaaatgtacaatagtaaatgatgatagtcactccactgaaaatggcatcctaaaaaaaaatagtcattactatgaccataacaaacataaatgatagcactgcatacaatgtaaaagcaagtaagtactcacaaaattgttactttttggttatggtgtttttattttaaaagacagtatacgcctctattacatgagttgcatttatcattcagttaatgtgatttcactttgaaattctgtgactttttcaaaaagagatgtgtcgccaagatgaaaatgtagtactaaatggacaggataaaagaaattgcatatatatgggatatttgaactgataaaactgttgttatagaaacaacataaacaatgaagccttgtatttaaaacctataaaagcaaggaggtaccacagaatccatggcagtaacacacctttagtaaaccaagtaaacactgtaatttttttcagcaataatcataagttagcaattctaattatttaaatgaggagctcctgaatttaattattctagatctgtgaaatatcattaagacccaaatacaatgttgtattatttcacatcgtgttcactgttaaatgagagtcaaatcggatatttgctcattgggattaccctgtattcaaggggaagaacatgagctttggctgggcacggtggctaatgcttataatcccagcactttgagaggctgaagcaggcggatcacctgaggtcaggagttcaagaccagcctggccaacatggtgaaaccccgtctctactaaaaatgcaaaacttagccgggtgtggtggggtgcacctgtagttccagttactcaggaggccaaggcccaaaaatttcttgaacccaggaggcagaggttgcagtgagccacgattgcgccactgcactccagcctgagcaacagagtgacacttttattaaagactgattctttcacagtaaccaatgtgggaagatgtgaattgtcccccatccctaccacagagtcttcttgtaccatttacttatcacaaaatattaaaaatgagtaaatactagaaactgatactatggatgaacttgccgataaggagactctggcttctgtgtgtgacctgctgctaatcttcattcatatcaattaggcttcatttaaccacatagactaatacaaacaagttagaggaatattaagacactacacagtagatctttttttttagcttgatctcactatttttaatcattcctgtctttactacttgaagtccacttagaagctaaaattggctgagcatggaggctcacacctgtaatcccagtactttgggaggccgaggtgggtgaatcatctgaggtcaggaggtcgagaccagcctgaccaatatggtgaaaccccatctctactaaaaatacaaaaaattagccaagtgtggtggggggggcttgtagtcccagctactcaggaggctgagacaggagaatcactggaacctgggaggcagaggttgcagtgaactgagatcatgccactgcactccagcctgagcaatagaacaagactctatatttaaaaaaaaaaaaaaaaagcagctaaaattataaataccagatctttcagaagtaggccaagatgatgtctgagctcctctgaatataggatgcaactgactctttttcaattgtagtaatcaataaatgttgggtagccacatatcactatttcttccgtctattcacatcacattaaaatttaccctgagggtgcatcttagagcaaactacaagactgctagcttctttctgtttgtaaagcagcattagagtgttgcagagtcctgttgagtctcctttctgaaagttttggtctcctcttacttttgccactaattctaaggaccaatcaaaattccagtctgcttaactgaaaattaaagtgaaagataactttttcaaggatgactgtccttgctctgaaaagatgtttcatttaattaccttctaatatcgaagagcggtgaatatggttgagtgatatgtttgttaaaccaatgaaagttgcttttaagaatatatttcttgatgcttcctgtcttttcctctccttccagcaaagagaaccctcctcaaggttgaggtcatgcagtgtcaccgacgcagttgcagaacagggccatctaccaccggtaacccatgctaatttccagtcatcagttgactttttgggctttcatttacaatcatctgggctgctgcaaaaagagtttttcctgtgtaaatttatttacaatataaatgagatgtttttaaatttcctggccaattgccctaggaaagtggatttccaatacagagaattgttactgccacccatctctaaaatgctggaacctccattgctttagtttttcacccaaatttataccaattttgatttgctcacttaaacctcttggtacattagttagtaattccttttaccttattgagttactatagttatgctccagtgatctgtactttgaaaacacattgagtccctttaaccaggaagaactcttctgggcgaccgtccacatgttcctttcccttcctaatgacctgaagtctgaactctacagagcctctgtaccttctctttaaaggcagctctgctcaccaggaattggctataattctttccaactctctcatcattttaatagctatcagcaaatgtagaggtgtaggggattttgtaacatctgatgtatgtaaaaagaaatattcaagttggaaggcagactagaactgccctgagagatgtttgatgtacacattaaaaataagaaattttacataaatttgtttcttcttttggaggtgaaaatatgtggttttaatgtgttcaatttgatattttaccttgacagtttttgtctgttgctacaaaaccttgatcatttttaagactaataatgtattacgtatgaatttgaagggggaaaagtgcatttaaggtttttgaaatcacagtgtcttccctctcatgtatgttttttcttgacttcaaaggatattttggcctaggttttaattttttatgtttgagaaaaaattaatgagtatactagtcaaggaagcagtcaaaataatagagtcatttgtgacttacactggagagacttaataataagcttgataagagcgtcttttctgggatggtttcagtacagggctcccaaaaacaaaataatcaactgagatggactggtaggatccttctcaacctcatgatctgtgattttccttgaacgaatggcactttctctccttttcaaaatcaatgtcaattttatttcccaaagaactcactttcctggaaactggtgattcctccctctttctttgtactttctgatgctgtaaactcactgatcaccagtggcctcttgagttttgagtgtggggagatttcagaatctgctaattatttgacaatggcaggcaaaaccagaccagctttccatttttctctaaggcagctcactcttttgaggttgtcattgtttacccaggtcaaggatgagccaccttggggggcataggggtcacgcttcctttgtgctactggtcatcagcgactgctggctttgtctggatagggtgggtttcagggattctgatctcacgtcacctgccttacagcgctgccacagcagtgggccctgattcagacagcagggggtcatcccctaagtgcatttcactgatgtaaattatcattcacagcccagtgccccagctgggagagcgcgttcatcaactgtcacgggtggtgaggaaccaacggtaatgatccactttatcagacatcaatagcaagaggccgtgaggcagttttaatatttcgtgtagtggtgaatatacgctgtttttaaaaataagattagctcctttgtgctacagagctgcacacgtttcttattttaagcttctcatttggggattgtttaaaggtactgggtaaaatagaatgatttttttagtcccacataattttattaggaatactatcaggctttggttaagtgcatttaacttgaccatttagaagatatttttgacttttagtgtttgtactcctgataagtttttccatttcattagaatgcttggttaaagtaatttggttggaagatcatcaaagaagccacaggaattgcatgagactgtgtgtgtgattcctggatgtgcccagggcccttctcttttctgtatctcccctaccacatttttcacagggggttagacttttcttgtccccagaatgcaccatgaccctttctctgccaccaggggctctcctcacacaatgaacaagtttccgtaattccaagggaacataattaggatatataagtgatctagaaaaatttatgtttctctaagccaaccattcttattcattattttaaagaatgtatggtattcctgtctgtgggtgacttagatttgtattttaattgcctgttttctacttgatccctaaagttaggctagcttatagtttatgcttcgcactgcaatagctgtttaaagaatttcctggccgggcacggtggctcacgcctgtaatcccagcaccttgggaggctgaggcaggtggatcatgaggtcaggagatcgagaccatcctggctaacacagtgaaaccccgtctctactaaaagtacaaaaaattagccgggcgtggtggtgagcacctgtagtcccagctactcgggaggctgaggcaggagaatggcgtgaacccgggaggcagaggttgtggtgagctgagatcgcaccactgctctccaccctgggcgacagagcgagactccatctcaaaaaaaaaaaaagaatttccttattgtttcacctgtgttgtattttgctataactgctcattacttgtggataactttacgtatacaattgctgattttctaaagatgttgatgacttcaatttaatgctcagcattgtacagaggaaaatcaaactggcaacagtcagccccagaacactcagctcaggttaagatattgagctacagtggtttacatgagtcatgtgttgagtgaggcagcctccagtagaattcaagaaattctacatgaactattacccaccgtgcacttgtaatttctgtgggagtagtggagctttgagggggacaagatcgttttgtgagataattttagttgaattcagtgctgatgaacatcatctgtatatcacctatttttgtattttgttggccttgcaacctgcgtgtagctttggagtgttgtggtagctgatgtagtaaatgaagtaggaatggaatcattgcagtaccaggctccatggcaagggtcacctggcaggacaaggtgacccctctgaatgagatcccgggtggcacgttagactgccattttcttgccttcttgcctgcactctcccctccccgtcactgagtttcagcatgggttgggtgttttctttccacaggcttggcaatattcattcctaagtgtttcatctactttggtagatgtagatagatctccctacctacttaggtttgaaaggatcacatccatttctcttctgctgtatcctgcatgtttctcttccacatcctttgtcgtgaatgcccttgacttcctgtcttgcaattctgtctcttcaccccgtgtttccctctttggcatcccctctgttcctctgcacatcactcacactgaagtgtattgtcctgggctggagccatcatggtattatatcatctcactgcccctgtgctctcacagacatacggctgtgtacacataggtacacattgtgccactttattttattttttttaaatgggatgtcatgtatacattacttagcaacttggtttttttttaacttatgttcattcttctgggacatgttaataattacataatattcactgacgtaaaggcactacagtgttaatttcccgacattcaaggactttctgctccccctaccctgccctttcaactccatacgctgtgctgaagtaaccgtcctgatatagctttctttctatgatagtgctttcattcctgtagtctaataaacaggccctgattctcagccaagaaaccacagccctttgatttatggcaaataaacgcacagtggtgtcactttctggcagactaagccagggccctccccatgagataaaaggagagggatagcacagtcctttcagtctttgttgtatatattctaaaaatacacgagccaccattactgggttggtgcaagtcttggcaaatctgtgatggtcagtgtcaaagtggttatttttaaaagcatattgaaacttctgcagtttacaatcgtgttctttattttaatgaaagaaacagagccactaggaagttctagctaatggcttttgggcatcacaaagcagtagtgtattcagtctatgatgaaaagctgtgaaatgttaaactaagtcgccatttctaactggtttgattacttttttgttaagctagggtggaacatgctcacaagcacagaacagcagaaggctggttttggcttcctggcgggcccttccatggcctgtctgtagaagctgagtcctgccccctcaactagccgtgcagggtgggaggcagtgtgagttacaaatggaatcatcagcacaagttgttctatgtggtcatttggagagaacactgtaaagaaacatttccaaattgccctctcacataaatgtaactaaattacaggttgccagttcagttctcaatagaagagagaatgagcattttaatcaaattcagcgttctgtactacactcctaattttccacaaactgattagtgctattcactgtggctgtatgaaagtaacctgtatggccaggtgcagtggctcacactggtaatcccagcactttgggaggctgaagcgggtggatcaattgaagtcagcagttcgagaccagcctgaccaacgtggtgaaaccctgcctctactaaaaatacaaaaattagctgggcatggtggcgcttgcgtataatcccagctactcaggaggctaaggcaggagaatcacttgaacatgggaggcggaggttgcagtgagccaagattgtgccactgtactccagcctgggcgacagagcaatactctgtctcaaaaaggaaaaaacaaagtaacctggttgctagaattcatacagctttaggattcagttctgacatgatctatgacacatccatgtgctttcagttgatcagttgcctcccaagtgtcctttccagagattgagtaactgcaaaaatatccttaaggtttccagagctaaggtttccggagctgagttttccaggggcggggccagggggagtggggagttatgggagggaaggggcctgggagagggggaagtggatcaccagaacggctgaaggggagggctctgggcggagggagctgagaatgtaacacattccatttagtatttcattgattgtataaacaatagtaggtcaaaacttgatagcacatactttgccagagatactaattgaccaggaacttaggttacaacttagctcagcaggggagtccattgaagtgcccggatccacgtagctctttgtgttggcatcgctgctagaggaggaggggaggaaggagcttcactcaggctgcatgctaattcatcgatgtttaatattcatgaaaggattaagtcagtgttgatgtttcttctgctcctgctgagtctccacacctggatccagaatgctccatgatccgagtctttgtgtctttataaactatctttagggagctttaggactttatctcgggaaatattaaggaaatggttttccttaatatcagcagaaagttttcttacacataatctaaaatcagctgcttcatgatcttacccaggtgatctttctctgaattgtgcttttaagcctgggaggttaacatactgcttctctgtggatggggttttcaaattacccggcagcatccttgttggtgctttctctaatttgagatcctggagtccaccagggaactccaggtgaccaccttcaccaagacacattgctggtagtgcagggaaaaggtggcataagcacaggaagaagttaggttcagaggaaatttgtatcctcagcctaatagcaagaaaacgacaactgctaaaatatctggaagtaaaagaagcagcttccttttgtaacctcacgtgagaggttattcctaaggcatgggctcctcctatacctttagattcccctaggagccgtggtatagctgtggtcggcttctggtttctgagcttttccccacttagagctctttcacaggcacagatattacatgcatcgcctatgcattcaagccctcctgggacagccctgatctccagcatctgtcccagtgcctccatacatcatcaacacatccttgtttttcagtgtttctccatccacactgcatttcttagactgcttctcagggatcttcttgtgatcaaatgtggactgtctaaatacagtcactctatgcggggcaggtctctaaacccaaaaactgccaagctgtgttcaccttcaaagaaacacactcctatcagcagacttgggtgcacatagcctggggtgtgaggctgggtgctgggagacttcctgagctggggcacacagatgtcctgggtggtcctccagattatatgctactgtgtgaccatcagtatcctagagaaggggctctgtgttgggattttaaaattttgccccagaagctacagtgttagggtcctaagctgatggaggaatgtaggcctaagctagaagagcaccccatgggagctacatcgaggagaaactcagagcatccctctcatacacagtgacactggacagtttgaaatacctttaagctctacctggtttggcagtggaatttagtagctagaacagatgataatgtttttccctttccctgtgatcaccttggcagcaaccctttacgtttgagactacggggtcttagaaccaagttctgtaagaatttggactctgcaactgtatggggttcatttcacagtagatttgaagctgttggaaatctattgctgttttccagacacttgtaagtgttttctatataaatagatctaattaactttgtctagagaaaataattatctgggtgtaccttactttattaaactgatcagaaaacaaatgcaaggtattaaataataatgatttcttgcacaaacagccatcagtggcctatgtacataccacgccgggtctgccttcaggctgggaagaaagaaaagatgctaaggggcgcacatactatgtcaatcataacaatcgaaccacaacttggactcgacctatcatgcaggtacgaagattgccatccaacttaaaaccgcaggccatagaagccgaaatgtacatgaccgaactcctttcctggtgtttatgtattgttctgaaagacccgtatttgtaaaagctttctcacaaagaaaatgcattactttaaatacaataatagcctaaggaagaatttgcttttcaaatcagtttatcactgaatatattttaaaaatgtgacgtgaaagatattttcaaagtaagagcctattgcagtgtgtagcttcttccctgcccagcccccactttaatccgaggctagtttttatgctgggctagtgattcatttttatttcccttgaatgtgtttccccatcctttcccccatcattatgtttaattatttcctccacgctttaaataggccagacctcttattattgctgtttgcgttgttgtttgggttcgcgctcctaatcacacacaccgggagatcctcctatgaagctaacttgtttttgcctccaaaatagcttgcagaagatggtgcgtccggatcagccacaaacagtaacaaccatctaatcgagcctcagatccgccggcctcgtagcctcagctcgccaacagtaactttatctgccccgctggaggtgagacggctacctcatctaactggactcactctgtcctgtgactcccattctttcttctctcttaactctgccttcagtttcgcagccacctcctctctctgatcagtcgttgtgttggtagtgaagggtgttcttgtgcagcctttctacctgcttctctgtctcgcccagttaacattcctggactctctcacctgattctcattctcatttggctaaggccgtggtgacttgtgctggacgtgggcactctcttttcaggacttccaccgttcttgttgtgtttcgcttctttttgcctgttacctcattagaattgcgtaatccctctttcaaataccaagtgctgatattgagtttttaaacatagctattgctttgatcatttgtttttctttcgactgtagggtctttcattctatgggcatacatgtttctgatgcatatttgcatctctgcatcatggctgggcatctgcttgtgctctctgtcgtgtttgtgttgttttggtgccatcctttaacatcacaaatgtcagagttagagaagccaaagagcaaatgtttgaggtcctaagcttgactgtgtcttagagacagctgtgggcttctccacgccctgggtccagatgctgataagtgggaatggatgctgtctcttccacactctgatatgaatgtcatgggtaacaactgtgagattccagatcgttgtatttattgatgtagcttttttcctttttgtgctctaaaacttgccaatctgttcttcattagactgtgagctcattaagagcaagggcacatttttctccactctgtaaaatctccatccataatgcttagtacagaacagtatttttggtacatactgagtagctaccaaaggatggtggttataagtacttaatattgttgtgtgtttatccaacagagaaaatgtaaagttagattgatttaaaagtaaatgaatgacagaaaacaggttttggggatcttccctcttgtccatctccaaagagaagccttctgcaatacccaggtacattttggcacattggaatcgcacatgctaaagagttctaatcctcattgttattctttagggtgccaaggactcacccgtacgtcgggctgtgaaagacaccctttccaacccacagtccccacagccatcaccttacaactcccccaaaccacaacacaaagtcacacagagcttcttgccacccggctgggaaatgaggatagcgccaaacggccggcccttcttcattgatcataacacaaagactacaacctgggtaaggctgctgcttttatttggctccattttcatcatgaagtctggcattaattccttgatttccttagtgtttgtagttcttgcagaggaattggattgactgtaaagggtgtctccagagggtctcctcagcctgcatctggcccctgcataaatgggcgggtgggagtgggtgggcacaggctggtagctgtctttggtattggtgctgggactgccttttctcctgggaagctctagtttagacagttcaccgtgctggatggaaaggtattgctctgtgctgttaagattttgttaattgatcccgtctcacaaagtaatctcactaggagttataatcattttcaaataattttttcttttgtcagtttcttcttgcactttcattggcattacccaccttcttttgatttgtcgctttagtttttaccgttcacatcagatcagtattcacacatctgaggtacattttcatgcccttgatcatggggtaggggatgtactgagtgactttggttgtagatctgatagctcctttttgtgatcattttgtcaaaattgatttttcttaccatgcaactctttcatgtactcctgaattgtacccaagaaagaatctgtacattgtattatcttgagcaaaatgagattaatcaaaggcaaatatgcatatctttgtatttctgtgtcagttctttatttctttagccgaatcggtggctttttcagtgtagtatatgattcttttaaaagtcagttggtattttcctgctatataatctctatacctgtaattacactgaaaccggttcccgtatttctggctatttttgatgctgcagatggtttttcttccggttatgtccccatcgaattgtctagctagagttaactcagagtttaacttggtcctactattatctgtgctacttgctcaaaactgatgttatgggaatgctggttgagttttggtgattgttattggccctagctcttcggtcttggaccaacaataaacatacaccattaattcccatttctagtgatggacattaagtgtgtccatttgatagaccagcagccttatattcaagaacaagccctgctcaaggggatttgggctgtcattttatgccttgcccattgtgtggtatcagttcagtccagcaggtctagagggcgtgctcctagaatcctttgaaccgtgggacattgtgtcttcaagggcattcttggcatttggggcagggacatttgtgccttcagttgcagactatttaacaaacttggcttctgctaccaggtgctaatggtcaccattacccccaccccaacatagtgatgaccagaaatgccctacacatttcaaaacagccctaagtgagaaccactctaagagctctttctattttgaagtaagggaatggcctgccaagagaatttctcatttagatctggtaacattcatttggtaaactgataactgcttctaaggcatataataacatgtaggtttgactcccctactagtctgaagataatgttacagatttgcaagcaagccaagagtaagagacgggcagctcgttggaaaatatagtaatggagttctttttttttatgtctttttacttattaccatggaacccctggctgtcctgccagtgttctcatttactatagcactgctgtaatttcaagtccttagccagaaacaggctccagaaataagggctaacgaatataaaagtagatggattagtgtaaggagccactgtggcttgccaacataagctatgattttagtaattttaactagcttggtaatcaaatcccctaaccttttcacagcctttcaagccacaacaacagtgtaattgcagctgggcagattgtattttaaattaaacagcactcgctttatttattgcttgcaacattgctgaatgaaacccatttttactttccagttgcgcctgtttacccagatacttgttattgactaatttactgatttaaaatcataatctgttagaacaacgttttgttgctgctgctagtgtgggaaatcctcaaggtaacaactggaaattccacaagctactccccttcttaagcgaattcagatgtgctgacacagctgcgctatcgcttctaaacaaaggcctaggcaggattttccctgcggaagacacactctaaattgcctgttcattttgacaaaagatgaagagccggagggaagcatgaagataatttgcaacttaaaaatctgttttgagttggttttagggtttgctttgttttttatttttgaaagaagaagagaacaaatgagagaacagcatagctattcttagatttgagcattagaatagaaaaaggaaaaaaactggtaggacaggttgaaaatgatgaaaataacactccttcccccatcggcctgggcactgttgattcttacaccaaccagaagcctgaaaagtatcaggacatttcccctctatacattgagaaattaaaaaatttattgaaatatgtcatgaaagatgaccttttacacacacacagatactgaaggcagtatgccatcagtatttggataaagtttggcctcattctcttttttttaattattattttttttgtttttgagacggagtctcactcttgcccaggctggagtgtaatggcacaatctcagctcagtgcaacctctgtctcccgggttcatgcgattctcttgcctcagcctcctgagtagctgggattacaggcacatgccaccacaccagctaatttttgttgttttttgttttttgttttttttagcacagacagggtttcaccatgttggctaggctggtctcgaactcctgacctcaagtgatcctgccgcttcggcctcccaaagtgctgggattatgggcatgagacaccctgccaggccaagtttagcttcattcaaagaaagaaagaaagattggctttgttccccgcctgggtcaggcctttcagggaatgcatgctggagaccaggggcttgggagggatgtaccaaggagggatgttccatcctcagcagctcagagcacgtgtatacgggttgagtatccctagtttaaagattcaaaatccaaaatgatccaaagtctgaaaccttgtaagcactgacatgacactcaagcaataaatgcttattggagcatttcagattctcagattagggatgctgaagtggtaagtataactgcaaatattttgaaattcaaagcccctctggtccccaagcattatgggtgagggatgttcaacgcatattagtatatttgtgcctttcacaggatgaagcatgggcttgcttttgtagcaagaaagattacaccctagttaagttgcaggtttgttttccatccaagttcaaactaatgaaacttattactctaggtgtggttgctggtctcttccaggatggaaaagataaagaaaaaaggcacttttttttaatccctgtgttttatatattttgaattaggaaagccctttttaaaaagatactgctctttgcatcctgtttaaaaacactttgaacttgatggagggaagcaattttatattacacatgaaagagttcccgttatgaaactgaagaaaggaagaaacaaccaggcacactttatgcgttggatcatttattttcattgcatcagagccctcgttagtattccactttctcatcagctctgaagttgtccataactaatagagagccttgaccgccacttcatgtgccctggcaactaaggagagatgcctgcctccttgagtggctcggtgggagtcagggcttgagggtgaccactagccttagccctcagagctgattcatggcagctgctgccattatttttattatttttgataaaataatattataagcctcaaggcctctggccctcacagtctatgaagtctaggtttccatgcaaggccactttagcagatctttgaaattcggttgactttatacttcatgctctgcccctcactgcctccctgacacttttctctaatttcagcttcttttcacgctacggccccccccgccccccccccccctttaaatcaccagccttttaccaatagggctgattgtctttcacggtagcctacatgtgattccaaggtcaggctggccttgtgtgtagcattcagaagccctgccctctttcatgtaatagcagtcctcagctttctctaaatctggcatggtcataggctaggtggaagcccaagggtcccccgctggttgtggcgttacctggtccggatcagagttagcattgagtgggtagcttttgagaaattcagtgctttcagtttttcctctgtctgtagttaaccagtcatgaatgtttaccagattatcagcttcttggaccttctcaatcctaaatcagcttagcatatttctttatgttctgtgtatgtcagtgtactgcagaatactggattattttgtgcctctgcttagccttttaaaaaaatatattgggttcagggtcaatatgcatcacaaactgctaacaggatttctttcttcatttaaaagttcacctagctagcaagaagcaagggttgatttttgttgttcgtggtcttttttgattcttgccagttcccaagatctatgattatgattcagtgatactatgacttacacggttgacttgggaagcagaaaaatctagtaatttggcagcagcaaaggccctattataaaattgaatgaagctgatatcaaatgtcttcacagtttactttttttaatcttaagcttatttggttgatagtggttttttttttgagtataaagatatggattctcctttttatgtttttggaggcaagactcactgcatcacccaggctggagtacaatggcacaatcacagtttacggctcactgcagccttgacctcctaggctcaggtgatcctcccacctcagcctttcaggtagctaaggcaggcatgcaccaccacactcagctaactttttgtgttttttgcagagatatggttttgctttgttgcccaggatggtctcgaactcctgggctcaagcagtcctcccgccttggcctcccaaagtgctgagattacaagtgtgagccactgcatctggccttacactgcatttctttttcttttttttctttttttttttttttttttttttgagacggagtctcactctgttgcccagcctggagttcagtggcacaatctcggctcactgcaacctctactttccgggttcaagcaattctcctaactcagcctcccgagtagctgggactacaggcacacaccacacccgggaaatttttgtatttttagtaggaacggagtttcaccatgttggccaggctggtctcaaactcctgacctcctcagcctcccaaagtgctgggattacaggcatgagccatcgtgcccggcctacactgcattttaactgggtctacataagtgagagtcagctcctggactctgggtcataatctttgggcaacttcctgttctctctgaaactccatttcctcatctaaagaaacagaccatgtgcccaacctcctaccaagggtctgttgcaggattttacatctgaccatgcctcataaatcatgcagcctgacccaggttgtcagagtacatatttctcttttgttgattctctgtggtatcttatgaagcttatgctttaagaaaaaaattttgtaaacgtttaaatattaagacataaatgagaacttaatctgcagaacttggtcaagaatctcagtaaagttgtatcataactttgtgagtttgcctgatgaaagcgactctccctggagtagccacgtgacttcacagaccagattgacattctctgctgagttcagaaggagtggaggggagcacaagtgctggaggagggtgtggcagggaggcctattccctaacgtgttaggctggctcccctcaccgggagctcgggacccatggagagatttcgaaaccgttgtccccactccctctttgtgccacattcactggcaccctccattctggtttccctagtaacatcactgctgggactctcttccccttccccttctcaaggtctcagggaaatggttaacctttcatgtaaatattcttactctcctctctccaccaagcacaagaaggaagagtacagtctgtctcgagagacagtcagccaggcttcctgtacaaaacagagatgggacccatctcacgctccaggcatggacagcctggttgccttgaaacaaacagctcaagaagaaaagcacccagtaactgcacacagatacttccacttagcatctactgtcttttacatttttcttgcaggaagatccacgtttgaaatttccagtacatatgcggtcaaagacatctttaaaccccaatgaccttggcccccttcctgtgagtacactggagacacatggaatggtctgaatatgtgtgttcctttatccgctcaatgttgatggagaggccctgtggaccttctctatctccaggctttgtggatctcattggtttgtgtttcttaacagaattgggtgtttagctgaattgtagtcatacattatagttcatgtgatatccagtacttatgaaagaggtttctgaattgctagcttctagcagaagatagaccttgtacacaggatgttcaagagacgttctctgcaggtgacaatttaagtggcactcattcattttgtaacttagcaaccactgagtttcagtcatattgctgattaagtcatcagaacaaaaataatgaaaatagtatgggagaagaaggcctaattaatcatagaaagtttctataagtcatttaacctgcagatttttaaagtttttttctcccttgttggtgacggctcagtaggagttgagctatatacttaaaattggattttgaatgaaaccttcacatacatcctcctcaacaactcactctcagtttgaaaaagccgtagggggtgacagggcagtggttggactccaaggctatttttaaatgggaatttttgttgttgttttccaagtgtaagaacctttttgttgcctggtatattagggcaacattggaggctgcgaaggttaaggttcaatcattattcattaggttatacaggtatcccacaccaaatctgtttggttcctgggttcaaatagaaagaaccagagagttagtttagaaaacaaaagaaagcatttttttctgaatctgttggattcctgaggttcagatagcaaatatggatagttcagataatgagggcataccagctttatcttgaaaaaattctccaaatctgtttagttcctgagcttgactagcaaaagttcatggtggataataccaatattagatcatcaactgcctggacaacacaaatacagttaaccatgtctaacatttttatattaaccccctcttcctttcctttagtactcagtatttatttaattaaatggtactcaacttcaaactccactgttccatggaatgctgcggtttccctttgaagcttttgagctagcagcccatttccggttcttcatacagtcagcgcatctgagacctgagcatgtgataaagcgtgttgctagacatggtcaagagttaacttgaaatgttcatatttagttcacgctcaatgcataaatgtaccctagcagaaaagagtacagaggtgttctatagtttttaaatgttgcctttgatttcagaactcctagctaatgtttatattttctctctcccttccttccccggatactagcctggctgggaagaaagaattcacttggatggccgaacgttttatattgatcatagtaagtaggcgctgttatggacacacaggtgttgtgggttagagggaaggagtaattcaaacatcatagtgaaagctttgtcattttactctttatctaggcagccaggtgttatgtggagaaaatgataccagagaatcagtgccttcatacggtactgtgcattcaccccaagtttgcttaaagtagcccatcaaactttcacccaatctgatcttgtgacctattaacgtgtttttttttgttgttgaatttttaaaccacattttgattgttgatcccttgacttttgcacatttaataaatacactctggtaatagaaaataagattagaaatgatgatttagtcaaaaatctgtgaacagtgcttgaagcagcatgtaagttttttagacactgccttcaagggtcctatggcaggatgcccgctctgaccttattttctattcacggcatgtttccttgcacccacaacactaatatatatgtattttctggaaattgtagtatatttgctatagacatttgctccagcacctatgaaaaaatgtgtggtttctcattccaactaaaagttcaactaataaaagtttgctttttagccagtgggattttttttttctcattctttttggaggtgccatgttcttcatggaatcatatttctatgtcccttaaattttctgaaaaagtatattaaaaagaagccttcaaatagatgtaaagtttcaaccatgagtgcaatttggtagtatcttggtctttgctttcatttggttcatgaacagaaagttagggtttccctggcttcacaatttcataactaaacaaaagcacgttgatgagccacctgctgagaagtctggccacaagtaatcctcacacgtataggactggtcactatctcataggcatagtacgtttttcagatgttactaggaggcagagacattgtgaacagaatttcactttcaggccctgggggttgagggcttattataaatggaattaagcaaaagtaccagcagtttacaattcaactgaaagtagaagtcctaggtgtatttagaagagtgagctaccctttgtttaaaccagatatttcaaggtgcagagacttagtttttgtcttttatcaaaaaatgggcagatttgtcaactgtccagaatttcatagtaagcataaagtatttttcctgctttcatgtatgtgtatgccctacttttttccttaatatactatttatttattgttttaagagaatttactaaaatgagagagaggccacacctctttttcccatgaaaaacaaaataatagtttccggcttggtgcagtggctcacacctgtaatcccagcactttgggaggccgaggtgggaggatcagttgaggtcaggagttcgagattagcctggccaacgtgatgaaaccccgtctctactaaaaatacaagtaaaaactagctgggtgtggtggcgtgcacctgcaatcccagctacccggatggctgaggcaggagaatctcttgaacctgggaggtggaggttgcggtgagacaagatcataccactgcactccagcctgggcaacagagggaggctgtctcaaaaaaaaagaaaaaagtttcctttatagtattttttatacatcacaatcacagttttaagacaggtgtgaataatactgatcattttactaaaacaggtctttactggtaacacatcctggtctgtgacgcatggagagcattgcacacaatattgtgacagttttctggctggagatgtgatgcttaggtccccctaaaaagaatgttgtgaatgtgtttcgtataccgcaaggagccaaaaacagaaaaacacaattacaaagggctgtcgtagcatgcgttaaaatagtgaaaatcactgactatttcacttgtggtgtcatagacctagtatgatacatagcagatgcttgatacttggtgacttgaaatcaggttcatggaggatcagtggtgaagctcttaggaagttgttgtgcttgatcagaaagtgaagtgaactcacttgaggagcagtaggtgcccccactccggctttccacccccaccggcctgaggctagcgcaactccggcttactggaaggtggaagaaggtaactacctgctagatgcctgggcttttccttactcctgatcagttctgcagttactccagcactctgcccaaacatttcctcatttcacttgactagagcagcacccccgaggctccattatactctgtacagagcttgatgcaactaagctgtgccaatatatttgtggccattgacttggagattaaaatttattttgcccttgcacaaccatattgaaagattctgttaaagagatatagcataaattaagtgaccaaaaaccatttaagaaaaggatttgtttacgagtgcctccttagctgttcatgctacgtttctaccatcgctccataattcatcaaggtttactcaatggaaagctgtagagcagtacacgtcagtgaaacagttcaagtcatttgcctttccacaaaattcagtctgtgaaaactgcagaatacctatcttttgaagaggctttatcaggctgacacatacattccaaatgggttgaattacctggaagataacatttaggaatgtcctttctgtcagaagaaagcctctttttctaaacaatcttatagcaaaactcagcatctgattttgctgtcataatgcctacaggacaggaaccaggttatgcccacgtatgccacaatgccgtgagtgccgtcatcttgtaaattgcttagagtcatcttgtcttccagcatacctggcacgtgggtccacctggaattacagatgagatgatgagatgcacttgtcttttcaataattaattatttctgctttgtaagtttttcctgagaagttagacattttcaagatgaacaatactcagccatcataaagatttaatttcaagagcaacgaatgatcgagactaacctctttagactcctcgattcctttgtttgctgtctatggaatggctcctggctcttgggcctcaggtgggaggttaaaggaaggtcttaaactgaatctctacatcttgtaggaatgatgtcattcttcttaaagaccagacaggcccagcagctgagtaattggccacaggtatcctatctacaacattagaagagaaaattgaattccagtgattttgtaaagtcctattttagtctttcctgtcaacagtcttactagacctgttcatcgtgactaaactgagtttctcatccttccacttccttcttgtccttttattggaaatatatctcaaagaggaaaagcaagtttaaaagccaaagttctttaaaaaaaaaaaaaaaggataactggctaccccatactttcatacattgaccatacttcactgaagaattctttatcataaccatgtagaaacttgtgttgttccaaaagcttaggctctttttaaagggactttgttttcaccatcagcttcattcagtcattaaaaaaataatgcactaagttcctgttacctgctgggactggtcttaagtggtagagaggggattgcaaagatgaataacacacagtccctgtccttggggaggttaggtccagtgggaagtagcaggggatatttcaggtgttagaggagtgaatcagttgttacacagaaacagaagaggcaaggactgcatctgcttgggaggtggttgggcacagggatggggccctgagagaatgggtcactttttagatggatgacaaacactgagtaggattgaggcagtcaaagccccaggaagagtgatcctaggatgcgtggaggtgtgtgaatatgtgcagatgctgccacgttccgagaaacgcagcattgctccaaacagctagtgtgccgcaggggcgcacaggccaagccaaagggtatctgcccggtgtggggactcgggctcaagccacaggcagtggggagctcccaggggatttcccagaggggagggatggggtcgaaatcgttatttagagagatccttttggcagagctgtagaagatgtcttgaactggggttggggggtgagacaattcccagtgacgcccagagaacagttcagggaaaaaaaatgagccctctagcaagaagcttatcaggaatagagagggttggtccgggaccaccagagtgagtgacacggccaggttcctgattgggacagtgagtggattgtgatactgcacattggaatgtaaggtcacgttaccaattttggtgttgggtgatcagaggtttggttttggtagagttaagctgaagtacttacgggaaacccagatgcagatgtccaggatggagcttgaagttcaggtctggtctgaggacttgcgaatcccaatgagtcaggagttattcatttattttctgctttgatgacaatatccattgatacggttataatccaagttggtgttttaaggcgcaatttttactcagctgtactccgtttcctttatttggttttcttttctcttgttttccatcacaatagcaacttttactttccaaagtcttctgtgaaaggtaagggacccaaaaatgccttttgcttccatcaagattctctcaaacagttgagatttttcatgtaaattttctgccagcatgaaaacaaaagattctagaatcatcacttgctttggtagcttttttttttttttttagcttttcctctgcttctattaaaataataataagactttttaaaattcctaatatggtcattaaaacagaattcactaattattcttatcagctcacttacagtgtatacagaaaataaacagaatcaatattcttcccctgcactcccccgccccggtccccaagacaggtgcagatcgggctggagcatagtggcacagtcatagctcactgcagccttcccctgggctcaagcgatcttcccacctcagcctcccaagtagctaggactacaggcgtacaccaccacacctggctaatttttttttttaaccttttgtagagatgggtcctcactatgtttcccaggttgggcccgaactcctggcttcaagtgatcctcctgcctcagccccccaaagtattgggattacaggcatgagccactgctcctggccaccctttacttttcaaataattttcttcttctttttttttttttttgttttttactaacctagatatccaaaaactctggagaacctactctccctagtgtgccccaccccccgtacctttcatgtgagtccattgcactctctctccctccactccaccctagtacacacacaggaatccgtaaggtctttttaattatgcacagttacaaacaccaagtgatctaaggcagctgttgtgtattatcacctacacaagtaatggtatagatagcattgaacagtcttgtgcacattaactcacttggaagaaagcaaaccaccttttgccagtgtgaccaaacagaaaccatgctctgtaatcttcctctgctgtatctaattctcttttttggactgcctaagctgctttgatttttgtgtgcatatgagtgacgcatgtaatagattattcatttgttcaatgcaggattcttaattgaaagcagtttttcaacaccataagtaaagagaaaagtatttgaaatgagaaaaaaaatcgtgtgtgtgtttgttagccttttgggaaactaagactttttaaatgctttttttcaactaaatgaaaatcaagatcaagttataaatccttaaaagaacaggggtttataattcccattttagcaagttatttgcccaaaacagtatgaatagatggtttatctttagttgtgcatttttgattgagtgtttttaactaaacagtatgtgaggggggttgccatatagactgtagttacctgctaactctgaaatactaatttgtctttagaacacagggtgggggactggacagcttttgaagaatccagaaatacttccttccaaaactttctttacatagaatagatttgaactaatgttctgattttttttttttttttttaacattttcagatagcaaaattactcagtgggaagacccaagactgcagaacccagctattactggtccggtcagtattttcaaattctgcctcttcagtataagattttggttacgtgtttacgtgtttcttgtgtattactgataacggtgatgtcaagggacaacggtgattgagtagttgactagaaacagagcactttgctgccatctccttactgaagtttccaggtgaggtacagctgcatgtgccttttcagatggatttcattataaaggaaaacagcttgataacgacagcagaattaaacatttttcttctcctttataaaagggtggactataagtatagtcaaaattccctcccttcctttttatatgaagcaaaaccaagccctatcttcataaagtgttatcatttctttaggccaggagtagtaaatgtatgccaaaagtttaaatcttttacaactttcaaaaatctgtagaagtttgggtgagattatagctaagttcaggagctggcagagttaagagtttggaactctgccgacccacagtgttctcatggtcccctcatatatgccgggtggaaaaagaatcaattctgatgcaggcgtgatgacctcttaaaacaccgtagcacactgtgttcataaggcagtgtgagaaccccactccctgaagcatcaggagacatttggtatctcacacttgttaacaagtctgtagaatgggaccacactcatcagcagagagcacaccaccagcttttgtcagtggctatacgagtgcagggaggtaatttggaattacaggagttgtactgcgatcagcagaagattgcaaatttgggattcttagaccagaggagcaaaaggaactgaagtttgttatatcacatgctgagctaagaggccagtaggtagatttaaaattccaatttcatggctttaatctgattccattcaaattatgttttgaattagtaagatacatccatttgaaaacttaaaagatactacattgcaaatgtgccccggtaactgactcctgttagttacttgttggatttgtttagtcatttgggtactatttcctaggcaaagtgcccagtagtacctgggtaaaaacagtcaacttttttctctatgcggcttaaacactgccttactctgatgcttccttttgatatatatatattcgcagtcacagttgtttattggaatattattttctcttctacatcattagaacaaggtaaattcaagaaactattctttttaagtgacagaagacttttgacataactttgaagccttttcaaaatatttttatcacttatcaattaccggccgtcactcaaacactgctagtccttattaaatcttactgaaaattgctcagcatcataaagccaagtagatttgcccccaagaaagagctctctgctttctgttaataaaagacccttgtttattccttcatttttattattattattcattatattgctttcaatagaggagaatctgtatttaggtagttatcaacttagtgtagacatttggcctttgttgtcattcagttctaaatatttggcaattttcatttgatttttcttcttgacttatacattatttaaaatatgctttttagtttctaagagtatgggagggttgtgcctattcatttttttttattgatttctaattttattgcattatggtcagataatattgtctagagaatatttattattggatgtttatttaaaacttcattggaagcttgatcactttttgtaaatgttctttttctttttaaaaagaatgtgtattgtgtctttggttgaatatagagttctttttgtgtccattaggtcaagcctgtggtgttcaaattatctacattctcattgctattttgctattggatctaatcaagatagttctgtcagtctctgtggtgactgttgccctgtcgatgttgtctgaggtgtatataactacattctctttctctgttcgtatttgctgtttagcatatcttttctctctcgcgatattttatcttctttcttgccttttgttcaattgatagagtactctctattttattttctctatgtgcttgcaggctgtactttctatttgtattcttatagctctcacattaaactgtgtaacccacatacttgacttagggttaaaatgaatcactgtctactctccttaacatcaggacctcagggaacttgaatgccattcttcccactcccatttgccacgtcattgttgggtggaattttaaaactaccttgctttaaactttcctaatagtcaaatagtcattaatatgttttatcttttttctccctactgtccatactgatttaattttaccaaatgtagacaaatttctttgcccaccattggtttgcccaccattggttcttccatccattttttttctggggtgagttttgatcttagtgaagcctagtccagtttatggttcttactgtgtggtctgctgaccagagtatcagtatcgcctgagagcttgttggaaatgcaagttttcaggtcctaccccagacctactgaatcagcacctctgggggtgggacaccagtctttgttttaactgctctcccagggattccagtgccccctcaggtttgagcacttctgcccagcagcactgccagtgacagtctgagagtggtaatatctcttagtctttgactcaaaaggtctcatttgacctctctgaagttcagctgatgatagaaatcttggttaaattattttccctcagtgctttggagattctcctgcatgtcttctggcctccataaatgatgataacaggtttgctgtcaatctcattgtcgtttctgtgtaggtaaatggctctgttctctagtgattttgaatttttatttgtgtcttagatgttttacaatttcgctatcatcatgtacctatgtgtggagttctcttcatttatcttgctttggactcaggcttcttcagtatggggattgtgtctttcctctgttctggaaaattctcagctattatttcttaacatactgcatttttccgattctctctaagtatctgtttctgtaactcctattggacatttacttctctttcacattgtctgctttatctcttaacttttgtgttttctgtctctcactgctgtattgtgagttattacttagctcttccagttaattctttaagctttttttgtaatctctttatcagttcattgtgtttattatttcagtgactaaatttaattgctcaaagttttatttggtcgtttaaaatttgcttttgtcttcatagttattttgtcctgttctctttatctctttatttatttttgatgctttcatctgcttattatttttaagatatttatttcttagcctctttgagattattctattatctctggtcctaggatcattaaatctcccactacgtctgtagactctccttaagagtgtagattattgcctagttcagtttataatttgtgtgtgtgtgtgtgtgtgtgtgtgtgtgtacatgcatgcaagagggagagagagagcatgagcaagctcatttttttttcctatgaggcttttgtaagtcctgacctgtatttactgttaacttcttagcttgggttcatgcacccccagtcagtataactgtggacctcatacccactttggcacaggcttggagtatggatttattacaggtctgtttctttttgtttttctcccatttatggtcctggacagaaggtaagcttccttgcaacttccctggtccggtgggtagagttttcttgtcccctttccagatgttaggttttaaacaatgactgttctttctccatcatgtagaccaaaggccaagttctgtgtccccatgggagattaaaacccaagcccctatgtctaggtccagtgcccactgatttctctaattgtgagtctttctgcttacctagtacctagagtttctcttcccaagttttaaaaatatcagttctaagtaggcctagcgtttctacatatttttagggagaggggaccctttctgtggcagctcagtgttcagcattcctgtaagttagcatgctctgtgtatagcagatatcactagtaatagcatttagtaagtgatgttcacacatgctgctgtcatgaacactatctcatgttgtgtaacactttcatttttccaagaactttataatcagccgacttgaaactcacagtcgtcccctcagaaaggcagggcaaatgttgttatttccaatttgtcagaagctcagaaagcttattctgttgctgacagtccttgcaagggtcagaatcaggaccggagccccagatgcgctggtgtcactgatgtccccgtgccgggcatgagcccttctgtgcaaggagctccaatgtctcccggccagtgatgatgtgaaaacatttagaaccgacctacacaataaggcagattttcattctgtacccaaaacaggaacacagatttaatgcagagcaaaagggctttaatcaacagatatgttcatttttcacgtagacctattttacaagctaacttgtaagccagaaaatgacattcgagattttcaagtgagaacaaatgatttggtccaataattaaaaaaaaaaaaatgtacgtgtaatctcttcagaagctgcactggaaggatgtttgtcctggtacgttgttggaaagttttcaggaagagaatgtaaaaacttgctcttcttattctatcatgagaactacctctggagagaaaagataatgaatgcaagaggaagacagtgatttttcagctttcacgcatcattccccagaaggagaaaggcttgaaatatctcaacatttccgcccacacctcctcagcccctgccaggagacagagcaggcaagggaacgggcatcataggctgggggccacatgttgaaatctgctccttggggaatttgtcatttaagacagtcgaacttgcatacacagtgatgactgtttaagctttttttccaacattttcaggagtagggggaactgtgatgtaacagtgatgtttggagaaccctcacgaatacaggaacaaacaaaaaatagttgctgggaatcacagactttcagaaatagaagagctgagtcacgtttgttcatccagtcaaattcttccacttaacagtgaagaaactccttagtagagaggatgtgatgcagagccagctgatgagagtctacccgagagtgcaggccttctaacgctggcaggagagagtggaaggaagtcacttttttagttcctatggggtcatttttttcctcatggcactaccacggtttattcattgatttcctattgcctgttgctctcaacagcttgtgagctccaggagggaactgggaaagctacctttggtttatgtactgttatttttctggcacctaaaatgccttgcacagagtaggtgctcaagaagtatcggttgaatggacgagaatgaacaccagaaagtgagaaataaactagagaggaaatcttagtttgtgacgggatgtactgttggtagagcagaaaacatgatctctttattggcttatgtcagaacattgtattctttttcttattttggtggttgtccaggtattaacaaatttataccttgcctagactcagaattgctatgtggtttcatcagactaaacactgcctaaaataaataggatgtgaggtcaaatctgttgttcagtggaaaatcaaagaagactggcttaaaaactaagaaaagaccataggcagtgtaaattgtctatagattgctcctaagctatataaagatgatgtattttttgctctggaattacagagcaaaacactgacgtgctcattttctggaagagtggttgtttgttttgtttcgggttttttatataaacatgtcttaaaactataaaagagggaagttcatgttcttcatttcttctgtttctggtcaagataagtatggtgaaagtgtaaggtttggagtctggagatactagactaaggatcagtatattttattaacttaggccgaaatgataacagcagaagtattctctgctgaaattcatactagtggctaaaaagcaatgagttgttttcgaggctgtcatagttaatgtctgtgtatatgcaaaacccaatcctttttgctcataaaaatatcgtaagctttttcagtagccaaaactcacggccctgactctaagatattgtaagctactttacaaggtagcaaataaagattatttaaatgactacattaacatgttactcctttgcctgaagagatatcacaacttttgaatgactatagttaactcaattcctgagccctcaactggggtactatcactctatttcatagataaagcatttgagatttaaagaaatccttgcccaagaccactaaatattaagggacaaaccttctgacttctaaattgaggattttttgagaatgccatctgcctgattttatattccttgataggagtgtcagttcacttccctttctgctcgttgtatttccccacaaaaattcgttaaaccgtaattagacttttcaaaatgccaacgtaggtcattctgggttgtatgttagaagtatttagccaataactcttacctaaaccacagcaaaaaagaaaaacagaaacaccctgactcatattctgacaaaagtcacttggaaagcatgtttagtttgtgtagcgtaccccaaatggtttctcaaatagcagtatagctgttttcaggggtgaaagctgcattcaaagctgattagccctcatcagttctaggactttcccctgtgctgtgtagacattatctaatttttccatggataatctgagaagtgagaatttacggtttatgactcatgaaattctcttgaatgttgcctcagtatacataaaatttcaggtgtattgtttgcattatctatatttataaatttatcttccaggctgtcccttactccagagaatttaagcagaaatatgactacttcaggaagaaattaaagaaacctgtgagtaatcatgccttccaaaaatgctttgtgttagtcatttgtaagttaccacagtcacttcagtgagaacaacttggttgttacttttatatgaatgctaaaaatattaccttccttttctctctgcactttgatcctcctggttctaaaatctgaattttctttttaacagaaatggtaagtgaaaattaactcagtgttacatatcaaatcacctgaagggtaatttcctatgtaatacataaaaagacaggaatgatttttatgggatataaaataattcagaaccctagtcacaaaatctgtggaagcctattcaattatgcgcagttatcatatttaattaacctggatcccggtaagaaaaatgttcaagtccttccttgtaaatgcaaaagcttagtttcaactacagtatttataatatagtgttatatttaattataataattggcagtattacgtccaaatgtaattttctacttataattatccctggcagtttaaaacctagaaactctaaaaatttttatgggcaacattttaaattataacattgcattttctaatgacacaccatccccaaattgttcaacattgcatcctctgttttactttccgattcctccttagcagttttctcttcaattttctccatcactatggttacacctctagggaggggagagaagcggctgcagctcagaccccctctggtggcctgggctccattgccatctctccctgcctcctcccctcagctggttcctcctgcccgggaacatctctggatggggcacaatgtctgctctcatttaggggttttggtctctgttccaaagtcctgattcaagagcttgcgggtaactgctattgaaatgattctttgccttcaaaactcaaatgatcactgaaaattccacagttttctttgtgagtcatgtcccctggtaatgatgatgactgtggtcatcacccagtctcactctatggctctcacatagcagtgtctgctacccggaaaccatctctgcacattcattcttacagccagaccaagcctggaccgcctctttgcaggaggcagttgccacaaccttggtcaagtgttttgttattttcatgtcagcgaaccatgctttgggctgctttccccacacttggcataatcaggatcccactccccatggcaacaaaatggacttgaggcagcgtggattatatctaccacctggcggccctgccacagttgagcatggataggcccaacctggccaggtggggattattacaggttttgactacctgggctaaagtctcttgagtgaagcaacagatacagtcgactgcctttcggttgccctatgctggagaagtgcccacagttgtttattaaagggggcaaggaggatgttctccttcgcagcagagttctaactttcctgagcatcgctagtggatgccgtgtgtcccatcgtgacacagcaaggctttctgtctgcaagggaaaacccctaaaggagagaatctcagttggaaccatttgtcactgcctgtttctttgaggactgccaacttttctaccatttgctgttgtttttattagaaaacaaagtgtgtatttactgtatgattatgtgttttcttttgtcttttgtgtaggctgatatccccaataggtttgaaatgaaacttcacagaaataacatatttgaagagtcctatcggagaattatgtccgtgaaaagaccagatgtcctaaaagctagactgtggattgagtttgaatcagagaaaggtcttgactatgggggtgtggccagagaatggttcttcttactgtccaaagagatgttcaacccctactacggcctctttgagtactctgccacgtaagtatatggccacacccagtgtgtgtcccccactgagacagttgtatgaatttaaacagaatgaaaggataagcagctcatgagttcgagatgcattaactctgctgagtttgttctctcctcaccccacagccccttgcaagtctagaacaggttctgactctacgtggtgaaatagtgtactctgcgaacatctaacattgattttttttcttgtctattgggttcatggagttgaaattgaaaacgtggataattatgataaggaacaggaggcgattttcatttgcagtgttcaagaggaggacttgtcagtgttagaattcaaaaacaaaggaggtgttttttgaacaagagtcgtttctgaggtctcctgtgtaaaggcaaattgtaaggactttgaggacctaggaccatgccctgctcctgtaaggaaagaaccaggtttccccttgcattaggatttcatcattgccaggcttggaaactgaggcagactaaattgctttctgagcaattaaacatcagctacttccaggccagccattcctccttcagactctgaatcctccaagggttgggcagtacccaagcccccagtagaatagtcattgaccttgctgaagggcatttgtcatcactccagccctgggctctaaggggacgtgggttcccccacatctcccacctggtaccagtctcctgggggctcatttggaaggccgcctcagtacattcttcctggttgctctagccaagaattgcccaattgatttgttgttactgagtcccatgagaaagcccactatgtacaatgtatccaactattgaaggtggagggcagggtggagagagacaagatctttacctcttctccacattttcaaagatacccccaccccggaggaatcagtctgtgatcccagtttgaaaactactgatccacatgattgtgaaccaagcaagatcatttggacaaatctaaaaatttgcaggtttgcatcattgagagagccatatcctgttcctaatcccctcgaggccttttcagagcagagtagtggtcagaagacagaccaagggttgggcccatagcaaacatcttatggccaagccaaaagcctctggaaggaattaaacttccttcatcacagagacgacctaaagtactcacatctttgggaatccctgcacagcccctttattatgtggcgtttctcatctccccaagatatttggctgaaccatatgaaatagacacttcgtaggtcaaaaacagtcaaacatcagcgtctcttatggtttaattgactttagagggcacatgcgtcagcctccatggtgggtcacggttgagcatgtggtaagtcaggtcctctagcccacacattttcccactaggtacagaatgctcgcagggacactgtaaaagttgagtgacaggtggcaaacaaatatgcaaaatcttgcatttgaaagtgtgattgggcttttcttctctttctcctcaaaagggacaactacacccttcagatcaaccctaattcaggcctctgtaatgaggatcatttgtcctacttcacttttattggaagagttgctggtctggccgtatttcatgggaagctcttagatggtaagtcttgaagtaataaaaataggtcagtgctgcttgcggtttgctagtaggtgtcttatctttcgcatcatgggtttttaagcaaaagcttcactggtttactcataaagtatttttatgttttgcccataatggatgtccttttctctggtagcttattttgggcactgaagacatagtgtctacacacagttaaaaacaaaagtttttttttaacttcagtgtaaaacacagaacattatgtatttatacatttgtatgttttctggaataactttagtgaaagcaagatttgataacagatggaaaaactaattgaaaagttaattaaaatgatctcatctatctaatatcctgtgattattgcgtttgtccccaaattattttttaatttgaagggactaaataatttcaaaataatgttactgcttagctaagacattaaccctgaaacaaataacacaaaataatttcattcttatttaaagcatatagatcatggaagaatttcaaggtaccttgaaagttagaagtcaaaccctctacctggcggtatctataggcttagagacttctaaaagatttggccaattcaaaatagtgtccttaagaaaacactacagaaatcatcagtgagaaaaaagcatcagaaatactttttaagagcctggaggtagagtggttgaggatgggaagagggagagtaggatttgagattgacattgcagtaacttataagaaagatatttccaagggaactgtgttcattgcatttatagagccttagctattctaataaataatttgtataccctctgtacttttcccatgaatatgtttttactgttaattggtagctgatattgatgctctgattttgttgctttatttggtagcagggcgacagtaaacactttttttcctctagaaggaaactaaaccacacactctttccatgtatgtatagtgtgaatatattttaatttccagctttggagtcatgccatagattgtttcagcctgctccaattcactccaactttctcagaaggtcagtttagtcaccgtatgcaagtgagaagatgctgttagttgctacagtgtctttaataccctctctaacagggggtaatagagaagcataagatatgatcctgaccttagtcagcttatattttagcggggggaaaagagatgagaacaaaaccagaagaatcacagtgatagtgtctgagcagaagggagtgcattgagtcctcagaggagaaagtgacttggctggaggctcagggaatctttcccaggatgagctgcacctcggaggtggggtagcatttgagcgttcaaaggctggggtcatttcagatgagtgaggaccagcccagagtcaaggccttgtggaagaagatgggcggaagcaggaaccactcagggtctcaaggagctggctaaagtgaccccgacaagagtgatcacgatataaacctggaattgcacatttaagagtccaagtgcacatagatgggcctagtcagcagtgtcttcaaatttcccacagatgggaatgtccctgtcggcagggctcattctgcacatctgtccgatgggaatgtccctgtcggcagggctcattctgcacatctgtccgctgctccccctggtcggcttcatgcttttacttccccagacactggagtctattggagcctgcatagggccacgctgagccggggagaattggcctgtactgcagagggtgggtgcctggtggggggatgaaggagcagaagcaggagcctggggtgccaggtctggtggggtcaggaccccctgtgaggaggtgcgtgatgcctttggatcaggtgaaatggaggcacctgcaggacgcctgaatggtgggaggccgacctcgctgctgttgcctccctgaggcctctgccgtccctccgcggggggttgcacaggccctctccggggccttccccatttccagcctgtccccttcctgtgctttctccccatcgctgcccaagcaatgataacagaagacagatggaatttcacctggcctttcactgactccccactgccctcagagagcaccccaactctccagcaccccatgtgggctctgcactgccggccccttctctggcctgtctacccgccctggcaaacggctggcaagtccccagccttgttcctctgcttagtgtgcccttttctcccccaattcctacgcctgatttgcactgcggactctgcttgaccttgaagctcatctgtcacctcccagaggcctttctggccccactctgctgcgccatctctcttagcacagctgccctcctcatgccactctccccctgatctcgcctcctcgcttgtgcaatactgtagaaggcccttggttactccttcatggtttctcatttacattgaaagcaggttaatcttttctttcatgctctgatacatagcagtgtcaaagacctgaaactaaacccagtgtttaccgtgttttaggtttcttcattagaccattttacaagatgatgttgggaaagcagataaccctgaatgacatggaatctgtggtaagtaaatgcacgtcacacactggccatcaccgggcactcgtgtcttatgagaaggtattggagagccatatttgtagtctcagccacttttatgggtgttgcattccatgtgaacaacaggagacatttaattgcttgaaaagttcattgatctaattcttgtaataaatcattgttcacatttcctggaaccatggtacctagggtggatacatccaaatcccagttgcctctgcttacccggcataggacttgtgtgaacttactaaatccaagagacagctgaagatctatggtagcctgtgttttctataaaaactgctgctgctgaatgtttagagcttcatccgctctccctctgtttcctgacatcataaaaatggcagaggcaaaggtcaaaacaataggaagagtatcaggcagacgtcctagacatggatgagtgacgccacagctcaggcaagtgaacacttgagacgttctccaagtagtgatttgggttttcatgttgcatttaacattaattttacctagacagaccattttagagttggaaggattttattttttttttattttttttattttttgagatgatgtcttgctctttcacccaggctagagtgcagtggcgcgatcttggctcacttccgccttgcggattctagcaattcccctgcctcagcctctcagatagctgggattacaggcacacgccaccatgcctggctaattttttttttttttttttttttttgtattttagtagaaacgaggtttcgctatgttggccaggatggtctcgatctcctgacctcatgatcctcttgcctcatcctcccaaagtgctgggattacaggtgtgagccaccgcacccagcacggatttgctataaaacaaaaattgatgttctttttataatatacttctgcttctgtttttcttttaatgtacctataccccacatctacctccagagtgtatgggtgtttgcccacacgccagcacacacacagggccactgggaagcgcgtttgtccatttggggtatttgcagctcattcgtgtttgctcacttgagttaaaaagcccctgcatgatgtcacctgcctgtgataccaactgtattttgggcacggttgggtagatgagctgtgtcctcggccctgaccagcgctgactcagtgtttctgttgctcctcattgtatgaaaggagaggaagaggccagcagtgcccttgaacccactgctggtttgccagtcatggtgggttgggatgcacacctgtgattccggtctccactttgaccctgtgtttgtgctttctgctttcatcactgtatgatgaagcagctaggagcacaggaatttctcttaacgtctaactttataccacatgctgacagttagtgcctaaagtacagtgcgtgtattatttttaccctcttcacagcccgtcgtgtccccagcaggagagaccgtggagggaccagggacaggcgcttaggcctgtgactgatcctctggattctgaaaccagagcagccaccctttttgctgacattaacctggagagtgatcaaagcacaagaaaggggataacttaaaactattggtatttacttagttggaacattattttacttatttatttttttggcgatagaatcttattctgtttgccaggctggagtacagtggcacaaccatagttcactgcagcctctatcccctggcacaagtgatcctcctgtctcagcctcccaagtagctaggaccacaggcacacaccaccatgcctagctaatttctttttttttttttgtagtcatggcgtcttgctatgctgcttaggctggtcttgaacagcctcaagccctcctcctgcctcagcctcccaaagccgaggattacaggattataggcatgagccagcaagcccagtctagaacattctttatccttcctgttttcctcagatactttcactctttttttaaactttatttattttttatagagacagggtctcactatgttgcccaggctggtctctaactcctgggctcaagtgatcctcccaccttggcctcccaaagtgctggaattacagcgatgatattttcactctaaaaagatagaaagtatattgaccagcctggccaacatggcgaaaccccgtctctactaaaaatacaaaagtcagccaggtgtgatgtcacacgcccgtaatcctagctactcaggaggctgaggcgggagagtcactagaacccgggaggcaaagattgcagtgagccaaggtcatgccattgcactccagcctgggtgacaagagcgaaactccatctcaaaaacaaaaaaaaaaaaaaaaagagagagagaaaagaaagtatacttatgtctgtatgttaaattttgtagaccagtatggcagctccatccaccatccagagtaggtgccttccactgtgcatcactaaggacaggatttaactgcaagctcattacaactaaagcagtttgtttgtttatagtttaaagaggaaggtttggtttaggtggagcaggaaacattgcattagtaacatatttcttgagcattctgcacagaattacattagaatgtaattaaagaagtcaaatgagtttgtattttggggaaaaaatgctgaattttcactcctgtgtcattctgtaggatagtgaatattacaactctttgaaatggatcctggagaatgaccctactgagctggacctcatgttctgcatagacgaagaaaactttggacaggtacatgtgggtaaccctgggaactcttctttagctttcaaggggcatttttcttcttgacgggctgtaacacaactttgctggaccatcagaaacaaccagcaggagctgcaggtgttaattttcatctcattgtagcagcacctttttgtcatgccaagacgccacactccaattacaaccatttctctcttccagcaaagttacagaaattccaagaggccttggggcatgaaccagcacctcttctaatccaaagcaaatgtgaatgtttcatttgtgcctcggttttagaatttaggtacttgaaaaaatagtgagattgttgacttagcgatgtaaatacatgaccaggagtgggtgatgttggaagggccattggtttttctctctgttttatggttctgttgtcatggcgacatttgtcttgtgaggctcagcatggcaggctccggtttttctaccattccctctgctttgcccccacgctgttattcaggctggactaatcctcaaagtcagtttcagactggtcagcagggatttggatgggccactgaaagtggatttcaaaggtaaagttgcctgcttggaataattctcatcatgctaaggatctatgcgatgtatttgtctcaattctgaagcctttgcttcatctgccactcagtaataatgatgcagcttgggaggtgttctcaatgtattctctgaccctggtacctgtccttccgcaaaagcccagaggtatttcccatccttcagactaaatctccacggctatgaaattaattagaccatagaactcattgtaatggttgccctctgaaaaatgaaatagacgtgttctttattgctagatgtcaaagattgctagagaatctttgagaaaagaagctgatgccactagaggatttaatgacaactgagggtaaaaattgttggataagaaaataatcacattaatatcagaatcacttgttattcccatgtcctgtgtttgagccaggagagttcagtctctagtgtgagtcctggtgtgggtggaacctggggagtccatagggcccttcagtggctaggcaaggctcagagaaggacttcaggcaccagaggcaagagaccttgtggcttaatgtaaatgatcaagtcctttaaaaatctccttttgtgccccctccccactgcccccctttcccggcctcctccccaccccactgtgttgtgctttatgcctgagaatccttacagacaggcggacactgttctcctgcacggggaccttgtgatggggcagggaggggtcttttcagctgctgcccctctggtctccagcagcctccccaggaccgagagtactggtgtctccagccctgtctacctccttcctctgctgcctttgacacaaatagctcactccccccagagacacctgcaaggcacagtgcctttcactccgggctctcacccctccccactggtctccagtcccctggaagtgcatgctcctctgctggccctgtggatgcaggtgtcaccctgccagctgtcctgcacccgctgcttttttgtctcacccttgctatctggatttcctcatcctacctgtggctccggctgcacccatctccgctcaccaccagcctcttatctcaggccggcgtctgccttccagcctccagaattcccaggtctaacggcctcctcaactgcttctcctgagaggctcacgggtcccagtgctaaagccactttttcctccccagcccccacatcggttatggtctcatcagtgccaccactgtcccctcccacctgacacttgggcatcccctcagaatctccctctctcctcatgccatctcccctcctcatgccatctccccgtgcccaggcttgctgtgccccgtgactccccgtccttggcacgtccctgtctgtgcactcccctagccctgctccgatcacttcttgactgctgttctcacagcctcctgtcggccgccccctttcctgctttgctgttctccagtgccctgttctctagtgcctaccctgttctccagtgccctgttctccagtgcccgcctagctgtgagccccttatggactatttctgaaatgcagccctgaaaatgtccttcttctacttggccatcttgtgaccttcagcataaatgaaaactgttagcatggcatatgacccctcataatccagacctacccccctctggcattaccctctgacacctccttcctgtcaacctgtcaacaaacagtgtgccttcaagggtttccccagagatgcttcagtgccacattgctggctcgacactgcccactctgtaccgatgcattctcattctctctcccatcacctctttccctgccatcctcgaggtattgactgacgtgctgtgtgctgtatgccccctgaggtcttctgggtctctccagggctcagcatgtagttgatgcctgccagtgctcattgagcaaacgaatgaggagtgctaacctggcttattaaaaatatgaataaggtggtaagtaatagaaatcctaagtgtgagaaaacaaaatcagtcaagtcttggtggctttttttaaaaagccggacctattgaagggtcttaaactgccaattttcaaacgattagacatggttagtcaccctggaagtatcttcctttcatttttaacatatgaaggaaggagtggaagtaaagaaccaaggaagactgaaagtcagtcttgtgtgtcacatgcattaaaaaagtcttttcgtagattcattcatagaaaaccatatgaccaaattaacccaattcagaaaactattaagccacaatcagaagcaaatgatctgggaaaccttcctaattacatttaaatgtaattgtttccacctcataaatgaaagtcaaacacagggtgttggagtttttaagcaggcctctaataaatcttctgatgatcgttcaggccagattttcattaaaaacagttctcagacctcctcgtttaatgttgtgaattcttctgacttttgggtaggatcaagtagagtaatgcattaatcaaaacagacccatgagatgagtaagataagaattaggtgcccagtttgttgaattactgccttgcctttttgagagagctatcctgattaacagggaactcacgtatttattttgcactctgggaaggaatttagagcaagttaaatagctgcatatggatctcatctcccatatccagtccatcagcgagttgttcacacacctcccaaacctttctcatttctgtgcattctgccgatctcttctctcactcacacccaagtccaagctcccatcttccccactagacccccgacccgtctctacatccaatatggcttcttataatggcagagtggtctttttggaatataaaaatgagcatgtcattcctctgccagaaaccttcaggggtctcccctgcccttgagataaagaccccaaccttactttgtcccacaaggtcctgcgtggcctggctctccctgctcctcctccagactcactgtgaatcacaggccccactgggcttgtccaacacaagccccttcctgcctcaggccctctgctttctcttccatctgttgggagcatactccctcccagtctcagttcaggtgtcccttcatcagggaagccagcccttgacccagaccctatgcatcttccatgcctgccctgtggcatgtaccacagacgactttgcatttgtctgagtatgtttgtgtttagtgcctgtctctcctgctcagcttcctcccgatgatggcagccgcatgcctgccctgtgctcactcactgtcgtgtacttcccacaagcactttgcctggtgcatggtgggtacttgtagttgttgatgtggaaatctaggtgttagcatgatgcccggacaagcctctcacctctttggccctctgcaaaactgttgactctgacccagaagaaagcccattcctccccaatgccaaacagtcaagtcacttccacagtggggcaaagcaagtgcagttgtcatggggtgaaacagacatgcagtcagccttccacggtgtttcaaccttctttttttttaatttcacagttagaaatatcagaccatgaagtttggtagctgttccttcatgtaatgaagctgcagctgttgccattattttgcaatttgttttctttctgattggtaagaatctggggctgctggtttctagggcctaatatgaaagtttccactgaagaaatgtcagtgtttgaactatgatcctgtgccaagcaggaagaataagccgtacccccattcactgctgtgcacacatacctgcccccaccgggaggaggggcccttttagggctgtaacaagtgaaaattctttattgcaagttcagcagagcaacgtctaatttggttatgggtttgtttgtttgtttgttttttgagacagagtctcgctctgtcacccaggctggagtgcagtggcagaatatcggctcactgcaacctctgcctcctactttcaagcaattctcaatgcctcagcctgctgagtagctgagactacaggtgcaagccaccatgcccagctaatttttgtatttttagtggagacaggacttcatcatattgcccaggctggtctcgaactcctggcctcaagtgatctgcccacctcagcctcccgaagtgctgggcttacaggtgtgagccaccgtgcttggcctgatttgattgttttgaagagctgccagaagtttcaagaggctgtgcagtagttggagggagaccatgggcagcagccatataggaaggttctttaggatcgggtcgagccagtctccataggaatgattacccaaagggaacaaggaggacatcatctcagacattgaagtggttagtggccctcccagaagccacagcacattccacaggtgtactgtggatctctctgttaagatttcatggagagaggtgggccactggcagaaagaatctaaaaaggctctttagggggtgataatgaattaaaaggtagagaaacacttgggggaaggcagtgagtgaaaaggcagaaatggtcaatgagggagagggcagagcatgtcctggcggaagccaggagccagacgaagagcccggagctggaggtggctcccaggagcgctgaggccccggccccttcaggccagtcagggacacagaggggtggcacctggggagacgggaagtgggaaggctggcatggacttgctgcctccctgctgtcggtagttgcgctgctggagaggctggggaggatgaggaaggcctggttggtggagtgatgggggtgcagggtgctgactgcccccgaggccgtgccctgcaggatttgtgagcacccatcagtgggcgtttgcccagcagtgctccgtttccaagaatggagtctgacaagcagataagccttgctccacccaagtccagcatattccatatgagccaagctgtttctcagcagcttcccaggcagcgcaaagcatttatggagggtcagggagatgtgtgggaatcgggttgttaactggccaaggcagggagtcccccagaagttcctctgatctctgtgaggaagagagccaagtttatgctggggccagtagacttaaagaggaatttttctactgcagtgttctcccacgagctcttgctgagcgcctgctgtggctgggcattgtgttccttgtgtggggtcctccaggagcccaggcacaggagggcgatggcccagaaagccctgggagggcggggtgtgcgtttcgtggctgaaggtggcaagaatccaccccacagagcaggctctgcagactgctcaccagggagcagggcccctgggtgccagcaccagctccatctgcagttcgctgtttctccttggtcactttgctggatttctgcctccgggatgctgtccaccctcatgacgggggccagggcgctgccgcagcacctataggagatgcgcagggcagagagcagcccctgtgtgacgctgccccgatttctcccacttagggttgacactgtcacggtaccacccggtgttcagtgctgaggacatacagtccctcccctcctgtggtggcaacagctgatgttaagaagggacaaatttgggcgaaaggagaacacaggctgtagttagagtgatggtgagacaggaatgaaggcccgcagggaatctgtgtgcctggaggcgagcattagagtcagatagccgcctctccaacccccatggagcctcgtgcccaaccagcaaggactctggggcatcggccagtggcagtaagccagtgtggtgggctggacaatatgcctgcactgcaggagacggtgtcacgatcagcccccgacagccggtctcaaaagtggaatttgaagagtggtcattgcttctcatgaaagtgtcgccgtaactcatgaaagtgtcacctgtaacgaatcctagagggatgcatttctgtaccacggagggctcgagccgagacaccgagatctgggggcgtgacccctaacctagtagcttagggagcagaattacaaacccctcatcctgtgcccatccttgggccctctcctcactcccccacagagaaacccagggtcagaatcaaccatgagacttgacggctgcccacaggatgatttactgctgtgacctcatttagcatgggttagtgtgggcccattttttcttttctttcaaaaattatttatttatctaattataaaatattaacctccataataaaaataaagccagtataataaaaatatgtaaaataaataaatgtcacttattcccagtatctcaagaaaactcaggattaaaatttttatttacattttccagaattattctctgtaagcacaaaacagatttttttttttacagaagtggaattgtactctgcatactgttttcttttttattttatttatttatttatttatttatttatttatttattttgagatggagtctcgctctgttgcccaggctggagtgcaatggcatgatctcggctcagtgcaacctcagccccctgggttcaagcgattctcctgcccaagcctcctgagtagctgggattacaggcgtgagccaccactcccagctaatttttgtatttttagtagagatgggttttaccatgttggccaggctggtctcgaactcctgacctcgtgatctgcccacctcggcctcccaaattttttttattatactttaagttctgggatacatgtgcagaatgtgcaggtttgttacataggtatacacatgccatcgtggtttgctgcacccatcaacccatcatctacattaggtatttttcttaatgctatccctcccctagccctccaccccatgacaggccccggtgtgtgatgttcccctccctgtgtccatgagttctcatcgtttaactcccacttatgagtgaagctggaaaccatcattttcagcaaactaacacagaaacagaaaacagttttcaaattaatatatcacacataccttttcatgtcactgaatatcagtctataacattctaatgactgtgctgaattttactttgtagacgtgccatatatttttaaccatgccctgttggtagacgtttaggctattttagtattttctatataaacatataattctgtataaccctggaatactcacatatatacataatatatatagcatacaaatgtataatctggaatatacattttgtgtacttgactaatttttttccattgctataaactccaaaagagaaattactgtgagaagggatatataattttaaaattgtgatgcctattgccaaattataatatcttcagaaaaagattgaaccaattagactcccacccacagtgaaggggagaaccagttctctgcactcagcaacactggcttattttctctctcatccctgggcgctgcttttggaggaagcagagtgttttcctccttagccctcccctccccactttgtctgtggccgacccgctcattcagtagctctctggaaattacaactttcaggcaacaccaaagaaggctctgtgatcaaagagagagggctggatgaatgctggaaggagtgtattacagggattgtggatgcttatctacttgacctccttccccttccctgtgcgaggggaaagggtgggaggaaagattcggcttgagtgtagccgagctgtaccgaaagccttctcgataccaatgcctgggctgggatttattaacttgtcattgacgtggatctgataagaaaactcttaccgaaggaacaacaaggcagtctggggaggaataaatggggaaaagaagaaaagccaacctgggtttattaacacatagaacaaaaggtatggatgagcactgtccacgcacctctgagaaccagccacgaactggcagagtttcactgtagaaacatccccaccccacccccaagtggaagctgtttggcatcctccatccccaacacggcctgtacggggcaggagcagatgacccctgggagaaaatgggatgcactgggaagatggcagctagaaagggaaatggagaaatgaaggatgtcagcaaaaccggaaacgcagcaaagggattaaaattcacattgggcacagtgaagagttcagttgactttgcagaaatggaaagcatagtggaaaaatgagattccttcctgaataaagagaaaaagagaatgtcgagggaccggatggatgatgaatgtgttttacgttgaaaagccatctcagtgtgaatgggaacaagagccagtgcgtggagaagccgcatgagagacccaggtgtgagtgctcgggtcagaggggctcaggatctcctgggtgcaggtggcaggaccaaggaacccctggaggtggcctctgccagggcatagagttcatcacaacatggaacctccatccctcctgggtaccaccctaacacttactttggaaaaccctctcccctggcttggtttactctataatgcaaccagcaggcagaggaaaaaagatttagagggaaccccaccaaaatagtggcatggctttctttcagtaggagaggtgtaggtgctatatttttccaccttttttccccaaaatttctacaatgagaaaaaaacattttattttaaaatagtaggcctctctcccttccctcacgctggttactgtgctatgtggccttatggtaagctaggtctgggtcagggcataggagaaagggctgccctgattgcagctgcttttttcatgatcatgggtggtgctaagggaggaagcttcagggcagatgagtgaggagaaggcgtccaatgcaaataaatgccttcaaaaaccagataaatctgtctcttcagcctggatccttaagcttctttcttgtctttaagtttctgtttgcatttttgaaagaaataccatgcatcctttttttatgactagaaaatataattttcagaaacagaatgcattagaatttggatttctggagtcttgatgggtgtaccctgttcttttctctgttaaacataattagtttcctgataaatgaatagcagaggaaaaaatgttgctcttcattattgctaatatatgaagaataattaaaagtcataaataaccataaaacaatttgcctttaatgatagcatctttaactgtgtaacatcctagcaaaaaagcctcattggacattctcttgtgcacagagcccatttgccgggaaatatttctgaatacatgttgtcttccctttatagtaagacattgtcactcaataataatatgcaagataacttcgtgatagtaattgttgttttgtctttgtaattacagacatatcaagtggatttgaagcccaatgggtcagaaataatggtcacaaatgaaaacaaaagggaatatatcgagtatgtatacacatatttactgccttttctttgaataattgaaatgcatgtttggtcactgtcccttgctgaaacagctcatgcatttattatgggcatgagtttattggtcagttttcaacaaggtaagttcttttctggcttgggctaatgggaagttgaatatgggatggaaagtctgtcttgtatcatgactccattgagctgccctataaaggagcagaggagggagaaaaggtctatattattgagtaatacggcaaatactcttttggaatatgtggatatcaactaagatttagaattgcaacggagaaccacggtgtcagtgaccagcagggcaaaattaggaaccaacaaagaaaaaatattttgtctctctcccaacttcttttccataatagaaatgtatagaaatagttaaaatggataggaagaattcagcatgtgcaaccctaaggaattctttctggtatttgtaatattcttaactcaacttcagcctcagtggaacaaaatgttgagtctttttggaagtctagctgttaagtgattctaagacatttgtaccaggcagaagtttttctctgttgggcacgttacgttttcttttttagtgtatatgtgtgcttcaaatgcataactctgggatcttccaaggagatcccctggtgcaggggtgaggtgagcactgcagtgtgtggttcctggcacctggtttctgctctcttgtgggtcgccacagtggccctgagttcctcgtttgcattcagtgcttcgtttcaacaggctaggctccctcctttcttctcatttggaattggtcagaggtcttgaaatcagacagctcttgcattgactgtgggtcttagcacctttcagtgtgatctgcaaagaaaaacctactgtccttcctaattaggaagaaacggagcgtgttagagtctctactcagagatcctggcaaggagtggaactattacatggcggactcttttcactctcaagttgaaagcttgttatgctgaatacatagactagaaataaggtacctcggttcttacctggccacattaattggcactctcgttctgaatatgaacaatcttagctgatgacatcctggcagacaccattgtcttccttcagaaagtacagactgtgagtggggtttaaaaaatattctagctcagggtgacccaggtctcaagtctgaggactctgacatgcgtggtatgtgtcttgcatcattctttgcagttaattcttttagggttcaaacgtggtgggagtcagggccaggcagggttccagctagctttacttttaaaagtataattgaaatcaccaactgctccctgatacctctgctcccctggtgccagaagaatgctgttgagctgttcattgtagcccaggaggtgccacctgagaggccgcacagtggttgtgctgcaggctggtcctcagggccattaccatggttacagtgtaccaccccgaaggtgagaacccttcagaatgatggaatgcctgagatgacatccagagtacatttgccttgcgatcagttttgctgtgcattaaacactgtcgcagggaacttggttttggtgaacttcagttgcataaggaggtcttaccattcatcctctaaattttggcattaaattatgagtgcaaatcattttgctgataaagcttatatgttattgttgaatattagcacattggatactagaatgaaatattagataactaaatgcattgtcctgagtacactttacaaatatgtatacatatatgtgggtgtgtatacgggtgtgtgcatcttatacatgtatacctgtgtgttcataccccatgaacttttcccttttctccatgttgtcacattttaaagcagttaaagcatttaaagcattttaaagcagttaagcatttaaagcagtttaggtcagccaaaccttgatgtgggggaagttaattactcttttgaaatctccagtgagattttaggtttttcacgggtgttccagggagtcttgaaagaagccatgaataaactaaacagtgggggcacagaggagaccctcccctctgctctgctgtcgtggatggaggagaagcactccctgttgcggagaaagcagtgagcactagtgatgatggaggtggttcaatattgtcctcttttctcctgcagcttagtcatccagtggagatttgtgaacagggtccagaagcagatgaacgccttcttggaggtaagccatgctggccagggttctctgccatgtgcctctggtcccgggtcgatgggggatcgcgcttctcctttagctagtgtggtggagctgatcagagacagaggcgaggctggggaccctgcaggaagaccgggatcgcacagctcacaccgctggccagtctccagcacaagagtgttcagccaccgtgccgccacctccttttccttttcacgggttctcctgcttgacttctcttatttttacatttgtcctgtttttaaagaggacgttttacagacttgatctagaaccattgtcttggagtttcaggcggtacccaagagaaggctgccttttgctgcagtgacaggttccaagaagcccgagggctcagagctgaatgatgaagcgcagtccccaaagtgcctggccacccctccctccctggatcactgctgcctgggcttgattgattgattgattgattgattgattgattttgagagagattctcactgtcacccaggctggagtacagtggtgcgatctcggctcactgcagcctctgcctcccgggttcaagcaattctcctgcctcagcctcccaagtagctgggactacaggcacgcgccaccacacccagctaatttttgtatttttagtagagacggggtttcaccatgttggccaggatggtcttgatctcctgacctcatgatccacccgccccggcctcccaaagtgctgggattacaggcatgagccgccgcgcccagccatggacatttttttttaatcccctgccctttttctttgtggcataattcattgcaggttctcttctatacagatacatggaaaacacattttcttaagctgagtttttatttattttatacccagccacctcatgacagcttttaccctgttacagagcaaagtgggcactgcccagatcgaacttttaatatcagggatgctcccaggcccctagcagtgggtgagggattcatcattttaaacagtattccacttggaccaaaagcaaaattctttcttaaatatgatatagtattagttacctcaaagatcacacaggaaacagcctcgtgtccacgtgactgattttctctgcactgaggcagagctctcgtggggtgatgctttcccttcactcaggtacctacacaggatgcgtgaaagcccgggcagcacactcagaaacagctcggggccttagggacttaaaatgggaggacagaatggcaggtttcactctttatttagataagaaatcccaggaagcagattcctgggccccaccgcaggcggtccacaccttcagaaacgcggcgttcgcagcgcgcagggcccagcagagctgagctcatcctagatcacgccacagttagtggtacctgggaactggagcatggttttctgtacgcacagtgtctgcacccatcacctgcctccctctgtgtttcttctccctgcctccagcacgttatttttaagcgtgtctcttacacatctgtagcctgtgcatcttaggacgcactgactcacagcagtgttataaatggcttttggaatccaccctgcctacagtatcccatattttcatcaggtttcagaaattactccactacttgaatcttctagattctatgctttttcgaaactgttatattgtgactgtgctgtttttactggaactatagttacttgatactgtcactgacataggaatcatcaggagagattatatttttttctggctaaccagaaaagtttgtttttcctgtgaaattttttttttttgaaggcaataggtgtttaagatgttttttttttttctttcagggattcacagaactacttcctattgatttgattaaaatttttgatgaaaatgagctggaggtttgtattataaacattattttatgtaaagtggattttttaaagtatctctcattactttacaagtaatattttaatattcttggatccataatgtcctagagagtaactttagatgaattatattacatgtctcttatagggcttatttgccaatgtggttctattacatgtctcttatggggcttgtttgccaatgtaggagtaaggaacagcaaaaataatcagctgtagttgccttgtccatcagagggcagttctggaacatgcctagtaagtagaggccactgagcagagctgggatcatggccctatgcaccaggcgaggcaaattgccacaacaagtagaaacaaggtttgcagtagccctctggacagcagaaacctgcttacactaccagactggccaagtatcctctgctgcatccccatccacccccaccgtggcagccaaatgggggtcttggccacaaggtggccgtaagcatctacttgggcctgtagaacgacgtctcattgaacttgaagtggtttatgttgagtgaggaaaaatgtcagaaggcaacagggttgtagcaaaaggtagtttagtgattgtctagttcagcttcttggtgttgacatagttgagtaacagccattttaaaaacaaaggaatatctcgccctttgttgtgtcgagagaaacaggggaaagactgtctgttgagaagccgttggtgggactcggccatttgccccgtccatagccagtgagtgtttcccatacactggccttctatacttttatctcaaaacagaaagttcaagatcgatgatgtctatagaaatcatatacctcaagcctttcctctgataggtgggaaactgaggcagagagcagctgggtttacccagcaaggttttggcacggtcaggcctaggaactttatttccaggcttctggcttagttctgtttccatttcattctggtacctttgcataaatatcttccatttgtccacaggaaacctcccctgatggagagttgcataataggaacggcaaaccttagactaaatgctaagtcgaagacccagttgtgccttagcgtatgtctgccattcttaggcctctgggcagatgaggtgatttgtcatcactggaattgatcaacctggaggagagtcataagcactaattcttttgtgggtagggagatgcttttagatattcagaggaataacctctcaggaggagaagcagccagggtaatgcacagatgctgctggagcgtgagagaatccacaggtcccatgcgtaagactagaggggtagggaggacgactgtggcatttttatatccgatacgacatgccgtggcttgcgcaaggttcgaattgagctgccctcgtgactgctgcctctgtgatctgctatggcaggtggagcctggaacaggtgtctgccttcctctgttgttatgatttgctagcttaccttcgcggcacagtgaccacatgctggcactgagggtggtcatttctcagtgtgtgatctcgcacctttcacatcctgcttttacatctggtaaattttcttcctagttgctcatgtgcggcctcggtgatgtggatgtgaatgactggagacagcattctatttacaagaacggctactgcccaaaccaccccgtcattcagtggttctggaaggtaactccggggcccagccccagccggtgtcctccacctgaggcaggattgagggctgtgtggcgccctccattgtggtctgacttcaggactgatgctggctttggggtctgttagagcttggactgctgggggagggaagaggcaaactgagccagcagccccgtggtggctcctctgtaactgtagcagacagctagacttgaatgaagttggtccctacaaaagcacactggccttccttgaccacctcgtgaaagtgacttttatttgagggactggtcctccaatgcgtaaatagaaatggggggcttctcagggcagaaacaggcttcagggatggctttgcaagatgccactttctgttaagaagtcgttttctcaatttttaaaatatattccaacaaatattttgatctgtgtatctttcaaccaaagataacacaacatttgatttattatcttagggccactgtttgtatcctgttcagcttaggagggaagtaaaataggaatgggttagtccaaaggagatatagtaaacaaacttaaaaaaaaaaaaacagttatcccccaaaaaggctgattatttacttcaccccaaaaaggaatcatttaactttttcaaatttatttttatttatttatttatttattttaaagatggggtctcactgtgttgcccaggctggattcaaattcttgggcttaagcaatcctcctacctcggcccctcaaagtgctgggattacaggcatgagccaccatgcccggcctttttcacatttctaaatgccttttattactatttcaaatgccagcaggaatacagagataaaaaagcaaaatcttcaaagcctagtccaggtctcacttggcttgttttagatgtttgcctacagcagtccaagtggcattaccagtaaagccacctggattcccataataatgcagatatgtaagatacacagattattttagaaccccatctttgcctttgttgttttgtttttgttttgttttgttttgtttcattttataaaatgatgtcttctagggaacgtgtctacaatctgaaatcccatctcataacctggcttccccttgtgatgacaaatcttaaatactgtatatttataattggcttagggggaactggtaagcctcgaacacagaaacatgagcttggtgccatcagagagtttgctttttatatcatttattttggcctattggcagaagaagaaagagacggacattgtgatcactcagtctcttagattagagaggccagctagtattgtggccataaaaaacctactcagttttcagagtcaactgtctaggtcttacattgcaatataaataagattaagttctgcctgcctgcatgacagcagcatgtgccatgggtcacgtggggggtataatgaccttctgcctctgttcataggctgtgctactcatggacgccgaaaagcgtatccggttactgcagtttgtcacagggacatcgcgagtacctatgaatggatttgccgaactttatggtgagcaggataccattggattcagttgtcctcctgggaatttccagccaggcatgaactctggcccaagaaccctgccgccaggcctctgcagaaggctaagtttcaggacagtgtgccatgcataggttccatgaaagttcaatgaaagtactgttatctatactttatatagataacatggtgcttctacttcgagggattggggggcagtttgtgaagaggtccataaggctgctcttttttttttttcctagtttagttttttagtaaatcgttaaaaactaggttttgtagggtcatttatatggtcgtaaactgaggtataaagtcacctccagtaggcagaatttttcagtgtttaccatagatttaaaaatcactctgtactttgcatactgaaagtcacatttcattcaccctcccacccacaaaactagtttgaagtttaaatttccagggcccagctgagaggctgtagctgcctgcctttccacgtaactgttgtgtttgttaatcttggtgcagttccattctggagactaagcagagtctttctgtgaggttgtgcagacctctggcttccctcaacattaaatatcaatgttgcagcagaagagagtgtcttgggcctcacccctgggggcaaaccctgccctgacagtagctggactgcagaccacaccatagcttcattcttctgccccaagcaatcttaacatttctttttcttttcttgtctaggttccaatggtcctcagctgtttacaatagagcaatggggcagtcctgagaaactgcccagagctcacacatggtgagtgacaaaaacacatgcatgtcaatgcaatatctgaactgcttagctgggtatggtgctgggctcaaggctattgaatgctctgtttcctgtctgtaagtagcttagagaattaaaggacagtgatgtggatgaaaatagaaattgtacagtagtgctaataagacataatgcactcagtatgtttggcacataaagggctcaggcctccctgctgtggggaatttctcctctgagcccagtccttccctcattattctaggtagtggagctttcactgttcagcatacatagataaggcagctctcaacctgtataataaacacgttgggtttttactccaaccttaaattggttgagaagttaggacaaaataccctgtagaaacatcctttttcaaaggccttctatgcccatgaataacctgtaattccctggaattgagcagtaacatgactgtggtcggaggagggtaagagggctgacacgtggccagggatgcccaagcgtggagcgtggctgccctcagaaggccctctcaggaggcacagtgacgcagaagggtcccagttgttttctgaacagttgcatgaaacccagcacaaatgcagactggatgggatcagtttcttgaagccgggttcagggagctcttgctaactcaaactcccatgtccctcgtgttggtttttctgcaaaggcctttatttcttgctcctgaggaagcagcagaagtgggccttctggaaaacggtgagcagcgtagccctgtgtttctcatgcagcgggggctgcaaagcctgctctggccatagtgagctaacataagcaaccaaacactccctgcaggaaacgccctcccttacactagaagtgctggccaggagagaattctcatgaacatgtgtttgcgaaaaattggctgtgaaaggtttttcacttctgtcggattcccttgcctcaccagaaaggtgttttttttttctattcgtaccattcacgtgactctccagatggaaacaatgtggtcattgcctgtcagagccttgaaagcaagctgactccagcctaaaattcatgaatattcagagcagtcattgtccgtggttctctggctttattctaagggaagaatgtttgagtagttcagagcttttatccaaatggtgtccaagtcatatgtggttttctgggttctactggcctccatatgaaggcaccagcgttgagccaagccccaggactgtgggtggtgatgcgaaactcaagctcataatactaaccaggatgaagattaggaaaagcgaaattattgggcacagtcatcatctgtggtcaggcactgcttaatctttatggcagccttatgagatatgttattcccttgggctgtcagaaggctggcccagggctcaccagagtcacagattcccagatcacaggatttgaactcagagctaccagaattagagcctgcaccctttaccactacaccagatacactgcctctgttgatatacccactttctttttagacttttccaaggaaaccaaattagtgaaccaatttcatgttcattcagcccatgtttctctgtgacttcagggacacatatcttactattgaactgtcttttttatttcggagcccacatgattctgccacaagtagaacttcccagataagacctctgaactcagtggttctcaacctcagctgcatgttggaaccatctagagagccttaaagaaatcactgatgcctggaatttggacttcattggtctggtgtgtgacccaggcagtgggattttcaaagctccccagatgatttttataggctggcagggttgaaaattcacagctcttccctaggaagggcaaagatccacctacaggaagggaacaacccagctggctcttaccagaacttattttcctctttatgtgtcacggaaataaagcaactgtgtagttttcctaatgatgttctccccagactaacttgacccggatggagaggactggcagttgcaagcaacactggctagcatgagtgggactgttctgctgtttcttctaaatggctttcctccctacctgaccctgactgtattttgacataggaaacagaaacttcactggctgtttcgtggcaacagttctgccataaaattttgccatacataggtttaatttcttccacgttttatgatacacaattaaagttcagaataaaaatctgatttcctagaagagcagaagctgaaggatctggttctctgtgatgagggtacctttcattaagctttccaatggtgattattgagtgtctgacattcaaaggacttcatttcattgttctataaaaggtcactactcagacatttaaaattactcttcattaagaatcacaggcccacctgcccttttaggtagactctaaagcaaacaaaaatcatctcgttcagcccatgcatcttccacgtgaggacgctgaagccctgtgaggacaatgagctccttaaagtcacccagctcattagtgcagagcaaagccaggtccgtgtgtcctgacctctgaaatgataggaactcacactcaccaagcactctgttcattccggggatggtgctcagcacttgatgcgattgactcataccatcatcacagtggccctaagaggtgggtgatgttatgacccacttttttacagataacactgggatgcaaagcggtgaagcattaagcagcatgattcagaacctcagatcttgacatcccgtctttgcctctctcttcatcatgccagtgtttctcaaacctgaataatctgtgcaccttttttaaagggaaaaaatggtcacagattctcaagaatgggcctgagacccccatagggattgcaggcccgggactgtgaaaccccagctgaaaagcctgaagccactttcggtgaaaggctcttttaaatgccatctgtagatgtgaagtcctgtctttattaatatgataatagaaagttaaaagcctgtattagtacttgctcttttaggattcctgggttcctgagaaccccagtttgagaagcacagtgttattctctgtcttttagtgtttagtggctgttagagaatccaagtggaactcagtgggacttattcaatatttagtggttgttaaacggccctctacggtatgtgtttcttttctgttgctgtgacaacggttagcttttagtatatgtgcaagtgctgccaaagcgagcacgtgaatggttagcttttaaaacccaagaagttactttgctcattcttggaatcacacatcaatacctggagggggcggttttaaacacagtttgagcactcgcggcagaggcagcacaagtgcacttcaagagctgggctttggagcaccccagggctgtacctggccccgtgtgaccttgggcaagttacctaaccttgctgtgtctcaagctcctcctctgtgaaataggggtgaagcattagctgccttacaaagtgattgccagggttcataacattgagacaaggctgatggggcatggtgagcactccatgaacatgagctcttacgtcataatgagctgtggcaagtgtgcatgccattttcatgacagatacacatcagcaatcaccccccaacacatacacacacacacagaggtgcaggttctgtggctaaaggctctggtcttgagccccatgtagacatacagtaaatgttgaaaggtgttaacactgataccatctcttgagtaattgagcccttgctgtatgccgggcccactgatccgatccacttggcactcatatgtgcagtttccccatgtcacagaagcacagaggccatccatttgtctgaaaaccctcactattgccagggcgatttgcagcccccgcccccacctgaagcctccagatatgtagggactttttctaaatgcaactttacatagcaaatgtcaattttgcctgactttgatcagaggaggtagcttagcactggtgttcccgagccccggacagcctgggttctgtttgtgggtctgccgtttgacaaagactgtgacctcaggaaccttgccctatgtctctgctccaggagctcctgtgcagaatggagataacatgacctgcttcatagggttgtgatgaaaatgaagtgagttaatagggagaaaagcacttggcttgaggcctagtgtggaataagtaatagtattagagatagacacagtcttaattcgtgggtaactccaaaagcatcagctctgtgttccaagggtttggaaatcttgccggttactcccttcccaccaggattcctccgagatctgcatctgactatagcaaaggtttcatggaccatttgaaaatgttctttctctgtaaattacaagagcttatttagtgtggatgtttcatagctagaggtttttggggtttttttctccaggtaatcaaaattgttggttaaggcttttttattctcttactcaaacctcatgccctattaaccagatcgaggaagtgctgttgtggcttttcacctacactttttgttccttttgcagctttaatcgccttgacttacctccatatgaaacctttgaagatttacgagagaaacttctcatggccgtggaaaatgctcaaggatttgaaggggtggattaagcaccctgtgcctcgggggtggttgttcttcaagcaagttctgcttgcacttttgcatttgcctaacagacttttgcagaggcgatggcagagagcagctgcaggcatggtccctggagccgagccttcaccacgcactcgtccaagttcggatgcgggaacctggtcccagcttgagttcctgcctttcccaccacaaattatcaactggttgatgtgtacactaattacatttcaggaggacttaatgctatttatgttgtgcctctgcaggcaaagcccttaataaatattttacatcctttctaatgacaatgaatggaattaatcactcaacaggtatagtattacgactcatgtttactttttaaaatgatttagaccgattttcagattttatttcgttatgattaaagatgtctcatgtacttggaaaagtgagcattttttttttttttgtatttcactttcataccaggcttaatgtcaatgacatttttatttttgaagtactctgacacctccaccctctactttattagaattggaaggcaaatttttgtccaaaaacctacagacaagtactttgagagaatttccaatataatattagacataatgataattttttccatactcagaatgaaaaactggatattacgtttttgttttggggtttttttgtacaaatttagctaatagctacaggctgagagaattgtaacatagcatgacaaattttgtgttgacttgaaaggaatcacaccattattccttagaagtaattacatgtgttctaacacatttgagacagggttggactcccatttctcatccgagaaattacttaacccttcctggcgctgtacagtcatcttttattctatttcctctttgctgtttgtagtagagacattttgaatgaaacttggcactgcttgattcaaaactgtggaaaccagatctgtttagtctcctgtttgtatgcgtttgctaatggtagctaaataaccagtttttgttgtaaatgcaccaattctgaaggcactttatgtactacatggaggtcatatctggttttgtttttatttttttatcatgaacattaaatgtgatgatgatttcttttccctgcacacatctttccggtgcaatatctatcaattgtgaatctggctgctggtgtataaaaacctggatgtaaagctgagcctacagacctgtcctcaccaactgttttgtgatttctactcaactacaaagatttatttaatgtactcttaatctaactgagttttgttaccaatgacctgttgcatgcttcaataccgtgtactgcctgagttgtgcctcttgtgtgctagattaaaagtgagacagagacttgacttgatcctctgagctcaagctattgagctggtagtggcagaggactgagggtacctgcacagtttgattcttttccacgtgtaagtctccattgcagaattgtcgtgctttgagaaaacacctgaggcagtgtgggagttgaacgaccctgctgtcctttttaacctgtgttgtcctagaccctgtcggggcagtcaggggacactagagatttgatctcatgcgagtcatcaataggacaaaaaagttgtggtttggggaggtctgtttgttacataaaaaggacctttcggtgtaagaaattgccgtttttaccctgccctggctggcatgtgagaagccatggaaggttgtggttgtaaatgagttgtctaaaggggtgcagaggcctgaggtttctaaaagaaggtagatttctacagagctgagtgttggttcctttttcttattggttgaaaattacctggtagtgatcagaaaacttagatgctatgtaact

SEQ ID NO: 71 - DNA, 9632 bp, Homo sapiens
taaattctctgggcagtgccctgtatctttattagaaagacttcttatttttaacaattttatttggaagaagttctactcatttgcatcagttcatcgtctacataatttgtgtgtgtgtgtgtgtatgtgtgtgtttacaactttgacttttgaaactagaatagaatcaggtaaaacatctaagatcagtgtgccagtaattggcctgaatcatcgggcaccatgatgggtttggccgccttcaacgtactcggtgtacattctatttttttcttcataatgttcagtactgtagtactaatcaccgagaaaattgcattgacgcttttcgaccaccagggaaatattcagctcatggttctcccctaaaaaaactaaaaagcagctaagcgctgggaacaaatctgacttaatgcattttctcagtgggccaaagaaaggagggccgattgactgctttgactttttaaaggtcttctctttgttcacttataaagtgaggaaaacaaattctcggcactggcgtgagagttatttgagcgtcacaaaagaaagcaaaagaaaatattagtgccattattgtggcgaatttcatgtttcccagcgagccctttgattcctggtttgggctggcgctcgagctctccagccgggtatgacttcggccacaagatggcactgacctgcaaacaaagaaaagcacagtggcaccgactttttcaagcctcgggaaactgccctgccttccccggagtcgaggactgtggggattagggcttcctttcccctgcgcgggaggtctgtgtcgaataatgtgtggcttctgttggattgcttttctttccaaaattcctaggcaatgcttccccgaggtgtgcacctttgtgaggtgtttgtggggttgggggagcttcaggcgctactcgcgggacgccgtcacgtgatccgggatgaggtggagttcggctttaaggaggcgtctcttcctagcttcatcaatctttaggatctgagcaggagaaataccagcggatcttccccactctgctcccttccattcccacccttccttctttaataagcaggagcgaaaaagacaaattccaaagagggtaagttgcgagtttatgcctttccagagacttctgcgaaatctctcattgacaaggtgaaggatgagaggggaagaaaaacgatgcgagtgtccgaaactggctctgggggaccaaggtggggtctccagtgcaggcaggtcgcaggttgctccaaatcaccggaccgttcgcgggctcctgccgaagggtatggggacgacgcgggtgaaaggagagggtaccctacgcggagttcgggctttcccaccacctgctcccggggaatttctggatggggatccaagttttcctttaccccggttctctttaaaaggccgaggcactgggaaggcgcccgagttcgcctatcccacacccgctcattttccttacgtgtcttgagctggctggaggcgctggctctggccgcaccggagttttcgcggagtaactggctgggatgagccggagaagggtgggcttggcgcgtcgcccagcgtcgcacgggtcccgcggcaggtgtcgggctgggagctggcggaggtgggagtagccctcggcgcggaccccagcgcgcaagcccacccccacttgcgggttccgcgcttctcggctgcaatcgagccgcgctccgcagtaccgggcgcttcgagtgtggcgctgcgccccgatagacacccgaagcttttaatcatcggagttctaatcagggaactctttagctctttcttttagaaaagtaatgatggaacgtggctgggttaggagattgggaatggacaggaggtggaggtgtcttgatagggtgtgccattggttcccaggtagactggagagataagaatgttttaaggtctgatgttgggccaaagagagagaattgacttcggtttgggatctgcttggttttggttgtttatatcttttctcttttgccagtctcttatcactggtagaaaggttttttgatgagagagagagagagagtgagagtgtgtgtatgtgtgtgtagtagggagtcaggaatggagtaaatttcgggcgattcacctagttacgcaatatgaaaaaggtgggtgggtaagcgtgccaacaggaattttgactgaacatgtcccatttcccatttcgttgtttgataacttctggagcacaggaaaaacctaggggagaggagcaaaagagagtgtgtttccatgtacacacactcacactcacacacacacagagcacgcattgcttcccccactccccatcctatgagaaagcatgacgggcgggatggcacacacaggcaggggacatgtggagcttgtctgtcaggtctggaacagaaaagcagtagctgtttgttctcgaccctgggccggctctctggcgaagcaagcgagggagcagaaagctaacccgaccaggttccccacccaggactagaccgagtgctcttccgtgactactactttattagtctttattgtcttaaggcagcagtctgttgaacaagccctccccagcaaggaaggagcagagaattatgtaattcatttagataagctagcagtaactttgggaggctgtatgtaacaaggctgacatttcttttccaacacaagtgaggtgaacagccagccaatcctgagtatttgaaaaaatgtatctgcagcaggttatgatcagggagctgtattttcaagtagtaacagcactgcgaagagcaagcaatgaaaggccagcattctaattggaaagaaagaagaggaaatttccctctgcaagggggctaatttgccaactggtgatgtatgtaatgtctgttttgtctctatatgcacatggcagctacactgagatttaacagtctttaatttttgcagtttctgcagttgcatagcttattttacaaattatattagaatagtaaatatcaaattattttcttttgcaaagataaagtgtgtaaattctctcttagtattgttattttctgacagttattctttcttgaaattacactaaggtaaactgaaaatacacatttatccaatgcagaattggtttacacaactggaataactatcaaatgtgcacttagtaaaataggcttgaaaacaccttaaaaaaataaacttttcattttctctatagctaaattaacttctacctagtaagaaaaatgcttcctcattgggcatgcctattaaatacaatttcaaaggtatcaggctagagcttcagtacgtttacctgaactcatctgtaagaaagctatgtttgtagcctgtactttgcaataatttaatgtctgtgtgaattcttatatgtattcatttttgccaaaatcagtcagtggatagaatatttctgtttctttttctccatggtatacatcttggtctctgtccctattatttctcgccaaaattattgcactagctttctaatgaatctccccatttcttctctttccttgagtgtgttgaaaacagcagcgagaatagtaattttaaatcaaaagtcataaaacttcacacctttgccaaagactctccagaggctccccagctctctcaggattataggcacagaccataaaaaaaaaaggctctacagtctgtacccccctctttagccttcctaattaatttcctaagagtccctcccttatttatcctacttcttattgctacttagcacaccagttacacatgggccttagggatttttgttctttccatatgggatgcaatccctgagatacttgcatagcttccctactcaccactcctctcaggtcttaacttacatgccttcttctcagacagtcagaggccatcttttacagtcaagtaataaattgcagctcccccaaatcccagtttctctttctttttttttttttgagacggagtcttgctctgtcacccaggctggagtgcggtggcctgaacttggctcactgcaacctctgcctcccaggttcaagcaattctcctgccacagcctcccgagtagctgggactacaggtgtgctccactccgcctggctgatttttgtatttttagtagagacaaggtttcaccatgttggccaggctgatctcaaactcttgacttcaggtgatccgcctcggcctcccgaaatgctgggattacaggtgtgagccacctcgcccggccccagtccctctttcttgctttgttttacttcataatatgtattatcatctagcatactatatcttttactaatttttttcttgtctttctctgcccacaagactagaaacacagtgagaaggtcacattatctccagtaaaaccatgcctaacacaaaataaatgtttaattaatatttgttgaatgaataaattttctttcagaaataatatttttatataaagtgtaacattttcccctatatacatgacctaggagtacggctgttgtgattagcatacattttgcctgttcaaggactatgatggaattgagctattgatgttaggattaatttacccaagaacctactattccaaccatgcatcagttatatcagtcaacacagttttattctaagtctaatacttgcaaggtactatgaagtatgcacaatgcctacctcaaagatgttatattaaaaatgagaggagccaactaaggattctagggactaaatggtgctttgaaagatgggtagagtttggattggtggtgggagagagagaacacccagcaagaggaatggcggaggtggagacgcagagctatatttggtagactgtgaacagactcacctgcctagagcagtgtattcacattgggattattagagtaaagtgtggacaagaggtataatgcagaggtcttaatgtgtcaggctggggaatgtacttagtattctgtctctcatgtgtctcaaaccagggtcctcattcacctgttggtacttggtgacaaggataaaaagcttttccctactctgctagttttacttcaaataatgaagggaaacttataattaattgataagtcatgttaaatatctctgtagcaacttaaataggaaatatgatgctaaattttcttgaattcttaaaataagagatttccaaataatttgaagttattactgctcttttgagattgttttcaaactctgacaatcgctgatcattctctctgcctttggaattcttgagagacaaagtgtggttatcacataagtattagggagtcattacaggttgatgcatagaggaagagagagccacgtttctaataacactcatacctgaaatcattccattaccattctttaatagtttcattctgacttcattgtagcaactcttactttattcttcttaagtttttaaggccaaatcatggtttcataataaaaaaaaaaaaactcatgttctagaaagcacaaaaattaaaggaaaggtttattagaggcattaagtaaaaggcaaatgcatttcttgttcattaagttttttatctttctttcaatggaagtaactctgcatgattttctttattggtcttatttaagaaagaaaagaatgaaattcagtttcttaatacaagcatgatggcctgttaattaacataagaaactccgtctcacatatttacttagtaatctagggaatatcagacttatttttgaaaaggagtttttaaaataatttcaaactttttaaaactctacaagtctgtgatttgtgttgttaataagagaaaaatgtatcacaaagtgctgtgaaaaatcaaaattacaattaaaatctagatccttgcattgggcacacatatagtctggtgggtagggaagatatttacataaataataccttagaaatccttgaaagcttctaacatattaataaaataacagactcttaaagttagaatctcccacacaatatagaaactctctgaaatggtttttcatatggtggttataaaatttgtatatggaacacttgctagatttgcaggcaaataattccattttactaaacttttgttcctcacaatgatgtgattaaaaaaataatgtgcacctcttggtcctacttttaacttgtacatataattagatgtaacattctaagctcaacgctgtgttctacatgctacccattaaaatacaagaagacatctgtaccattcctactaagtattttccggattaaacattgtctagtctctcaatagtcattcatggcaaagttttttgatgtttcactgtagtgatcatcttttgttgaatatgtttgtgctgaataacatctgccctaaaaagcagtgcagtgtatgtatggtggagctattgctataacttgaccttgacactaattcttccatttctatagcatatggcagaattaggtaatttattttcttttgctttgtttgtttatttttcttatgttttaatctgtgcattaagtggtttttatacattcatattcttataatgtttaggaatgtgctgttattactgtttatgtaagacttggggcataatatttatattccttactaacttatagaccattatgttttactaagacttgttctgtaagcaagtccaattaaaaattttattttttctttattcagtatgttttcaccatttctgctattttagaaagatgtttacaagattacattttgtttatttatttcagtgttttcactttaaagagttctgtgagtcagaagtcattttgactgccctcaataaaattagtaatgcaattggtcattttctctttacagattgttcagttcaagggaatgaagaattcagaataattttggtaaatggattccaatatggggaataagaataagctgaacagttgacctgctttgaagaaacatactgtccatttgtctaaaataatctataacaaccaaaccaatcaaaatgaattcaacattattttcccaggttgaaaatcattcagtccactctaatttctcagagaagaatgcccagcttctggcttttgaaaatgatgattgtcatctgcccttggccatgatatttaccttagctcttgcttatggagctgtgatcattcttggtgtctctggaaacctggccttgatcataatcatcttgaaacaaaaggagatgagaaatgttaccaacatcctgattgtgaacctttccttctcagacttgcttgttgccatcatgtgtctcccctttacatttgtctacacattaatggaccactgggtctttggtgaggcgatgtgtaagttgaatccttttgtgcaatgtgtttcaatcactgtgtccattttctctctggttctcattgctgtggaacgacatcagctgataatcaaccctcgagggtggagaccaaataatagacatgcttatgtaggtattgctgtgatttgggtccttgctgtggcttcttctttgcctttcctgatctaccaagtaatgactgatgagccgttccaaaatgtaacacttgatgcgtacaaagacaaatacgtgtgctttgatcaatttccatcggactctcataggttgtcttataccactctcctcttggtgctgcagtattttggtccactttgttttatatttatttgctacttcaaggtaagaaaactttttttctatcatttccatttttaccttctttacacagaattcctcatcaaatgagtgtttctatttaaacttttttcttccatagatatatatacgcctaaaaaggagaaacaacatgatggacaagatgagagacaataagtacaggtccagtgaaaccaaaagaatcaatatcatgctgctctccattgtggtagcatttgcagtctgctggctccctcttaccatctttaacactgtgtttgattggaatcatcagatcattgctacctgcaaccacaatctgttattcctgctctgccacctcacagcaatgatatccacttgtgtcaaccccatattttatgggttcctgaacaaaaacttccagagagacttgcagttcttcttcaacttttgtgatttccggtctcgggatgatgattatgaaacaatagccatgtccacgatgcacacagatgtttccaaaacttctttgaagcaagcaagcccagtcgcatttaaaaaaatcaacaacaatgatgataatgaaaaaatctgaaactacttatagcctatggtcccggatgacatctgtttaaaaacaagcacaacctgcaacatactttgattacctgttctcccaaggaatggggttgaaatcatttgaaaatgactaagattttcttgtcttgctttttactgcttttgttgtagttgtcataattacatttggaacaaaaggtgtgggctttggggtcttctggaaatagttttgaccagacatctttgaagtgctttttgtgaatttatgcatataatataaagacttttatactgtacttattggaatgaaatttctttaaagtattactattaactgacttcagaagtacctgccatccaatacggtcattagattgggtcatcttgattagattagattagattagattgtcaacagattgggccatccttactttatgataggcatcattttagtgtgttacaatagtaacagtatgcaaaagcagcattcaggagccgaaagatagtctgaagtcattcagaagtggtttgaggtttctgttttttggtggtttttgtttgttttttttttttttcaccttaagggaggatttaatttgctcccaactgattgtcacttaaatgaaaatttaaaaatgaataaaaagacatacttctcagctgcaaatattatggagaattggggcacccacaggaatgaagagagaaagcagctccctaacttcaaaaccattttggtacctgacaacaagagcattttagagtaattaatttaataaagtaaattagtattgctgcaaatagttaaattatatttatttgaattgatggtcaagagattttccattttttttacagactgttcagtgtttgtcaagctttctggcataaatatgtactcaaaaggcatttccgcttacaatttgtagaaacacaaaatgcgttttccatacagcagtgcctatatagtgactgatttttaactttcaatgtccatctttcaaaggaagtaacaccaaggtacaatgttaaaggaatattcactttacctagcagggaaaaatacacaaaaactgcagatacttcatatagcccattttaacttgtataaactgtgtgacttgtggcgtcttataaataatgcactgtaaagattactgaatagttgtgtcatgttaatgtgcctaatttcatgtatcttgtaatcatgattgagcctcagaatcatttggagaaactatattttaaagaacaagacatacttcaatgtattatacagataaagtattacatgtgtttgattttaaaagggcggacattttattaaaatcaatattgtttttgctttttc

SEQ ID NO: 72 - DNA, 66158 bp, Homo sapiens
ccttgtccagcctacagttctttctgctagtacttttaagccctggttaagtcattgaaaagcaccaattacagacttacataactgtgtcaggagcatttctctgagggatttgctcacccctcggagtcagttgcccagggaaacaagctggcgatgtcacaaggcatccacttctagttcttcctcagttcccttctgtggaacctgagtcagagcctagtccggcatgctgcctagcccagccacgtctcatcctattcatggcagagcggggactctcaccctctcccagcaatgtctaaagtcaggtattttggggtcatggccatagtaaggatggtctcctgtgctgcttcttccctcccagggcacagaaatgcctatgcaaatggagtgtctaggacagccctgggttactcttggttctctagggtatagttacaaaagtgaaaaaaaaaagaaaagaaaccattggagctgctccctggaggatcaaaggttgttgcagactttctagaatctcagagacctcaggagcaaaattacaacacacttttcctttctactgttcatgccctaagcacacccatgatctggtttatcaacctgctcctccttttctcaagagataaggttgcaacttccttgttatatgcaaatgaaaagaaaagagactacagccatggaagtatttcgctagattttcctagtatttcatgcttacttcatttaaccatgcccctgccccagtgccctagtgaaacagtacaatgtacagctcttgcattgctacctgcccttctcaaagcccacatgttgtattttatgcaaatctacagattatctatcattatctaaatgcaggcatctgaaaaccagcagtaatcctgcctctgaagtttatcaggaaaggagcttaaaagagaaccaaattcagcctgtgttggaactctcagtcccagaggggtgtggtttgtagctctccggcctgctgttggacttaggctgtgacccacagaaggacgccagaaagtactcaagacattcacggtgccccggtcagcactcgccatgacgaagacttctacatgcatataccacttccttgttctgagctggtatactttcctcaattattacatctcacaggaaggaaaagacgaggtgaaacccaaaatcttggcaaatggtgcaaggtggaaatatatgacgctgcttaatctggtaagtccatatgtccgtaccaggaaccgatccatttctctagaatatcagtgctgccacacatatcatctttggattttattaaatacacaattttgttatttgtcttccttcttcaccgttttgtgagttttgggttttttgtttacttaacaatttgctctgataaacccaatttggaaattatctatagttaacatttctatgctggctcattgttaaatgctctcttgaaaaaaaaaatctcatcttggagctcttttcagatgagctcaaagaggggaccatgctaatggtttcaccatgggattaactacaaatgcaggaggcattttgaactttgcttggggaagtctgtgaagagaaggcagagtggcgtatggtgtgtaggaagtgtaatttccaatgaaggaataatgccattttacagcacacacagactaacagatttatctaagaaaagcaaacacattttgccatgttcagctcccacctcaattttttataggttcaggctccatcttaaaggacaaatcacccaaccgaatggcaaatacacattttcaactatttaaaaaccaatcttatgacttactcctttcttgtcttcctaacctggctgactgcattctgatgaagtgtgaatgaatgggagaaaagcagattatgaaaaatactttgaggaatagcttaaaaaaatacttttaaagttaaaagctaataatggggaatcatttggggatgtgaattaatatttgaggtttttgactaaaatcttgggtgccacataaacatctgttttcagaattgtaatcctcatttgacaagcggagaatgtatgtggtcagaaactgtgacactctgaaatgctaaggacgtggaaatggagagagttaaaatcaaagaggcccaaagtggctgcttcctcctcactggttggttagtggcctcttgatttgggcctgaaaaattggaaccctgaacacagctctagtgtctttgaaaacttcaaggtgactacttgtttcaatcatggaattttatgagaaaaacaaacagaaacaaaacaaaaaatgttttttgtataactagcagtgccacagtaaacaacaacaacaaaaaaccacacacacacacgcgcatacacacacacccctaaggtttgtgtctctattggctttctatgaaaaacagtccactaaaagggaagtgtgtctgtagttaggactgactttctaataaaatccaattccagtatgaatgtcctacctcacactatgtgtggctaagaatagatttatcaccacactcattaactagctcccttacctctttgtatacacacacacacacacacacaactgatcctgactttttaattctagctcacctacatttccaagagcccttattttccaagagtgagaaaagtctcttatcttgtcaatgatactatcatttcctagtgttaatcccaattttgcttccctgattgatcagctaccaaatcctattagtttttccttttactaagttcatcctttcttcttcaaccttactactgtctctctcattccaggcttatattaagcctacctggatgaccatatcatctctttactgtccattcatggtccaatccagccacttagattccaaattaatcttctcaaagcactggttttggtttgttttttaataccatgacctggatctaaaagtgtggcctgccgctcaggaaaccacagtggctccctcctgcctcatggacccaatgtcaaactcccgattcaagagctcacctgcccaaccagcctttcgggttccctctccctgggaggctggtctcttctgcagtaaggactgcgtctcactagtattggtccttgggcttcctgctgtcacttctctgcccggtgttctctctatccttagaagaaaggcctacttacctctctccaccacattgcttctttcatagaacattgggaatcacatatactcctcccaaatccttgctgaccaactccagtccaaatttccttttcctttctctgattttcacagcatctctcagtctctgctgatttatatgtagtattgttttctaattccctctctccctgccatgtgagtcttaacattccaatcaaactttggctccaaaacagaagttttttttaatcttaggtccttgccaaccctaactgtctatatttctaccttgaattcagcacagtggctggcacaggatacccagatattaaaaagctgcgacttggtacgttgacgtgacctcagcctttctgcatcctcaagcagtccctctcttctggtatcttctggccctcgtaaataagctgagaggggcttgcctgtggtgattttctttctgagctccattaggagtcatcttgaaagtgtgacctaatgaaatgcttcccaactggtgaagatgggttgagtgtatttcagaggatcgatttaatgtagatttcgaatatgttgcttaaggtgaaatattggacctgcaaatgtctagctcttgagattcatgggctgattaatggttgtgtctcctaatgattaattagtgttcattcatgactaattaattggtggttgtgtttattaagtcataaaggtctcacaacttacgctcacattcttatatttattttacctcaccttggggaagttagtatccagtcctgattaccagaaaatttacacccctcctcgtaaacagcttgaatttctaattggctgagtatcatttttgtcccctttgtaagagcaaagcccccttttgtgccagttggcactgtgagcattgccccagttccccttgaagctatcccaggggactggaaggggagacagacaggagacaggagacagacacgagttgcactgagctactcccctggggttggtggtagtggctaaggtgccattgagaattggtcagggtgacccatttctgactaaggagagtgaaggtaggagaggacagatgggagtctctgcctaataagagagtaaactgacctcagtgaaggggccactgattccctgctgggagggagaggtggtatttcacaatggttacaattgcgatctctgggatggtacctcagtcccactgcttactgcccccgagaccctgggctaggcacttctttgtgtctttcatttccacgtctgtcaaatagaaataaaaatagtacctaaccatagggtagccatgggggagaaatgatctgacaggtgggaagcgctcagaatggcgtcagcagggtgttaggcagtggacagtggggagagaagatggggaggtgatggtgaacttctctgggtagagaaggtgatgcaggagggtgacttagtagaacatcagtctcctcactgagcacctaggttgttgcggggtggaggccagcaggagtcatccacccccttccccttcatggctactatttctccctccccgagctgcatgccccatcttcccagctggagaaggaccactgtcgagccactgctctccctgctgtagctgcccgcaggcaccaggccgtcctggtggtagagtctgcaggctccagcagacagccatgcagaatggggaaccccagaggctaggcgtgagaccaaggcagtgccatgggtgtcctcaagcagcttaggttggctcagatcatccagtgcctgagtcctccacaaatgctatgtcccttgctctctgtccaccccatttccatccagggactgtccctaatcccagagaatatgagctagggggtttagggcaaggctcagcagccacagcttggctcgcagaattcattcagtttattagggtttcctctttttaaagataagcttccttctgaaacattgttagaggtggggccacataactgggatctccaggggagattctgagtgggcccctccctccccacgcccctgacacccccttcaacaacagaagcatgacctttccctcccttttcataagttgcccaagccccaggcagctccgtcgtcatcaccctcaacttctcatgatgacaacagtggcaataccacataagtccttggggttgctggcctggggctgggggaacagaggagctgggaggcctctatgggtctaaacttcaaggcagcctgtgaacagtgagaagatggggttgaatttatagtatggcacccacttcaacacttgggggaccaaccttaagtaataatctatggcactatttatttatttatttatttatttatttttgagatggaatctctctctgttcccccaggctggagtgcagtggcacaatcttggctcactgcaacctctgcctcctgggttcaggtaattctcctgcctcagcctcctcagtagctgggactacagcatgcaccaccatgcctggctaattttttttgtatttttagtagagatggggttgcaccatgttggccaggttggtctcaaactcctgaccttgtgatccgcctgccttggcctcccaaagtgctgggattacaggcgtgagccaccgcacccaacccctatggcactcttcagcaacgtggagtcagaaatacacttaactatttctgcctcacaaagatgcacttcaatagctgaaagggtaaggactgagagaactatgtgatagtcaccaccagcacccaaaataaagcagctataaattattgagcaagtaactatgacagcattttggtaggttctttggacgcagtatagagatgagtgattgaagacctggcttctgaaaccagaacactggctgtgctcacttgctgtgtgattttgagtgacttgcctaacttctctgtgcttcagttttctcatgtgcagtggatactctgataaggcacccagatcctcatacctccccagcgctgaggtactcagtccccagctctcaggagtgttggctgctgatggtgcaaagctgagatcccctcccagaattgccctcagcagaagggagctgcctcgaccaaggtttaggtccctccctggcgttgctgcctgccataactggcatccaatatggggtgcaaatgctgcactcccggacagctctgaacgagcagctcagctcagagctcctcaagggatcagctgattccatgcaactgcccagcacttagcctcccccacttcaatccttctccctttttgcctctcatagatgtctgagagcgttcttcagtgaacatcctgcaggcacatctcagaatctcagattgtttcccacggaacctgacctgcatcgtgtaaaataccaaacatacagaaaaggtttctctccctcctcttcctcctcccccttctcctcatcatcttcttccacttcttcttttcctaattccagataaagacactaacacagagctttccctggcctgtattatgttctgatacctcaccgacaatttctgtacctaactgacattccgtgaatgttggttgaatgagtgaatgaccagaacatggttctaacaggcatgaggccatcccatcatgaaggtgttttatcccacagccaccctactgctgtactgaagcccgttgtcctcagctatgcgacattggccaagcattctggtacttctttccaacctgtcccttgatgctcttggtctcatttttctcttcattattccaaactgtggttctgcacattctttctcctcctgtgttctttattgcatcctttaatctcagtttcttaagttaaatgtgtatgaatgatgacagaaatcctatattccatacgaatacagatatacttggcaaagtacctgccccaaacacaaccaccactgttatataaaggactcatcacagcccccaattgctgttttcttctggtgtagtcttccaccgcaaattcttgcatcatttcaaaggagagaaataagaaagtcccgcctggctgagtcaggcacagtcctgagttaggtgttggattacttgactcatccaataagacttgtaatgtcttgctcaggaaacttgtggaatctccctccctggaattactttttaaatagaagaaattctcatttcctaaggtagtttaaagagagagggctctggcttaaaggcaagagataagcttgatgacttggaaaggctaagcttccacgatttgaagatttttgtgggtttgtgaaaacacatgaatgtaaaaactaaatatcctttaactgcagttttttgaattgcattagttatttaaaagtgtcaattcagctttgtcgcaggtgttagtttgtcagctagcaacagaaacaaaagacagctaacgaactcagaagcagcatttcaggaaaaggcacggaacacgcagtgggaacagaattagggaagaaccaggagaaaggataaatcagggagcagcaggtctgaaataaacttagaataagtagatgccgttacgtctgggcttttctgggcggccaaaatagctgtgaaatgtaaatgatagtaattttgttgtaagagtctcaaaagaagaccagttgtggcgatcatattttaatgctactgtatagtttcctagggctgccgtaacaaactaccatggactgggcttacacaacagaaattgattttctcatagttctggaggctggaagttgaagatgtgggcaaggtcggtttctcctgaggcctctgtccttggcttgcagatggccgccttctccctgtgccctcacgtggtcttccctctgtgtgtgtctgtagtcctcatctccctttctgataaggacaccagtcatagtgaattagggtgcaccatcgtgacctcattttaacttcatcaccactttaatacagtcatattctgaggtcctggaggttaggatttcgacatatgaatttggtggtggttggtgggggatataaattagcccataacagctaacattgcctcccctgatcgctccgtctgttatcgtgagtcaagctcatcctgagttttataaacattgcatcgtctttggagaataagcagaccgttcgggtgggatgggctgatccacacctgtccctgctgccctcctggaagcctccccatggagcctgggagaggctctctcgctctccgtgtgccccagctgctcctggcagccccttcacgccccagctcttgcaggtttcttttccttggcggctccctagtgcctccctcctgagcccccacgcgggggttccacctgcttgtggtgaattcggacaaagacgcctcaatgttgagtaagctcgatggcgacagggctgcctggcacacaccgtgggcacctagagaggcccgtgtgccataagcctgagaagtaaccgtgagctggggtggagagggagaggggattgacaagttggaggtgtaaagcaagtttttattgatggagaaggcccggaggatctgagtaatgcgttctttcccccaatccgatttccacatcctgtgactgggagaggcaggagaaagtcaggaggagcttgactcacgatgactctaggaagctccagcctgaggaaagcaggtcacatggacttcacacgccgggcggaggcggcctctccccagagagggaaggcctggcccaggctcaggatgggattaattgccctgctgatagaacagcgcaggcctcttcccctgggcccaagcctgtgcctgctcttcctaactacagcagcagcctggcctgctgcggcctgagcggctggaagtgaaaccagggtgaggcgaggctactggtgggggagggagagaggagggaacttctcccaactccctgtgcaaatgactacacatccaaattctgcagccctgagggtgtgaatgtcaaaatcaccagcaataatgagaagtattagggtggcaaccccttcctgccatttaaagctgttgccccacccctccctgggacacccctttctggttcgaaagctcctccaccccagggcccatgatttcctatcttctggctcttctacccccggccgttctttagtacctttatgtccctttcccttcctgtcccttagacaaggacctttccctgctgtctgctgcctgcttttctgttctcccctctcctctctccctttcctgcaatcttgttccacaggagggctcaacagcctgcatctccccagccccgcctctcttgagactgcagggtctgaatttccaaacggaagttcctccaggcaggtggttctcagcctcagctgcccgtgattagaatcacctgggaggattttaaaaatcccaacccctaggccctagccccagactgattacattagaatctctgggggtgggaaccaggcagcggtggtttgtgaagtggtcgttcattctcccacctggagataattgtctctcttctgacctcccacaatgctttatctgaactacgctcagaaacctgataattttttttattttttcgaagtctagctcaagaacaggactgctgggtttgacatctaccagccaggaagctttaggcaggtttgtttcctcgtttgtaaaatggtggtgggcgggggagtctaatgataggacttggctcgtaaggttgttatgagaatgaaacacagttcagtgcctggcacataccaagtaatgaataaaagtccgctttatagctttgagtagtaagatttttgagggctaaacttgggtctcattcagtggttctagctttagcctacataaagattaaataatctttttctacatttaaaatctatattttatattctgtaaagtgtatcttaataaggttggccaaaaatttcttttttttttttaacttttattttacattcaagggtacatttgcaggtttgttatataagtatagattattttgtgacccgggtaatcagcttagtacccaataggtagtttttcaatttctcccctcatcccacccagataaacaatctttaacaagctctggagaagcttcttaaaaaacaaactcttggaccccatttccagagattttgattccgtagtctgggataggatggaggtcctgcatttctaacaagctcctgggtgatgggtgtagctggtctgacccacctctgtatcatttcctgcctacgccctcagcccaggagcagcatgtggctgactttgctaggtctttcctagagtccagagctcaaagattgttccccaacagccaccttgatcaatccccagcccagctccccaggctctagaaccttcctgacttataccctaaaagcagagtccagaccacccctcttgtaccagtccagggctttcaaggatttggatggattctgtcgcaagcctaacttaaccccaccccccaaactccatatcttcatgacctaccagttcttaaatgagaaaccacagaactgtacaaagcaacaagaatgtacaaagcttgccttccatatcgtattactttcttgaaaaataccctccttctctttctcctggctttgggggccacacagcacttagtaacccaccagcgctcatggcttgctctatccccttggatttaaattgctgccacggccagattgtctcggtgaggcctgcaggtgccctatttaaggaagaaagtgcaccggctcttcttcggctgagcaaggcacccttttgtgtgcctttcttgggagagcacagagattcgtggtggtcctcttgacctgattccagtttctctagtgagatttcagcactaggcatttttcctaattttccttcccaggaagactcctgactctgtccaccctgtatctgcctctttgcctttgagctgtttatttggttcttccaacctctgtgccgtcaaggtatccatctccttacattccccttttaggctgactctttattttgtttccatgttagctcaagtccattacactaaatactgtacacattattgtcccctaaacaaatttgctcaatcagtcttagcgagcagggtcaggacccaatgagctggaagcccagcccttgaattggctctcaaccaaaacaacccaacagccctctccctctcaaagccacattactctcagagggatggagttttccatcagtgaagaaggtattaattaaagtaaatgaaaatgccctcatttgttgtaatggatttagctcttgcagaccattttctacggggtcacctgcctggatgatgtgctgaaaagaaccaaagggggaaaagacattaagttcctaactgccttcagagacctgcttttcaccactctggcttttcctgtatccacggtaagtttcaaagatgtgtacataatctaacagaaatgtgcatatggacagacgcttctcctgggcagccaagctgtttgggagcccataattggaaaccacacccactgcatttacaacaatgtcctgtctgaggactgcgccacattgcccagtgtctttaggaaatatggcacattagtgatcagctttatcactagcttttgtacctctgcaaaggcttggtacaaggtccttattgccgtctaatggggaagtttgaaagacctttcttaatcaaaatacaactgagacaaccttggttccatcagggtgatgggaatggagagccctggggagggagatgacgaattttccccttttatacatcttgtttcacttgctacgataagtatatgttacttctgcaagtggaaaaccatcaaataattttttttttgaaaagagatatgagaccttcaaaggtggcacatggaaaagacaaccgaggagagaaagacagcctggtgtggggtacacagtgggtgcctcattcatgttgctgagtggatggatgtcaggaagaagtgagacatatggcagggacagtaagctggtatgctgatgccatccacatttctatgacattgttcatgttttccattcgttagctagaatggaaataaacagagatcaggcatgctggctgcccagcagggcctataattagaaatgactaccttcttctacctgtcattgtcctgcttcctatagtacagaacttaatttaaatgcaaaatgcaactctccaagccctagtgagttctctgataacaaagcaaggatacctattactttgcaggatacctctacctctgcccacgtaaaatcttctaatgaccaagctttttggttttggggggtaggggaggggtttgagataaagtctcactctgttgcccagactggggtgcagtggtgtgatctcgattcactgcagcctcaacctcccaggctcaagtgatcctcctgtctcacctggctacttttttgtatttttggtagagacatggttttgccatgtcgcccaggctgatctcgaactcctgaactcaagtgatctgcctgccttggcctcccaaagtgctaggattacaggcatgagccaccaagtctggctatagccaagtttttaaaatcaacagtgaagtctgtttattttttgaggcttagaaatggagtgtgtgaaatgtcagaagataggaagatcagaagtttaatagtttttaacttccttatctatgcgttgacttcgtagcatagaggatagatgctttgacaagagaggcaaggagtacaagaggagatcaattcaaagttctgagcaccagggagatccagccctcagtcagctagcttgtgcattttccagggagattggcacttatggttctcaggcttcctgcttcccctagccatgcctatttagagggtggacaaggaacgtgtatgactcaagctactccatgtgcctactctcagcattcctggtgaaagtttagaaaaagaagttattggttaaaataaatgactaatggtctgggaatcctgtttattcatatcttctctgcctgccacgatgacaaataattgatctctaactctctggcacattgaggaatccccagaaagagcagatatagcaatgaaataaagggaagaatgcttattgtagaattactgtaatgtatatgtactacattcctataatgtatatgtaagatatctttaaaatggttgtctgtttttatttagctgtgtttccttgattatcttagaaagctctgattaaaaacaagcctaatgatgctattttttgtgttttattttccagtttgtatttttggcattctggatcctctttctctacaatcgagatctcatttaccccaaggtcctagatactgtcatccccgtgtggctgaatcatgcaatggtgagtgaggggaaaattcagtgaactcagaacaccaatagcctctgtactgaaaactccacagtgccttatctatgtttccaaatgtctcaattcccagcatccaatctacctcatcactgtttatttaaagggcatattgaaggtatgaaatgaacacaagccagtgctataattacagtgagtctactgagaacacaggagatgtccaggtgagagtctgccatgttgcttaggaagtctttgaaaagacacacagttctgagaggacaggcctgaaagagaagtgacttctgcaaatatgtcataaacttccgatgtgtggatggaatgaagtaagctttaaaaaaaaagcccaccccaacatccaaagaatatctcatagctgagcagcagctacttaagtaacacactttgtcacgattctgcatcacaaatgggattaacatttacatatttctaggaatacatttccatttggttttttattcaggcttgtgttttggagaggccgaatagtaaacagaggctgttctgagatttttaggtcactggaacctgaatatcagtaacagggacccaaacaagcaaggctggcatgaggttgccaggtctcggttggaggaggataactgaatcatcggcacaatgtgaacaaagtaattgttcaaatacctaactcagcttctcaatacttacaaatgtatctccacatcaaccaggagattataaaaaggtctcagattctgtgaaggtaatgacatttaaatacccaggggatagccgggtgtggtggcacgctcctgtaatcccagctacacaggaggctgaggcaggagaatcgcttgaacctgggaggcggaggttgcagtgagccaagatcgcaccattgcacttcagcctgggcaacaagagtgaaactctgcctcaaaaaaaaaaaaaaaaaaaaacaaaccaggggaaaggcacaaggaagtggcatgtcaagactcctcaaaagttcactcacagactttcttccaccctcactcttgcccatctttccatggtcttaaaactcacaagatgaccaactcagaaaagcaactcagtccactaacactgcccctgccacaagccccagtctccagaaaaaaactaatttcagcttaaattttgtgctcagtcagttattgatgattgactgactaatagaccacagctctgaactcttttggagttcaggaccagaactaccttacgtaagtctgacctctcaggaaccctcctcctctcaactttttcttgtcaaactcttcaccttcccagtttcccatgaatgttaatctgagacactgatgtagtgaatattcctgctttttttttttttttttttttttaagaaatggtactttatattgtccaaagcatgtttttcaggtatgggctcatttaattcacacagccttctttagagaactactataatcctgatttttacaaatgaaaaaataagataaaataaaagctcagagaggataagtgatgtgcctgaggccactgaactcataggaggcacagctaggatggaaatccgaggctaatgcacccttcgttgccttttgctgcagtaagtccagaacttgtgattcgatctggttttgtttcctaattcaccaggcaatcaaaaggacctcgctttgcttgatcaatacagcaaagtgtgaattcttacttaaaaaaaaaaaaagaatcctcatctgtatgctactaaaccaaaattctaagaaaatgaagagatttgaaactactggctgagctagctgttactaaaataataacaaagcagagtcttataagtatcttttatgtggtgccaaatgcacctagcaaacatcttctcaaggtttgtgtgctcatcttgtagcttttttcacaatgactaccatctcccccccacttcagggttgatgtaaagttggatttctttcaaatagttatgatgatggtgtccaatatttgtgaccttgctaaataaacagccatatggatttgtgataattttggaagcagagagctggataacatacatcacatccgtgagctaattagcaaggcagatactgtgcaacggagatgcttaaatatttttgtgcctcacaagctgaggggtgctgtggaccttgccccttgccctttggtcattcaagtaacctgaatccctcagagaaaaggagcaagggtcaaaggaagtggaacaatggtgacaaggagagaagaggaggaggaagctaccccaggtcatatacagatgtttctgtgtttctcttagtttgattgaagaaactctcaacagatccatcttaggaaaaatgttggtatcagcaaaattggcctcaggtgtccctaacacagtcattcccaaacttcctgccttcttttggtgtctgctccaaattaagtgtcctaataagtatatctcatctctgtcttctagactgtgttccttgttctggacattttctgtcctcactattaaatgttcttggcctattgcctcaaggaatgttctctgccaagttcttaaatactagtgtgaactcatggtagaaatggctgctactgtgtcagtttgttaacatttcccacattttgccagtgcctgtccatgacagtccaaaggaaggaatacaattctgggaaatcaccactatggcagccagagtaatgacgggcagtccggctgggcatttggtactaggtgcctctgcatggggctggccctgtcccctgtacagctcctttttcctttccacagtagaagaacaattgccttccatcgccagtgccatgctgtcctgaaagcttctttcatttctcaacactccctgtgtttgctattttagccttagctttggaatattttccccattgccatttatgatgctgccccagttgttatgagtagtatctgtcaaagtaagaaataccactctccccttggacacagtgtggttgtaggaccttcatgattaatcaagtctttggactgctcccagctcaacccttgcagctcattggaaacttgtcattgcagcaggactgttctaagcacattgtgtctctaacagacattttcctgcctttgttgtgtattcagactaaatagaaacatcagtgagatatttgcatccaccgtggacagggcaccttaattaaagtagatcaatctgactgttttagtgctaagcagttctccagtcttcataaaacaagggaaagaacagcaaagtagcccttcaggttttgccaggaaaacattaactcctcaggtcttatctaaatgcctactaaagatagaatcagagcagacagatttaaatagcagtaagaggactctcagtaactgagaaaattatcagatcctaacccgaggggagctgggggacttatttctctggaaatcaacctaaattgttcaggtcgccccaaaggagaggtgaaatagatcagagaactcctcagagccccttctatctttgaaaatagtacatgattattgagaacgtgtgtgcaaacttcaacagctgtcaaggactgcatgaatgtaaggtattctcatgtaaaacttaagaattcccagccaagatccactagcttattctcaatccatgatcacagagtcttagaactgaaaaagtttcattgatgttaaggggggtttcaaaacaatctgctattgagagacaggaccttccctggctctttaaattggagaaagtcccagatacagccacctagttatttaatatgttgtcatttattcacttgaaaaagagcagttaagtaccactatgcgtgtgacactatgattgatatttattgagggttttgacatctagcaatcttaaatctggttgagtctaatgtacacacacgaagttgaaatagtgagtgaatgcttacacaaggcagtggcatactggtgttaggcggagggacatggttattgctgaaggaagaacatggacaggaggggttctgtgccctacctgtcctggcctgactgtaactcatgagcaaggcatggctagttggcctggatggcctttgagccgtctcccagggatgtgctgggaagtcaaaatgcccagggagtaaaacttaaaatcttctagtttctccctcagtcatagcatgcaagatgatatcattagcattctgacccaatcacagatttttctctgccacccataagcttggtgtgaaattgttgggctgctaagtgggggtgagtaaggtcagccactcttcatcccaagcattgcaaactcctcccacccttcctgattcctcaccctcaattcagccccagccctgggcataggtcacccacagtctacataccttggtacaactcagtggttttcaaccttgagggaagaggctcctctgtgaacctgaaaatatctatagactgtttttccaggaaaatacaaatacccataaaattttgtgtacaattttaggaggctcatgagccctccaaattccatttatgggcctcttacctagaacacctgacataactgaacatacacttgaaaagaaggtccccagatgatttccattgctgagttcaaatcaaaaagacaaaatgaagaatcactcatttgaaaatcactcatatgtgctttgggctattgtgtccttatgtgggtgacaggaaaaacatcaaatatggtccctaatcttaagaaatttaaaagagatattatatacctaatctaatatgcaatatagctaagatgtataataataagcaagacatttgattttaacataaggaagtgctaaaaagtatttatcagatgcctgctatgtacaaggccctattctaagagctgaaaatgcagcaatgaacaagaccatcgaaaagatctgtccttgtggactatacacacatcccagtggggaagataagcagtaaacacacaataaatagggcgagagaacggagtggtgtgtgggtgggtgtgtttgtgtaaaaaaggcaggtttaatagcgtacagggaaattatggtggccaagggatgcctctatgatgagctgatattttaataaaaatttggatagggtgaaggaaacagccacaggacattctggcagaagaaaggctcaggcagcagaacagtgactttaaaaagcctccaaggaaatactggcatctctaaaaaacaagaagaccagcatggctggttcagattgaggagggaggagataagagggtgtagccagggttcagattatgcctcatgtgacttgcaaggagtttgcattttattctgagtatgatagaaagtcacctcttcagggacaccttctttgtccctccctaccatacatgtatatacttaataatccatatggcaaaaagaaagagaaaatatttttagcctaagccacagggaaggagtatggatacagaggcttgggaggtgcaaggattgtgaataaggaaatcaattgttccatttaggcacgtgagttttagatgcctattagataatgatgtcaagacgtggaacaggcagctggacatactgcttgctgtagcttggacacatgtagggtagctttctgggatggtgacatacatctgattatcttcattatgcagattgtttttaaagttaaatttaataaaatcacctagggggtagttatggttagataagatattccaggagactaagtcttggaatactccagccttcagtgtttgggaggaaggggagggagattcaacaaaggagatcgtgaaggaggtgccagtgagctaggaggaaacccagtgcagtgtcgtctcttggagctcagtgtaaaaatgtttcaagaaggaggaagtattttatgtccaaagctgctgagaggtgaatatgatgaccttgtaagaggactcgagtcagacctttccactggacttggcaatttcgtactcgctggtgacctgttcaagggcagttttgagagtgtgtggggggaggatagagccttggttatgctctgtccttgtggactatacacacatcccagtggggaagataagcagtaaacacacaataaataaacaaggtgagagaacagagtagtgtgcttgttgctattacaaattaatgcaaatttcgtaactgaacacagtacaaatgtgttatcttaacgtttggaggtcagaagttcaaaatggattgtatgggaggaaatccatgtaccagcagagtggcattcgttctggagtctgtggaggagactctgtttccttacttcttccaggcagaccacttaccttccttggctcatagccctttcctcctcctccttcaaagcacaccactgcagcctctgcttccaccatcttcacatcaccttttgttctgcctctgccattcccacctccctcttataaggacccctgggattacaatggacccatccagatgactcaagatagcctcttactcttaaaatccttaatttaattacatcttcaatgtctcctttgtcatgcaaggtaacatatcaacatattcacgggttccagggattaggacatagacatctttggggaccattattcagcctcctatgctataagataacaccactgaatgcaaacctaggtctctgcattgtaacccttttcaccccagttttgaaaaggctgtcttacactacatatagcaaaactcatgtaataatgacctctattctaagtattttcttttttaaaaaaaaaagttttgcagttacctatcaatagaaaaagtaaggcactacatatataatttgatagagattgtatgatacagatgcaaagtgtggtaaaagtagaaaaggtaaagctcagaatggctggtcagagaaggaggtatcagatctcaaaggatattgataagtagtgatcagtaggatattgataaaggtgacagcacattcccaaatattgacagtgtcaaattcaggtttttccaaaaggttcttctactcctcctcttcccttccacttcccctctctgcccctgttccctcaaagagaattgctggctaaacgtcagtcttccaaggggcccaacaaaagacattgcttggcatctcgctagtgaacagtaggcctccctttgcaaatgtcacttgatatgagtcactacgccagccccatctcactccctgccaggtgagcaggattgcccttcctccatactgcctaaaggaatattggcctcaatcatattctctgcaacacgggcctggaacatgagcagggcaagttgatcagaagaagagaagcaagagagtaaaggctttatttactccaagacatgggacagcatgctttctgaactatcacagagcagaccaatggattgtgaccagatgttcctttttgcagccagaatcaatgccccaccttgccccactttctcaatgtaccaacaccaccctgaagtgcttcatgtagggtattaaaaagccactttctttctttattattatttatttatttattttattattattatactttaagttttagggtacatgtgcacaacgtgcaggttagttacatatgtatacatgtgccatgttggtgtgctgcacccattaactcgtcatttagcattaggtatacctcctaatgctatccgtcccccccccccaccccacaacagtccccggtgtgtgatgttccccttcctgtgtccatgtgttctcattgttcaattcccacctatgaatgagaacatgcggtgtttggttttttgtccttgcgatagtttgctgagaatgaaaaaaaagccactttctttagagaccatggagaaaacctggaggctgtgtttcacgtagctacacatacggggattctcgttttaaagagtgatgctgcatgactctgcttccactgccaaagcattaacccaacaaccaatattcattaaaatctcatcatgtgctgggcacagagtgggcaccatttggcctagcaggggataaaagacaatattcccatcatgaaaatataaaaagtcaaagaacaagccacaagatgctgtcaaagagtgcagaataaggtccaatgaatgccatgagcatacttctaaagggaaggtcacttcccactgcacagattagaacagatgatgaatgagttggagatttgagctgcagttcaaaggttggatagaaaagacagcaagtgatgtccaagtatgaggaatattgagccgaaggagagaaatgtctgagcccaaggcaggctcagggcaccatgagtaagtagatcagtgtatttgtttcctaggctgccataataaagcaccacaactggtgctttattaacagaaatgtattctcacacagttctggaggctaagtgtccgaaaccaaggtgctggcagagccatactctctcagaaggctccagatgagaatctactccatgccttcttcagcttctggtgttgccagcagtccttggcttgtagacacatcactgctgtctctgccctgtcatcacatgacatttcccctgtttgtgtgtctgtctttacctcttcctccttgcagatatgtgcctctgtgcctcttctccttttttataaggataccaaccagattggtttaaggtcccctactccagtatgacctcatcttaattaattacatttgcatttgtttccaaatgaggtaacattctgagattccaggaatgacatgaattttgaggacactatttaacctagtacagttagtttggcaagagcaaaggtatcaaagaggggaaaagatatcaaagaggagaaacagacgtggggtcagatattgaagggcatgaatgctaaggattttgtttctattctgtaggcaaaggagattgatagaaggttttgaacttggaatagtctctaccttcaagtgctcataattagagagtaaaagattggggggatttaagagatgttgccatcatatagggtgggttagcgttggaatcacttccatgacttactaaaaaaaatcaaaaatcaaaagctctccctgaatttcagactctacatttcttttgtagggaaacactggaaatatactgtatattatttttcctttattctgatttccaggcaaaagaagaagagagtaaaaatatatttctgatacacacttaaaatgcccattttggttctgttaatacaacattcattatctttgtaaattgcttgtaatctgtgttggttgtgatctgagtcagtgttagttgctatcaaatagtgagccctaattcatcttcccttgtgttgcttcctggagacataaatgtcaacctagaatcatagagctgaaatgcctcaatctctacaaaccgctcaccttgcagaagaggaaactgaggtttgagtagtttattcaactttcccaagaccacagaactgattagtgatagagctgggtctagaatatgatccaaagtcataaacctgtgttttctctaatattcatgtgcttaatacatcccttactcaaggcaagcccagtcccatagtcagaaaaaaaaataaatttcttcctccataatctttgtataaacacatagccagcatctactatctgcatagttttcctttactctattccttaactcactgttaattaaacttttttttgagataattgtagatttacatgtaagtgtaagaaatcatagaggtcttgtgtactctttgcccagtttcccccaatggtaacatctcaatgcattttttaaatgacacttttccaaggtagggcgtatgaaatgtctttaaaatcacaatctcaaaagcaactgtttcacatcaagtcaccaaactgtgattccccatcccttgtaccattaaattattattattattattattatttgagacacagtctcgctttgtcacctaggctggagtgcagtggcatgatctccactcactgcagcctcagcctcccaagtagccggacttacaggcacatgggcacatgcaacgcctggctaattttttgtgtttgctagagatggggtttcaccatgttgaattcctgagctcaagcgacccacctgcctcagcctaacaaagtgttgggattacagatgtgagccactaggtccaacccccttgtaccattacattctaaaatctgctcttgccatattctagaccaggtctacatgagaaagagaaaacatgactggcaacaatgaccagcaaatagtattgggaaataacttctcatgtgagtctagggagaatagagatacataaactaagccaatgtatgaatgtctccatggcatcccaaggggaaggcccttgttcagagcattgccaaacatgtaccaaagctcccgagcagaaataaagtggaatcattcaccacacccagatatttacttggatatcatttcaggttttagcattacagtgttgttgatgggtggttccttgttttgaaacaactttctagccacccttttttaaaaaattcattccactaacttcctaacctagagtaggtcagaatcttttccgtcatttacctgggaaacactgagacactgagtgccttaaatgccacagtgaaatcagaagctaaactgggatgaggaagcagagttacctgaataatcacaataaagccattttgcctctcaagaaatcttaagctaaacagaggaaagtctaatagtgaacacgtccagaggacgaccagtccactggtggttttccatagctaggaccaggcactcactgtgtttgctttcttcatctctggagagcagggaccaggatgatgaaagcatgccttttctttttttcctccttttaatcccaattcaaagaacttccaatgtatgctcaagagtagcatatttttaaaattccattattcagtgatttcctattatcaacaggctgctttttaaacagaagaaaaccagtaaaaaaaaaaattctaatttctcaatcaaggtcaaaggtttttagtgatcaaaaaagtatagatgtcttctgagaagttactaggaattttagtaattaaaattattcagtgaccttgagggcttgctggtgagtccctctcctgtgtgaatcaaccagtgctcacatccttggcaaccatgtgtaacaccccaacgggaagaatgacttgatgctggagaataaccaggctggagaaactcataacagaagatcctaaatctctctgaaatactaagagcaaaaactaaaaatctaagtggaaggaaagagccaaactcccatgatctcaagacagacgtgaaaaatccccgagagcagcctgctgggcggatgagagcgccttctctgccaggttagtactgacactcctcttcctaattaaatagccagcacagaaaaggccctgccatgcttctggttgcttaataaccccagaggcagacacgctgtaggctgtggagttccgtccttgccttgaatagggagcttctgacaggttctcaaccagcccccacaccttgttcctggtctcatcatcttctctgcctactaagaagccacttatgcctaattggaaatttgaatttgtccaattcctctgtcttcctcccacctccaggtccttggattaccagccagtggaataattctgcagagcatttcctggtagtcctcttgatagtgtaattacacttgcccatgtattacacgtccgtcacgtggatccttagctcttagatatttctcatcttgagtttctgaattttcagctctgccctttatcttcctctcccaatccaagatccaagtccatttatatagagaaggtccttgttttgccatctccctcctcagtctcttcaactctttcaacctatcgttggcctacctaccttagcttcatcccctttctgtcactctcatgcatttgctggatttatcatttcctctaaaactttacaatggggtaaaactaaagaggggtgcagaaatgaggacaagaaagagctctgtctctaggaagctcatgcatgttaagccatgtgagagacagggggacccgccagtatctactgaagtgtgagtaaaaggtctgctcaaatttgggattctgttgattctcactcagatcactgatcttagggattctacgttgagtgcagagtgtacttgcaaacttttaacgggggctgacaattaaaatggccccagatgccatttgagagcacctcgattaacacaaaaatctctgggtgtgttggtgcatcctccctctatctgctcagagaaccagcaatgtaattatgttggcattgaaacagaattcagccctgatgataacaggcctactgatcaggagcagtaggatgtggccattgcttgcaaatgctggttttgctatcatcttaggacatgtgactctaagagatgataataagatgagatttccttttttacccatttcatgcttgacaatgaatattattttgtagcagtgattggcagaaatagtaaaatacttaacctatctaacagtatttaataaaggtcttttgtctccaattggcacagggagtttagtttaaggcttatatatgggaacattttaattaatatgcatactctttctgacatattttaaaataatacttcactaacctaatgtcagagtcagaagcttaaaatatcatcaggatcacagaaattgtaagtgtggcaaaaaaaggcacttcagaaatatttgttgaatatttgacaactgaaagattgagttgcctgtccaatgagaatgacccttagatttagtggcttcttttttttcagatggtgacgtttagagcacaatgcatataacctaatcatcttcaggtacaggtcatcaggaaatggaccatctggtaactcaaatctattcacaaatgccccttcacatttttaaaatgtctacttgggctaaaaagttgaaagggataagctactagaaataaaggtgttagagcttgatccctaaaagtcagattggtgtgaggaggagcaaaatttcttagctctatgtccaagttgtaaaaataattgacaagtttgttttctagttcatgaaaagaattaagtaccagaaaacctcaactctgattccatttctgccattgccttgctgtgtgctttcagaaaaattaataaacctctcttgatattgggttcctttaaacaggcaaagtatgtttaccatccttaattctccgcattgttatcagaaacaaatatattacatgtgcaatataaagtgctatcagtgatacattaacgacccatgcaaatcgttattgacttggaatcaccatcgcctcttctccattctcctctgcgttgcaggggataaacccggagccacccactgttgctagaatccctttctccatatggttccaggcaacagtcagccaatgagaggcattctcatgaggtgtggaggaagagaatccattattccctagtgggtagtttcaaatagatgtgtgggaagattgcagacatgaggttagcagtggcttctggaaaagcacctaggaatcacacacttcatcctgcgagtagctgagatcaatgatagcagttcatgaagacttttgacacttgtagcagcttcctggtgagctcccatgaatcacccccatctggttgaaatttcctttatttttcactgcccttcccttttcaacagcttcctaagccttgaaacccttcctccttggaatccctggatgggcttctgttttcccaagtgaaccctgttgatccatgaccttaaaattcatggatcaacagcttgcttctgaatcatgccaatgatctttaatgtgaggagaaagttattcattcaaaggaaaaaagtcctgagtgatttcgtttctggccatatagcgaaaccgtaacatgaaaaaaaaatatttcataagacacccaaaacattgaataaaaatatttcttaaaaatctttttaaaatgcttggcttaccaacaagaaagtaatggaaattcccaaaactaaaataaagcagaataaaaggtaccaagaagagtgaggtaaaggcaatatttgaagggataaacattgattatttcccagaatgtatgcaaaagtaatcctcggattcaagaagtgcaaaataaattccatacaggactaaggctggactgaaaccactctcatctacctactgtgtgacacgacagaaaccttagacagaaaagaagacccaaaaattaaccagattaataggatggatttcctaaaaagaaaccatggctagatcgatagctgatttcttcatagcaatagcaaagccagggatggaataatagctccaaagtgttgaaggaaaaaactgtcaacgtatttactcactgaaagtgtcttttacaatagaggcaaaataaagacattttcggacacactagagcagatttccccacccacaagtcttctctgaaggagatgctaaagggaatactctagaaagaagaaataggatctcagaacggaggtttggatactaaaagcaatggaaaagaatttgtccaacatgtagtgattaaaaatacaaaaaatcccccaaaatgagctaaaatgctgagcaaaaatagagtgtaaaccgagagggggtgattggaatagaggtattctaaggtcctgttggagtgttggggggtgaggggctacagatagtgacctatgtcagccatgaccaggttaaataagcacattataatttctaaaataaccactctcataatacacatggagggtatgacctccatgtcagtagaagaggaaatactgactagaaaaaaatattaatgggaatttgaatccatggtaagacactatcctgacatataggaatacattggaagtggtatggggtagattagattcatgtgggagacaacatagtgaaaaggccttttgtgcaagcttatgttccttccctgctggaagcatctctacttttcttaaaggcacagatttctacactatgcaactaatcactaattccagttaataatgtagtcagagccaggagcagtggttcacgcctgtaatcccaacactgggaggctgagccgggtggattgcttgagcccagaagttcgagaccagcctgggcaacatggcgaagcccatctctacaaaaaatacaaaaattagccaggtgtggtgatgcatgcctgtagtctcagctacttgagagcttgaggcaggagaatcgtttgagcctgggaggcggaggttgtaaagagccaagattgtgccgttgcaatccggcctgggcgattcagcaaggttcttatctcaaagtaaataaataaatagattaaataacatagattggggaggatcatgtgcaggaggtcagagtacatttcagaggaaaatgcaaagtttctaaaatactcattttaaagggataggcatcagcaaagaaagagaactagtgattaaagaattcattttgttcatccttttattagggacaggctgctatgtaataatgctaaattgtgattatagatgaatttgctggagtgttgtcctttctgatcctctcctggaggagaggcccgtagggtttctggcaattaagaaaaggctcttgatcataacgtgattgcttgaggtgttcaaattgcctgcctttcaggctaggcaatgtaacaattaaggatgagtttgtatttgtttcctggtgcatgctgtttatttagtttgcatattattaaagtctcaggattgggttttaatgcacccaggattgcctgatttacttggctgttagtatcagcatggaagttatgcacacaagcctacagaactacctgggcctcctcaggaggggagaggtgaaatccaagtcctatttgttaattgggattttccgccattcagggatttaaccagaaaccaaactctcaggtctgtcccaggcctgcactggctgcctaatgtcccagggtataaattcttccaacacagtggctgttttttaatttttccccaatttcccaacctcttttattcttgtgaatcatattggggccttttgtccctttggccttactggaagcagaatggcacctgctgcttgagcaattttctgagtcctgttctctggcctccagtctttggaactgaccgctctacaagatgaaagtaaagatgtggaaagacaacccttcttcctaccacccgaagcagaggcaaacctcaagtcatagcttcattttcctgagccctgcactgtttcttacaaagatttacagaggtgggagaagggttggctaattgggagttcctttggggcagatgttgtcactcaagcacacaagtgtgcttcttggaatggaacataacccgagtgttgccctcagacctgtacttaggatctattcttattctgatcattcatcatattctagtcaccaattatctccatgttaccaaattctgggcacctgtttttgcccccatcttcctcacctctcagcagcactgggcacctctctctccttgaaactctgcttccttaaccctttgatgccacactcccttgttcttctcctacctcggtttccgcttggatcccccacttgccctctaaagggtgatgttcttccaggcttcccatgggacctctgctttgctaatgccctttccccagtaactggcatccattcattcccatggcttttgttctttccatgtgctgagtgtctagctcagatctcccttgagttccagatttgcatagctagctgctacctgaccttgctactgtatatatcagtaggtatctctgaatcaacatgtacagagctgaatatattctattctcactgaatatattgtattatattataatatctcactgaatacattatattctcatctgttctgagcatctccatctcaggaaatggaaccatcatcctcccaattgcccaagacagaaaccagcattgaccctgccacctccctccactctatccattccattagctactctcatccattctacctccagaataggtagcaaatctgttcactttctagttccactgccaacaccctcgtggccacatttatttctcacctaaatacaacatctccaaactggtcctccagctttcattttcaggcctctacagaccatggcaaaatcgattgcaaaatgttatttccctttttagtactcagcagtggcttcccgcttcacttggaataaacctgaactccttcctatggccaacaaaacctggtaaacctgggccctgcttaatgctgcagacacagattgagcttctctccccctggcactccatgttccagccattccaggctttactgtgccctgcagctcttgaagttcattctcctacaggaccttcgtgcgtactgcacccttgcccaagatgctccccatctgctctcccatggctcagctgtagcttttagaacacatcttggacgtggtcttctcagaatggcttttcctgactgccttccatgaagtacgtgcctccacttgtgttctggtacctagattcctgtttgttttccttcatagcacatattgtgattggtatctgtttccctacttgctcacaggaaatcttgcccattgactgtaaggtctgcaaggccagggaccacatctgtccaccttctgatccttagcacctcacacaatgcctggtatgtggtaggcacttaatgattatggcatgagagaatgaatgaagacttcatctcttacttcagtagtttctctatgaccttgactgaccccagagttcttcttcctttggggtggagtgaggtgtgctggggccaagaagcattagaggcagagggaaagcctttagcaacccaagtgtcagcgtctgtagctgacactgtatatttggacactttggagtgttcttttatacagaaagttataaatgaggacactgctaggaagcttaccagtgccttgaaatatctatagggcttttggttgttatatctgagacacgtggtctaatcatgactgacttacgttcaaagagatgcatagagtcataattacatatattttgcttgaggcgaatcaatgtctgttctgattggtgcggtagctaaaagcatatactctctggcagaaagttttctaggctgatactttcctctgtacatccaccgtggtcagatgttaattaggtaactgtgtattcatgtctccaaagaattagtgaatcaaagaaaaaaggaggcagagtctgcaattaagcagaggaataaggacatgatcatggcagtaaccagatgaaagagaggccatcaggggaagaggagaaacagttgaaaaaagaaacagcccctttctgtctctgtgaaagcctgtgataggtcagtttccctcctcatcactattgctgggctgctgctggccctgggagacatacctgatgctatccaaccaggggttcctgttgatgggcaaagaagctaggaatgaggttcatttgttgtgcatatgaaaagtaaatccatgcctgtggaattccacaaatagaaacagaacaagtgttttcatggctgctatggaatttggagttttaacagtccaatagcaatcaagtttcttcttatgttgagggcagaataaaaagagaagcctcataaaaacagaggagatttcagcgtttctcttccttttattagaaactaatttacccatgaaaattcagcttgaaagctaaagtgccctacacaaacaaacaaaacaaacccttgtgctttttgtgtcttctgaatttggaaaccaaaaagtgcacaatcatttcagaggggtattctggagagctcgcctggtacaaattggttatgaataaaagcatgtgtgtgtcttcagcatctccctctgaacacaactaggaactcctaaaagccacattgtattattctgtggtgagaaggaattttgtgacctttggagaaattttgtttcagtttttcctgagaagaccatgataaggaagtgagccacatttcttggccatgggaatttgtctcaatgccccaggcttgcgttctcaggagtgtggtgggttctaagcaagtgggcttcttgccaactggtcctgcgttgcaggtgcccaaattttacacttacaaacttgttaagattcccagccaacctcggggttgtggaactgacggcagtggcctctggggagcatctctatgctgaccttccctcagtgttcaggctcctggctccacatccaagaatccgctgagcaggaggttgagccctaaaggtcccagacactcaacaagaaatggaggacttagcctggaaggaaggacaggctcattggaaacacaaggggcaagcgcctggcctgcatgcttaccaacagccttcttgtctggaaacctagtagatttggtgctcatgcctgaataccactccacaacattggacacatctctcctaaatagttctttccctcttttccttacctctggactttctgaccactcttgtcaatcagccttgcaaaatgcttttgttttgcctatttcttaaatcaaggattctcaaccaggatggattgtgccctgcaggggacatttggcaatgtctagagacagctttaattgtcacaactttggggagtggggaaggcttgctactaggtagaagccaaggatgctgcttaacatcctacaatgtgcaggccagcctaccccccaccacaaagacttatggattctaaaacgtcaacagtgcagaggtttagaaaccctgactcaactggtgtgtctccacagcgctttctcctatatgctttattcttcctccaactcatatactctttgggttatctcatctattaccacttaacccagtgatgtccatactctgatggctcccaaacctctgtctccagctggatttctcctctgagtgtcaaactcataaatttactatgctactggacatctttagcttgatagcctatagatggccttctgcttttgttttgttttgctcttggattcttagcaagaaaaaaaaagttcatggacgggcggggtggctcatgcctaaatcccagcactttcggaggccaaggcaggcagatcacttgaggtcaggagttcgagaccagcctggccaacatggtgaaaccccatctctactaaaaatacaagaattagccaggtgcaatggcacacgcctgtaatcccagctacttgggaggctgaggcaggagaatcgcttgaacccaggcagcagaggttgcagtgagccgagatcatgtcactgcgctccagcctgggtgacagagcaagactctgtctcaaaaaaaacaaaaaagaaaaaaaatgttcataattgaaaaagtaacctctcacatgtagttatatgtttttaataatagggaattaaaattaacttttattttgaaataacaaaacacaatttagtggcacattctgagatcgttagatacagcttgggaatgtcacaaaagctgttgaagggaaatccttgagtcttttaggataggaagatttttgccataactcattctttgatttaaacaaggacttgtggtctttcagtgtgaactccaaaggcttgatgtggtgctgcctactgtcgtctaacactttcagagcctcctctacataatgctttaggactcacctagtcctagattgacactgtagggttacaatagatgtaagttgaaatttattaatattttttgagttcaaagaccatatcttatatacctttcagttacctagaatgctgaagcagaactgcttctcgagagatatttgatgggtattgaatgaaggcatttcctaggaaaacaacttcttgtcttttacttttaggccctactcttagccattcccttctccactggcaagaggtacacacacacatacacacacacccacagagagagagagagagagagagagagattgactaaccctaaatcaactgattatgtgcatttagaaaaatcaccaatgagtagatgccattctcacaaaacagcctgcacatccctttagaaaaccctcataggtcagcaagggagagaaggccagaggcaggaaggagaaagtgtggaaacatctgtcatgggatcagtcatgcggaaggtttggaactgtgcccctgagtttgtgcttacagggtgctttccagaaccactattatctcccagggaaaccagctgcttacacactctgagcccttacttgacatcgtgatgagatattggaaacgaagggatagtgccctgagacacagtttcccaaaagtgagagtagatcccatgcttcctaaacttcctctttctttaaaagaacaatctccttcctccaacttggagcagctttccagagagctgcccatctgtttctgtctttaaaacaagtctccatgtgcaccatgtgaagccaggcaaagaagcatggaggagggtgaattacagattgatgaagaggaggggcatggaggagataccaagcaaaacctgggggcccttccacctggccccatctcagaatgtagagccacagaccagtgagtctcaagatcaacaaaggacagtctctgctggctctgtatcttctgacttcctgtagggctgccagctcctgctcagtggtgccttttcattgagtctaccatttagtgactatagagtgggcacccattgattgtttccaagagtcatacttgttcacaggctttcctgtagcccccatgttagtccattttgcattgctgtaaagaaatacttgagactggataatttacaaagaaaagaggtttatttggctgacggttctgcaggctgtacaggaagcatgctgctaacatctgcctggcttctggtgaggacctcaggaacttttcctcatggcagaaagcaagggagatgtcatgtcacatggaaagagaagaagagaggcaagagagaggggaggaggtgccaggttctttttaagaaccagatctcatgggaactaagggtgagaactcactcattactcaaacacaccaagctgttcataggggatccacccccatggcccaagcacctcccactgggccccatctttaacaatggagatcaaatttcaacatgagatttggaggggacaaatatccaagtgtattgactcccaacaccaatttccaagctttggcgtgccatttacagctgtgagaaatccttaaggtcaccagctggaagtggggttgattctgcaaccctgccatcctggacgcagcctgctatgtgggtgctggtatccagtgaagcaagtctgggttggcttcccaggctgtgcagaagacctctcttcctcttctgccccactttgtttcattgattcgttcattaatgtcactgatgttaagtggccagaatagattaaacaatgtggtaggcactagagagaaaatggtgaccctaagccttgagttgtttccatctctggaagactttggtcagtattaggcgaacgtacgagtgttatgtcatgatgggaatgagcacaggagccttcagttctgccaagaaagggcacctgctggagtttcaggattcagctaagggccactgagccctgtaaggtgatgtgaaggccaagggggctgagggagggagggacaggtgagtgctgtatccacagtgagagaggaaaccaggtcttcaggtgggagagcagagtaattagagggtgggcacaggaagaaagatagatccctgggacctctgcagaccacattaaagactcgatcctacagtggacaagtgcacaagaaaaagagtcaaaatgtgtgttaaggagaggctggagaggagtcctgaaaaaataaatgagagctttgccctcaaagagtttatcatctctttaagaaaaggaaggggaaaaaaacacatgaaattgacagtgtgaaaaaccaaatggaatactgttaagcactgaagcattgagtgcagaccaaaggggctgcagaacagacagaagagtgagcatcccatgagaaggcaggacgggccacagccttgcaaatacagaagggctggggatggtttccttggtgaggcttcttatttgcaataaaagggttcaacattagcattgactcttttaatttctccaagtatttagataactgtgttatcaacagtggtaatgcctgcacttgaggctttaaacaaagaataaaatcctggctggtgtccgattcacaattggaacaaaaacaaacaaaacacccatggggaaaatggtacttctggagttcctgtactgctcagatcacataaggctacaaaattataaaatattacctcctcactggcagcatctccttcacttgattgagcttcgttattttgccttcagatattatcagtttatggaaactagacctctgaactgtttgttatggggacactgttgaggtcactatgaggcttagtctcgctaaaatgaaaatgcagtggtagtaatttctttcaggcctaatgcctagggggaaaactttaatttctctgaaaaacaaaaactaggaagtgtgtacatttcatctctctctttttactttatctgtctgggaacatattgctaaacttgaatctcaacaatagaagcccagtaagccttctggttggtgtatttgtgtttcagtgttcttctgagttctaattttcatttctatcttctcatgttaataaatgggcttttttagtaaggtgtctcaaagatgtatggggctaattgggagagaaaaaattaaagagttaaaaaaatgaaaaaagggaagaatactagagaagaaaaatgggttgaaacaaaaggataataaggagactgagtagaagggagggagcctgctgagatgctctgagatgagggaaggtgtatagatagtggacagaggcaatagagagccacagaaggtttttatgctggggagtagcaacattaaaactttttttttaggtttgcccgattgcaacgtaccagactatgcacctgattatatgtaccaaaatagggaaaagctaagtgattgtaggtaccaaaatagggaaaagctaagtgattgtaggtaccaaaatagggaaaagctaaggaagtgatgcctgggaagataaaagaataagcagctatgggaagcattttggtagaaaagtgaatgaagtttgagtgtgaggagtaaaggagtgagtcagcactgacagcaggtgtgtagggtgttattattgccagagagagctcaataggaagaagggatttggatactttagaggggtggagagagaggggaagggggcaggaagaggtggatatattcctgattcctgattgtagggtcctaagatcccatatcttttttttttaaaaaaaatcttatccttaactggatagaatccaaattgtcgcttcttcaccaggctggattccttcaaagccaactagttttgtaatagaatgatgctttgagatattggtcaaaagacatattaacccaaaggacagcagtgtagtaagtaaaagatccctgaaaaattctcttcagaagattcataaagttgtcatttaaccacctgttcaagtcacataagagttcataaacaacactatgcttttcttccttggcccagtggggcattcatttctctttccagatcagtaaagactattcatgtttcccccaatgtcttattatgacaaatttcaaacataaagcaaggttgaaagaattttacagtgaacagctgggtcacctaccacgtagattccactgttaatagtttactgtttttgctttctcacaaatctctccacctgtgcatccatttattcatcttgtttttggtgcatttcagagtaaattgcaaacatgactactccttgccatataacttgcgtttgcaggctggggaacctgtgatagcccacctaggttgacagtggagatcaaagagaagtcagtggctctttctgtgggtggtttcgctccccaatcccttcctccccacgaattttaatgttgactctttaatgacagtagtgtctagcctgtgcacttgagttcctagaaagtagaaaagggaatttttacaaacccaattctctttaaaaacttcagtctttgagactgaaaagactcctacaggtagcatagttggaagttgttgttttttaagtcccatagagacataagctctatagcctacgtgcacatttccagatttccagatatcagatttacttaaagcaaaactgtatctttaatgatgtaagaaacatagagaatacagatggtctctgctttcagatacaaaatattcctaaaaatgtcaccgaccatcaccattgtctctacctgtagggagttagaggcagaaattgtagcacaggaagttagtgaggaaggaggtaaaagtttttagctggcaaatggatggtattatcaaaaccagagattgccttactggaatttacaaaacaactattactgcatgcctttatcgcatgcaattttcaagcttaagaaatgtgacccagcagcgtaataataagcctggatatgatggcattcgattaaggtttgttttgcctccatttctatgtctattgtatttacatttatgttttaattgatattttggtcatgtgttttccccaaagagattttgtgaaggcttccattttctaaaattaaaaaaatgatatatttgatatattgtaaacaaaagaaatcctccttaatgtactcagaaatgagatcttgttagtgcactaaaacttcacttaaaaatatttatccgtaagtaccataagcaaaccaaaggtattattgcagagacttggaggaaaggacctcagtttgggaagagccaatatcaggaactaattcgcagatcggaatgtggcctgaatagaggagagggagagagtattaaggcaaatatgcagcaggtgatatagaaacaacatctgaaggagaaagcctcttgatgacccatctgagagggtcaaagtcagtgtatttatcttggtcaactcaaactcaacacaagagatagtccagaagggaaatgaaatagaggaaagaagcagagattatatattttttatgttatcatctgattttgcaatatgtaggctctctgaattttttttcactggagaaaattaagtgctcttgtccccgcaggaaacttaggataagagtgtgatcagcctagccttaaagattcagtttctggagcttccatgacagtgataaagacctgtcggatccatgtgttacctcaatgattaaggcttgcttctttctcaagggtcaggcaaacttcatcctactgtaagtttagcctcatatgcagggaaattgtttaatggagccacttatctacctgtagggggtgagtacaaacaagtgctcaaatcattatcactattttccatgttgtcactcatgcaaccctgtacaaattttccatgggctggtaaatcttagtacttatcatctgcaaggctattttgtaagcagagaatctactgtgattattacactaatacttaaatcaatacttcatgcttgtagttctcactccaagatatttaggtgaaagttggcattttatggaggatggtggggggaaggtataattgagtagaaaaggatgggagaagaacatctctttataaccgttgcatttggaaagagacatttaaaggaaaatctaccaaaatggtgactttaaggacaaggaaagatagctccactagatcccctctgtttacgcatgctattgtttcagcccatgatgttttgtttactttggaaggaaatattttaccccctctgagataattaatttttgtcagcttcactgtttgtaagggaaactgagaaactgttaattgaaatacagagtgagtcagtgtttccagtaatttttggcagcattctaatttgtgtcaatcgcagcctaattattagattttttggaagcaaaaacatattttatttttctcttactgaatttgttcttcctttttttttttgaaatatgtgctgtctgacaaaggtcatatgatttatgtcaaagtgaggtgaaatacccatacgcttgaaacaccagaaggcttattgcatcatgtttagctcttcactgccgctcaatatttagaaggctcttttcctacttcctaccccagccccgaccggaaaatgtgattcttgcaaagaccttttagctaggatgaagtcgaggtatatggcccatcactaatgacatcactgaagtaaatttcccagaagccatcagggagaattcatttggaaatccaattgaatgtcacttgcaaagggcaggctcctgaaagaggtgaccagtcatgcattcctgagttgtttgttataaaagcattaagcactgcgaactcatttactcctaacgcgaacacactacattattccacaggaattctgttccaaatgatcgttaatgtagaggacgggagctgctgattgtgggcagggttaataaaattcatcagatcaatggccagtataatgggcttgttaatggtttttaatagaggttggatcttcctggcttcagcagagtgaaggctgggagagaggggcaggtggctgtgccaggagacagctccatctcctgcctgctgaggtggcctctggatgaagagagcatccctgttggtcactgagcatcagcagggctccaaggtggccttgactgggaacgcaggcaccagctgtgggctggggagggagccccagggacaaccatactccagcagctggcatgccacagcctcttgcagaccacaggccagggttcatctaagcacctgaagccatggatatcccaggcccttgcttgcaccccaccctgggcccaccgatgagatgaaagacaacagtcacactgataatagtgacaaccccagcaaatgctcactgaagctctccagggccaaagactaagcatattacacgcactcacgtcaatccccatagcagcatcactagaggtatgtactatttattgtccccattttataactggggaagctgaagttcagagagatttggtcactagcccagggttagattagaaactgtgtgcctttagatgccatgctcttttattagacggagagacacagaagctgcagcctaaaatcagactgaagaaatatgcaaggtgcgacgggggcctgggagtctttccatttgtttctccaaccagtcagtatgttcaggaccaaccttgagcaaattatgtaaaagctgtagcttgtctgcaatgctgttcctctaggcatcgttagtaaaattcagggtgcccagggcccttgagatgcccaggtgctctgggccaccccactgtggccttaactggggcaccctgagaggtcctcttcacccagtgctgccctgtacttacagcttggtccttctcaccctgctcctgcctcaccaaaacttgacccatttctggtcatctgtgggtcattatgatatccgactgccgtagccagatcagctcggatgggaggaagctactgcttcctggggatgcctcctgagcacaagtcttttgtgaatgacagcaaagactgcccagagccagcacccagagttccagctgcactgctgggcatgggaacgcaatgacattcccgagctccagagactgccctaactgaggggccaacaccgctgccctggggctcaggaacaagatggggcgggagcttgcaggtggagactgtgggtgaaagaggcagccacgagctgaggaaattggcaagcaggagtgaaggaggaatgatagctggaactacaaaaaacgcaaaatactagcactactagatgtttccagtaagctcagagggtggcagaaggacttcataaatgttatcaataaatgaaaacacatggcacacatactccagtgacctttcccaggtcagcttctataacccaagatgggagcaggctgcagcagtctttgcatctgaaaacgccatcattcctaaagttatttccttgattatgtcattttaaaaactctactgttaagggtttggaggatgtaagaaaacagatggttataaggagggggtgatgcagggaaggagggggaggacataggggtttcagagggaggctcacgcataccccacacacttaccaccctcagcaggactgagctcagttacaccatgctaaatgcaacaagaaacgcagaactgggtggaacgtgttctccggccccccagagcgtacgaatatacaccataagtgctagactacatggcacaggatataaatgcagtcgagttgactgagagaaattagcaagaggaaaattcagagacagcatcatggaagattgcactggctgcaaagaacatagaggatttgaatcccagggagagaaggcacagtccacacagggagaggaagcagggacaggaggctggaagtgcgagcgagcatgctgagcacaacggagggtgaaggagacagcctcggtctaacaggggggttgtgtgtgtgtatgtgtgcacaaatgtatgaatgtgtgtgagagtgcaagagtatggatgtgtgcatgtgcatgtgtgtgcacaaatgtgtgtgagaatatgccgaagtgtatatgtgttagtgtgcgtgtttgtgcacaaatgtgtgaatatctgtgagagtatgcatgaacatgtgtgtgtgagtgcatggatgtgcatgactatatatgcttgagtgcgagtgtgcatgtttgtgcatgaatgtgtgaatgtttatgagagtatgcatgagtgtgtgtgcgtgtgtgtgtgtgtgtgttttaggagagggccaggcacggtgacttacgccaagccgccaagccagcactttgggaggccaaggcgggcagatcacttgaggtcaggaattagccgggcttggtagcacatgcctgtaatcccagctactcaggaggctgaggcaggagaattgcttgaacccgggaggcagaggctgcagtgagccaagatcgtggcactgcactccagcctgggtgagtgacagagcaagactgcatctccaccccccacccccgccaaaaaaaagtagggagaggggagcagtgggcaataagcaggaccagagagagggtgagacacattgcaaagtccttggtagccagacagaggagtttggactaatgtggtaggtaagagggagccacggtaggtccttgggcatctagggagcatgacctggaaagcttcatctagcagtgtgtaagaggtagactggaaggggaacagagaattatgggcactgtaggcaccctggacaccctgccattctgatttgccattttctctcctgcagcacactttcatattccccatcacattggctgaagtcgtcctcaggcctcactcctatccatcaaagaagacaggactcaccttgctggctgctgccagcattgcttacatcagccggtaagaattacatggagaaagtcaacttaggcttgtcgttcaagaccctgagggaagttccagaaatgtgtactgttctgtcagaatccctttatcttggtttaataaggatttaatcatgtttacatttccaggtaagaagcattcttattgtttgattttaatgctcatggaaacctcccaagcacagaaacatgcaggtgtgcacacacatacacagcaagtcacaacttcccctctctctctcgtgaagaattaatcattgcaaagccactcatcttgctttcccaagaaaatgttgctccttggttctatcttcaatgaacatgcttgaatggctgagggatctgaggcatctaactacattctacctgaaaagtcatttagtgggcagagcatgctaggtttgtccactcctgttgcctgtttcattatgggcttatttgcatcagcagctggcatcagagctcctagaaggcatttgggcaattgcatgggagatgatttctgtagctggcctagatttcgtcattcaaccacctggcaatactcattttcagaaacgctgcccaatagtctataatcaagggaacgtgcttggcctttcacccagtgagtgggaaacttttcttccattctataaccttctcatctagcaccatgcttttgttccttctgaaagaaagaggcttgctgaacacaagacctgcagattggaagctaatcagtgttccttctctagactcacacaagctattcatgtgtgacaatctggacaaccctccgatccctatatgcggggaagtttagttcagttcagtgctctgtcagggatggaagcgcagagagagagagagagagtgcattccaaagaacatgggctctagcagtgcctgttttatggactcgaccagcctctgtcttagagcaaataaacttggtgcccagacctcatctgctgttttctccctagcccttccttcccttttgtggtgtctacccctcccacctttctgtgcccctctttccctgagtacccaaatctttcttctcccatcttaaagaaagcacttgctcaataaatctacccccagactccagtgctctatattgttcttcagcctctgaagcctttacattttaacaaagggaatttcagagaacgaggcttaagcttgggtcctactgatagttgatgtctggagcactctgttgaaaaggattctgaggcattaccaagaaaaagttgtgtgattatttggcaatgactttcaatagcatgacaatggacagtggtaagatatatgctatgtgtttgccatatctggcttaatacaaaggaatatatccctaaagacagagtatctgggacctggattggggtaagagtatagacacataaagattttgttgttgttgttcttgcatgtgttgaagagaagcaaagtggaatctagctgattatacacatgaatttgtatgctgtattttttttggtggtctttaacttactcttttattgccaagtgtaaatctggtagttcatatatatgttattaccttttacttactaatgtcttctacctaaggacttgtaagttgattttcagttcacatatctgacccttgtttttcttttcctttttggggatgaagaagatgaaaagcacctaaggccactgctgttattggggaaaattgtagtggctataaaaatgagtagtagaggccaggaggttggtttgtcagtacctgggcgggtgtccccatgatgcaggtaattaggatgttggagaaagaaatgccacaggatgggagccaggtacaagtgcatcgttatccattcagtggttcaccagcgccaggcactgtgctaaaatatggaggatacagtgaagttcaggaaacctgctacctttagaggctgtccgggaaagaggagcataacagacagtgggagacagggtgataggactgtaataggcataagcccaggatgctatgggcacacagagagatgtgcaggactggcttcttaaagggaagcactgtctaagctgaggcccaaggaatgaataagaataggtcaaaagagacatggaaaagaccttcaggcagaaaaaacagcatctgcaaagggctggaggagctgagggtatggctgaattggaggacagggtaaagccaggtcgtaaatccacattagtgcgtttggacttttaaaccaagtgcttttctgtagaaaagtgttataatcagaggaatgaaatgatgtggtttatgtaagaaagctgattagaaagatgattctggctgaagtgtggacattagactgaagaggaacaagacaggtagaccagttggtggcattgctggtaactcaggggagttgatgttagccaactgatgataacatcagtcaatccacaaataaaatcagagagtgtgaacaatgggaggtgacttagagatgacttagcattggaaaactaaatctccagtagggtagatgacatgcccatggtcatatggcagaggtggggtagagatgcaaagctggtacttgagccaactaaaactgaggtctcctctctccaaatccagttgtctttccactgtgtttacatggccaggtatttgttcaattcccagtgtgtgcaaaaccattcagctaaatgctggatggatgggcatgcacaaagcttgacctagctctgcactttgaaatctttcacgtgttgttcccagctctatgtgcttggattagacattaaagtactggtaatgaagggagtggagggaagggatggagacctgtcaccagcaggaacgtgactgggtgagccccagtgcccagtggggagctgaggtggtttgggatttcgtccttcatgaaaaatgctaagttggtatttggtccactaagccccatttttgctagaacaaatcaaatatagacacttaaaggagggtgtttgatgtgatcctgttgatggaagcatctctatttctgctcacgccctggttagaggagctcagactctttggtgcctgccaaccccacccttacgcagtttccagggcccctggctcctcacagccacagatggccatgaagttctacaaactgcagacacccatggagacgttttagggaagtggctatgggcccactgtcagatgtgccagtttggacagtcaaatggggaaatggcataacacgaatgaggtaaagagcatgggctcgggccagagggagcgtgagaaacgaacatgagtcaggaaaacggcactgaagctgagctggagaagcatttcaccgccgaaaccatgttcaaatgacctaaaaatagttcctgagaccgtggggaccgccttacatgtggtggttgcttttagttatttttcagattgcaaaattgaagagctctcccctaagtgggaaaataaagctttgcaaaatagtaatgactgcaaagctttcatttcctttggaaagcattagtcacctttaaatatggtagctcacttatttctcccttctctcctaccccaaaacacctcacctagttctccctgaggcagtggtgaggagcaaaaaaatagaaatgttccttctgctggtttttattctttcttttattgaataaatattttccctaacacatggttggtcctgcccagaaaagcaatgttatatcaggccaagcttcagcctgcagggggtttatccttaataagtggagatgacccatgcatacaaattataagtgcagaagatggaaagtggtaaaacctcataaaaaaaacacaaggagccacagaaaaggaagagtttgcatccagctgagcggtgtgggaagggcactgtggaaggcatgcattggatctgagccctgaaggaccggcaggattggagctagaaaaaatgagagaaggtaaacaaaaggagcacagtcccaaggccaggagagtgcagaaagcgtgagagcaagggtcagtaattctctttgctggacctgtttgtgaaagagactaatgagaaatatccctggaactacccactcatgaaggcttgcagatggcagactagaggatgttggacatagtatagaaaatgggagcatttgttgttgctgttgtttgtttgtttgtttggagtggaagcaagggtgagcagtatttgtaacttggccagcaaattatgctttaaaatgtcattcttgacaatagtgcttcaaataagttggagtgacaagagatgggaaacaaaataaaatataaaccaatataaaaataaaaactagccagcacattatgtactttgatcacaatgtcttagtttttatgtatggttatttcacagttccagtgatatccccaagcacccttctgccttggaggtcttggtccagttttccaaggagttccaataatctgctgagtgctcacacatgcccctgtcgtgcactgcacaacccatgctgcacactgttctgagcattgttcttacacacagatagcaaaactgtaatccccactgggtccaacatccccacctggcacagtgttaagggttagcacaccatgcccactgctgatgccaacagtgtcatttacccatcagccccctgtgttggtagaattaacaatgttactcgccacagcaaccaccccagctggcctggagtgcatcatcacactgctcttggtagaccagaaacctactgatgctgcaggtgtccctgctagtgtgtaaagtattgcatgccccgtacaaacactgcacagatatgcagctgtcacccagccttggggcagatgtttgtaaagtcccttccccaaagtagttgctatgaggcaagagagagaattactttcttttatactgtgctctccagggtaagatccctcagcaaagcttcctgggttcccagaagtaacagttctttaaattcatgcctcatttacaaatacatgtacacatcttaccctgagaatacattaaaaactgccaaggggtggactaagctgagttccaggaccagccaccttgccatttccagaatcagcaattctcttcttctctttctggtttttattcatttttctattgaataaatattttccctaacacatggttggtcctgctcagaaccaaccatgttgtgaactccctaccagagccactgttaccgtttccaaaatatgaccttcaactgagatcatccaggtcaaccatagctttataacctcaactcagcagggattggaatctcagcaccattttccacagaagaaatccttaccctacctgtaaattcatatatgaaaattaattaaaaagatgccacacaacacatccttgttgtcaacatgcggggtccagcccagccaggatccaaactgaagagggatggaggtggaggactaggagaggagagggtatctcatctcctgctcttctcatctttcctgttcaaaccttagttcttattcaaccaaaatgcctgtaacagaaatcagaaataataacggcatgaagagagtaaaactgtagaatcagaaatgagagacatgcctgagacacattgttgaaacaacagaataggttttatggattgattgacatgtaccacacaaatgaaaaggaaaaattaggataattctaaaaattttaagttagtagacaagaaaaatggtgattccattgatagatgaaaatgaattgtgaaagtaatcgtcttgggtataagtaaaacagtcagtttaatatcccatatctaggtctcatttcaaaaatactctggtttaattggttcaggatatgccctcagcattggaatttttaaggccctcaagtcaattctaattttgagacaagattgagaatcacctgcctggaggaatttccattcagaaattcagaccctgcagtctcaagaaagatggggctgaggagatgcagctagttgaaccctcgtggagtgacaagattgctggaaagagagagaggagagagggaagataagtaagaagcaaacaccagggaaaggccctcctctcagggacaggagggggaaggagcagcaaaggtagcaaggaattaccaggtagtagaagggcaggaagttagaaaaccatgggccctgaaggcagagaggcttcaaactggaagggggtgtctcagggaggggttgggcaacagctctaaatgccgtgatgaggttgccaccccaatgactctcatcactgccgacacctcaacatctaggtaaactatttgactaacactctagccttgcagtttctcctgactctttctgtttgatttattctcctgggctggaaagacgtgacctgagggttaacaccgaaagaaagaattatatgcccaaagcccacaaaactccgttatctgtttatctgccacccacagacgtcggtatttctctactgataagacgcagaagttatgaatttcttgacagccattataatgctctaagatttaggataaggagaccctaaaagattaatttttggctgccatttggtgcccacccagtccaactcacagaggttcacgtagcagatggctcaagaaagatgtgaaattgctctttgaactgaggggcaacgtcattggcctcttcaaagtattagtaaagtgagattaaccaaaacttgaaaggccactgggtacatttccaaatttccagagcctgtggtggtcttggtgagtcaggcgactgagagccgtccatagcagtgtcctacagagccacccaacacagccattcatttcaaaattcaaagaacctgctgcattttgggcacttggcaaataaatgtgcctgacagagacagtccctgcccctgcagagctttcaagctagtgagaaaaacaatcaaataagtaacaaaggtaagttccagggtggaggaagcacctggcgtaagcatttacccgaatcagggttgggggagagagcttcaggaaatcttttctagagaaatagacttttaagctgagatttgaagcgtgagtaagattcagccagacacagggcaaagagaagtaggttccaggaaacaaaaaggtcagaggtgtacccagtgaagacaacagcaggtgtgaaagccaagaaactgcagcgctcagttcactcaagaaacaaaggggttcaatatggatggactgcagatctccagatggaagcggggcatggccaggccaggtaagcagctgggatcctgggattcactgcaggcaggggagggctgtggacagagctcgcttttaggaagattaccggattactgatggcttgcaataggggaagtgggttgaaaggagcaagaaagcctagttggtagacaatgacagaaacccaaatggaatgaaggaggctgaaggaagattgtgaaatgtgtgcgctgaagaaacatttagaaggaagtttagtatagatatgatttcatgggatcaaacttgggggcaagattgaatggagggctgacattggctgaaatagaagacatgttgaatgcaaagttccctccctccctccctccctccctccctacctacctccctccctccctgcctcccttccttccttctttccgtccttccttccttccttccttcttctttcccctctctcttcccaccttcccctcatattcaggcaagccataaagaagtgatgtcaactaacagtgtgactctgtcctcattcacgcctctctgctgagtacccttggtaaattactatcatcttgcctcatactctgtatctctgttaattttcctactgtcaggtaccacacctataactttccttacactttatctgtgaaagtacacaattcattagcttacctcgggaactttcttttacaagccttatgctgaaggaaacaaacatgaagtaaacagaaattttccaagcctctggggggatgtccttatttatagactatcttacataaatgtgcatgggaattcagaagccctaatttcaactatataaagtaaacaaagtgaactaagtgatgcaactttttggagtacattcagagctcctcactgactccaaactcctagccctatctacttgaaactgtttattttctatgccatataccttctttgtcctgccatgagaagtagccatgcaggtaagaatcactgtgggcatcctgtaatgcatccatggaacgcatatcttaaagaactctaggctggccatggtggctcatgcttgtaatcccagcactttgggaggctgaggtgggcggatcacaaggtcaggagtttgagaccatcctgaccaacatggtgaaaccctgtctttacaaaaaatacaaaaattagctgggcatggtggcgcacgcctgtaaacccagctactcgggagggtgaggcaggagaatcgctgaacccaggaagcggagcttgcagtgagccgagattgcaccactgcactccagcctgagcaacagagtgagactccatctaaaaaaagaaaaagaattctaatattagtaacaatgatgataattattgtttgttctagtcacctcattctcaatctgggaggaacatccagacaagtttgggaaagcagagtgataccagcagggcccaggcgaggaactaaatgccaaccctacatttatatgaccctaaaattgacacctccttagatacatttaaattgtggtaaaaggtacacaatatttacaactttaacgattttaagtgatttaccattttgatcatttttaagctctgtagcattttgtacatttaccttgttgtgcatccatcaccaccatccatctccagaacttttacatcttcccaaactgaaagtctacccgttaaacaataactccctggctcagtccattttgtgttgctataaaaggatatcagagattgaaaagaggtttatttagttcatattctgcaggctgagaagttcaagggcatggccctggctgccgacaagggccttactgctgcctcacaatgtggtggagaagatcaaaggggaaatggacacgtgtgaaaagggcaaaacctgaggggcaccctagatttataacaacccattctcatagaaaaaatccatttctagagcttactatcacaagaacagcatcaaaccattcttaggagatccaaccccatgacccgaacacctcccactaggctccccctcccaacaccaacacacgcaggaccaaatttcaacatgagttttggtacgaacaaacaaaccatattgaaaccatagatagcattccccgctgcctcctcccgcaaccacatggcaagcaccattctactttctccctctatgaatctgacattctaggtttctcatataaatggaattatacagtatttgtccttttacgactggtttatttcacttaccatgtcttcaaagttgatctgtgtggtagcatgtgtcagaatgttcttccttcttaatgcctatgtataagccacattttatttatccattcatctatcagtgggcacttggggagattccaccttcaggctattgtgaataatgctgctataaacatgggtgtacaaatatctcttcagatccctgttttcaattccttttttttttttttttgagatagagtctcattctctcgcccaggctggagtgcagtggcgcgatctccaatcactgcaagctctgcctcccaggttcatgccattctcctgccctcagcctcccaagtagctgggactacaggcacctgccaccacgcctggctaattttttgtatatttagtagagatggggtttcaccatgttagccatgttttcagttcttttgggtgtgtacccagaagtggaattgctggatcagatggtaattctattttaattttggggagaaccaccatatagttttccaaggcagatgtaccatcttccattcctaccaacaatgaacaagggttccaatttctctatgtccttactaacacttgttatcttgtctttttaaaaaaaatatagtatccatcctaatgagtgtaagacaatatctcactgtcattttgatttgcatttcttctagttattagtgatgttgaacatcctttcatgcatttgttggccttttatgtatcttctctgtaaaaggtctattcaagtcctttgtccatttttaattgagttatttgggttttttgttattgttgagttacaggaatattttacatattttggatattaaccccttattagagatatgattagaaatattgtttcccattccatggattgccttttcacactgtttattgtgtcctttgttgcagagatgatcccttaagttttacaccctagggcctctcttgcttcaccctactcccggtcctgaatatagcccttgactcttccacaaaccatttaacaaacttcaagtatttgaaatgacagagatcacccttgggtttctgaaagtttaagcacagaatttcattcttccatctgaattcctttgacaacgtgggatattcaaatttaaatattgtttttgaagcataacctggcctatcctaattgctacaagagatcagcagcttcaaagaaggctttctgagagcactcccattgtgccatccctcagtggagatggaagcttttgaactcttgtcaaatattacaatgtgccaagcactgttctgtgtcttttacatgtgttaactcccgtaatctttacaacagccttagaaggtgtatgctgtttggatcttcactttacacattgaggagatggggacagaaaggttgatgaaattgctggaggtaacatagctactaggtggcagagctggggtttgaatcacagaagcccagttccagattctgtgctcctaaccaatgatgaactgtagctgatgcatcagcttccccacatttaattttttaaagttatttcagactttggcaccttccagtgcagttggtttccagcaaactgcatttttaggcttcacttagacatcatggctcttctcctagcatttcttttccttctctcggcttccagaaatgacttacagcctatcctcacataagcaagatctgagcctccctgcaaatccatgcattactgcctaacactctatttatggctatatgcatgagtgaaaatcagggccgacagttaaatcctaggcatattgtgttagggcaataacgctctatctctgctccctcatccccgcagacttggagagctaagggaaagctgcacctgattcttagatccaaaaaagcaaaccccacttctctggcttagagccagcaaaatcaatgccataatagcaggttcaatgtctcagcaggccatacctctcagggaaagggatcattcatgttcccacatactctctttagttctttagctaacgatggttctatgtttgtttgtttgtttgtttgtttgtttttgagacaaagtttcactcttgttgcccaggctagagtgcagtggcgtgatcttggatcactgcaacctctgcctcccaggttcaagcgattcttcttcctccgcctccctagtagctgggattacaggcctgagccaccatgcccagttaattttttgtatttttagtggagatggggtttcatcatgttggccaggctgctctcgaactcctgacctcaggtgatccacccccctcagcctcccaaagtgctgggattacaggcatgagccacagtgcctggccctatgttctcttatattttttcaccaatgttgaatttaagtggattaggtaaaacagcccagcccagcccatcaaacagcatgtcttattgaatcaagttgatttacccagaaaagcctcacttctttaggtttgtgggaatactacagctgttgacaaacgtccctgatgggttctcttcccctgcctgggtaccagtacctcattaatcctgatgagaaaatggcttgtttttctcctcctgctataaccaccacgacttcttatttcctgcagcatcctatggctctactttgagacgggtacctgggtgtatcctgtgtttgccaaactcagcctcttgggtctagcagctttcttctctctcagctacgtcttcatcgccagcatctacctacttggagagaagctcaaccactggaaatggggtcagtgtatttctttcttagctacagatgcgcttcttccgtgtctgcctctccccttcacctggaaacagaaagaaaaactagccgcaaacagaagcaatgatgcttactgtctttgtccaaagtactcagacaggtcctgccaagaggtcctgccaaggcaagaggacagcgttgggggtggggcactcttttaaaggaccccatcaaaggatctcccctcctcccccaaacaatgtgtcatttaactttagagctaaaaataatcttctttagaaagcccaggacctagagaacaaggtattaccatccctagcatgaataaataaaatcaggggtctccccctaacccaagtgagggctccagggacacaagctttgaaaatatcaaggtttcattttgagggaagtgagtccagatagccctctcagctcctcccacctcctcccaactcagcagtacctcattaggctgctcctcagccttccataagacatttaccagatgaaatcacatcctagacttgagattgaaatcctcattcagacagagtcttcagcaatgagaatatgtcagtaagttaagctttctcgttataggtgggtacaatcctgttgcttcttcctaagaaaaaaaaatcatcttaacttagttaattttaaaatggaagatttcattctccttcctgcttcctctctccccaccccaccccagaatatttttttattgttggaaaagtaactaccagaaagtcaggctgtaaaacacccatgacttgcttccctaccccaggagaagcgcaggaactctaccctgattctgtatataaggatggcaaagagtcacacccagtcccccacatcactcgcccacatgccattctgttctatcaaaatagagatggcagaagtgccatcttccgcccaatctatgaactggtgtgaaaacataagcccgtgtatgcaaaaaaaacctgacagtttcagaaggttcagtaccagagtgtgcgtttctgagaggaagctgagaccctggagaaataagcacgcaacttggatgtatcacatgttttctactcttggagaatttgactggtttaagaaactctcaagggcaaaattctctttgaaagcaaacacttaaaaaaatggaatactaaaaattacttcccaatcaggattccaaatcacagaaaattatcgcaaaaaaaaaaatgtgttgacatttcagatgtgttgacatataattctaactagttttggctccttgaagttctgggtaaagatttctgatgcctccccaaatctctctctctctatatatatttaaagaagctttaagatataggaagtacagagaaaaacttgattacttagagcttagagaacaataacttttaaaatcaattgtattgagttcaataatgtattgagttaatttttaaattgttactctatggtgaattttaaacatccattgaattaaaaaacaaaattatcatcatatttattattattgaaattactattctcaatacaacgttcttaacaagcctcattgtttaagtactgcatccaatttttaactataattaggtctcaataaacagataagctggcatcatatggaccctcaactacctcatgtacatgcaagttttcaagtagaaagagacgattgtaaatgactgtacttacctctcgaggtctttctagatttttaactttttaaagaagagaaagggtaaaaggtcctatttaacatcagaataagatcagaaatgtattaaatcttgaacagatctttattaattataaataatttaatacgaattaaagaaaaattagatttgttaaagttgcaatgcagtgaacacttttacattgctgaaagctaaataacctatgtgaacacatttccccatgtcctattctactgaaaacactttctaaggcttcccccaattgactgaagaaagtccacacccttggaatgacacacaagggcctctgtgacccagtccctgctttggcttttgctcttctatatgtgtgccccagtggcaccaaactgctggttttccctccacgttgatgttgtttcttacgtccacgggattctgtgtctcctccagtctttgcctggttcatactcatgcatttcaacactcgcctcttccaggaagccttccctggtcagcccaggttggacttcatgcccttcccagtgcttccccctttacctcccagtcaccagacttaccattttatcatgactgcggttttactactgctttagggatttgtttttccactagacctcgggtgtcttacgaattaggggtatgtcttgttcatctcaagatccactatttccattagctttctcgttgcctcaatcagtgcagacaatagaatatccaagggccttttttcctaggtgtaaagtacaactttttgcaaaggtgttctggagacagcagataaggagtgactctaatggctgtagagtattgggcagggagtttaaggagtataggagggtgatgacaaggcgtaccagttagagagttgttgaagacatgcatgttagggcagaaagtattaaacaggggaaagagcactggaataggaatcaagaaagccacggtagatcgagaccatcctggctaacacagtgaaaccccgtctctactaaaaatacaaaaaattagccgggtgtggtggcgggcgcctgtagtcccagctacgcgggaggctgaggcaggagaatggcatgaaaccaggaggcggagcttgcagtgagccgagatcgcgccactgcactccagcctgggtgactgagcaagactccatctcaaaaaaaaagaaaagggtatatccctcacctggccgcaaaccaaccatgtattctgtggcaatgcacttcaattcctcagtgatcagacagcctctaagtagagtgaccaccaagcccaggtggcctgagatgatccctgtctattcctgctgtgccagtattcataaggtttaatattgtctaggcttgggcactcagttgactggttcccctactagtgagcctttctccagatcttcagttctggaaacttatagatagccacgtattctgtccaaagccagagctaagcctatgttttccctccttccacagcctgagccccctttgatgacaggagaaattcaaatgaatgctttagggaggcagtcgggggctgtggttagaagaaaagttctggtgccaaactgcctcagtctctatcttggccctgccacttgtacctgtgacactgagtgagacactgaaggtctctgtgccccagctttctcttgtcctagtggagataatgctagtggcctcctcctgggctcacggagaacctcagatgacttgctgaggatctagcgcctacagcaggacctggcatacagttagtcactgctgctggtcatcttattctccctcattctcccctttgagttgatgtataaattaccagtttcccagctgcaagtgattaaaggtaacagctacccgatagcagacggacagagatgatgcacgtcctcaggtacttacagcaaataggaggtcaggctattggaggctagaatctgttggaatctctgcttctgaaatcctgagacacaactggaatctctgcttccagtggcccaatttgaagtcaccagccaagcaccaagcggtcaagaacatcaggcgaagtatcagtcaagacccattcaatgtgacagtagctctctagcagtagttctccaccttggctttttacatcacagaaacactagggaagtttaaaaaataataattcccaggcctgccttagaccaattagatccatatctctagagatggtgactcgacatgggtattttttaaagcttcccagttattttaacttgcaatcgggatccggaaccgctgttacagagcaacgcttctcaaacctgtataggcctctgatgctcatcaaaatgaggatcttggggaacccggagatcttgttaaagtgtggattctgatttagtggatctggggtgcagtttgagattctgcccttctaacgcatactccagacatactgatgctgctggtctgaggacaaggctctattacatctcaggaccctggactcctcccaatgtggataattctgtctacggcatccttgtgcagtgtggtgctctcctgagtgggctgctggactgagaagggtgttggtggtgatggtcacaatagctgaacatctactcactttctccctcctcctgtgccacatcagtgggtgaatatggacaagagagcaagaaggacagcaataagaaaccatactgggaatcacatgttaaattggaaagtgtatgatgaggtcctcccagggcactcagttgcagggaactggctttgagcgtcaaggaggcaagtgttgtcatggcccacaggaaggtccttcaagaatgcactgaggctcaaaaagctcacaagaggttcctcagggccacctggcctgacctgtcaccatctcactccctgccctgggctagcctttctgtgtcatgaggcagagggttgggcaagcacagagtcagttactgggaccagtcatcccccaagaaagattcaatttctactttttgggaggagttagatggaatgttaacttcaaaccatgatagaagcagatgggggaagctgtctctggcaagacattgagagcttggctcaccatgaccatgactgaacacccaggcatgcccagggcaggttctcttccacattgactgggggcaagaggcaatcaggacatcctatcaaaggctcccttctctgccccttatgtgcttaattttcttttttttctttgatgattgatagcacacaaggatgctgacaccagcacacaagctcctcaggaagagaaaatcatcccacaagagatatggggcacagaaaggggctaaacacctccaggcccaaatggcagggcctctgctatgtgggggtggttggagagacagtcagcttatccagggcctgtgacccctctccctatgccccttgatggacacatgccaggagtcaggctgtcctttgtcagggcccctaagaccataggtccttctcatcctaaggacagactgtaagctgaaaattccagcctggccaagtggcgctgggagtgtgtcctggacagaatgacatggaaactttcttttaatattatttgccataaaccaggttttttaaaaggcagattttcttgatgaaagctgcctagaggccatctaatccacctccttgttttattcatgaaggaattagatgaggtttgtcttattaactctgcttattccatagcaaaagaattttatcatgcgatgactccacaggtacttctaaagcatggtcccactggggcagcatttagtcaatggcaaaaatttatctccattttgcctttcttgtcctaacttcatctccctaaactcaaaaagagcccgctgtggattaccctccctgcctcttcctcagcctctttcccacaggagtttctccagccagccctcagttccctgtcctccctggacttctgcagtgtgaacacaggactatcagtgctcagatctcatttctctaacacctgctatccccccaaccatcaattttcttgcccttttctgagtcagcccactgaaactaggcaaatgttcttcaaattttcaatgcctggcattcatttttgtggttgtagatacataggtgtaaatctttgagaatactatgtttttatttatcctgatttctaactattggaataataaggcatataattatatatggtatctatggtgatgttgattgaaacaataatttcttggccatgcctgcagtttctgttcagatcttgcaaagatggaggctagaatctgttggaatctgcttccagtggcccgattggaagtcaccagccaagcaccaactggtcaagaatatcaggtgaaatatcagggctataaaaatatttctagcccttgctactatctgacagcagttaaaggaataaaacaagtcggggtgaatctaacttcctatctgccaactaggatactttctactgggaaaaatgcttctcaatcaagaaaatatttataataaacataattttccaattacaacttaaaatccattttgtgaatttggtttgggtaagatatatgatctattattaagtcaacagtttccttatttccagctatgcgttatagaaacatggtcagaaggctgggtgcggtggctcacacctgtaatcccagcactttgggaggccgaggcgggtggatcacttgagctcaggagttcaagagaagcctggcctacatggtgaaaccccatctctactaaaaatacaaaaaaaaaaaaaaaaagctacgtgtggtggcgcacacctgtagtcccagctactcgggaggctgagaggtgggagaaacacttgaatctgggaggcagaggttgcagtgagccaagatcacaccactgccttccagcctgggtgacagaggaagaccctgtctcaaaaaaaaaaaaagaaaaagaaaaagaaaaaaagcatggtcagagataaattttgaagacttaaagaagcctacaaactgcttagctctgtgagaattcaagactaagacccgcttgccattcccagctgctagaagcaaaaagaaacatgatttttgcaacgttcacgccacatgagtccctacagaataaaatgactttgggagcaccacagagacccatttgggaacagtgccttctctagcatgtggatgggtatgtgggcatttctgagtgttcctcctagctacttggttttggacagaggactctaatccaatggagggaaccacctgctgtcctcccccagcagagcttcataccaccatgtctgctcctgggtggcttttctccaaaccttcgtgttctgttgcatttcttaaatggagaagggagtcttcagtcctcaacacctggggtggaaggactgaggttattattacagttaggcttgagggcttggggattggtaaacaacatggataaaagaaagttttaggaatcctcagagtgactgcggggtagaaatttgagaagtttatattgaccaagtttatattgtccctcttgtatgtgagctggttatttaattgaaaaagaattcattaaaggcccagagtatactctacagaaaaaggaggtactgtgcttgtacttatagacctaatgtagagaagccctaactagggaggagagaattcacatcaaaaatggaaaataaggccaagggtggtggctcttgcctgtaatcctagcactttgggaggctgagatgggaggatcccttgtggtgaggccaggagttcaagatcatcctgagcaacatagtgagaccctgtatctaataaaaaagcaaaaaaaaaaaaaaaaaaaaaaaaaaaaaaaaagctgggcatggtggtgtgcacctctagtgccaactagtcaggagactgaggttggaggacttcagcccaggagctcaaggccgcagtgagctgagattgtgccaccgtattccagcctgggcaaagaccttgtctcaaaaaaaaaaaaaaaaaaaaaagggaaaaacagaagagaaagaagtagacacaccaatgaaaacaacgtgaaatccataaagcttgataaacaataagcctcggctgaagtgactggggtagtctagattgatgaggagcagacgaagaagacagagttttgatcttgaaaattttgcatgagatgaatacaaggatagccatgaggactgcatgatcaagaggtggccatcctaggaaatcagtgtaattaaggggccacaaacaggacttcaagtcaccagtcatgatagcctctaagaagtggagttccagcagaatggaatgagtataagatatctagtgtttactgttaaggatagaattgatgaaggtggcagggtttgaagggtgaatcatggaattaggagcatggatttgctgcaggaataccaagccagaactaccagggctgtaagttctggaatggaggagaagtttttaaagtagcattgacagtatttggcaacaagcacaaaggataatgagctaatgaaatttcacaaattgcagagcttacacaaagatttatgatcattaaatatggagtaccaacttgttggctgaatagaagtcattctacaaatctaatgctataatttcagtagaataatgcccctctaatgagcttactcaaacctaatccatatgccagtacttttccaccaggctgatgaattcatttgctaagaggtcacagaatgaccccaattagttgaacatccacccttctatttcctctctaatttgatgtggtctcttcatctccatctgcaaagtctcaaagtttgctgatggattgtgtgtagcctgcagacactcactcagagtcacagcaatatgcttcctcttagctatgcagagtacctgaaggcaaacagcatcgtgggtgcctggctaactgtgaacccagcactgagggaggacggcagagttgttctctgcccctgtcatcgtggcagctgttttttcataactccttaaactgcatcttgtcaccttgggaaaagtgtgttcaactttccactgccccaagtcagagtgaatctctacccacaacaaaaatacccattagggaaagcctgaagcctgaggtctgtctctgttcttgtttgtacaggtgacatgaggcagccacggaagaagaggaagtaattgcacaccattttccaagaaccaagaaagaagaaaacacaagagatttttctcatcttttttttttttttctggtggagggaggtggtggaggaacatagcaaagtaggagggacagagagtgatacttaaatttaataagaggttcgtgaaggtagcttaacttgagaactcttggttttttgaaaggttgactgcacatgccaaaaacaactcctgctatctcagaattaattatctttgaccttcgtggaggatggtctctggttaaaatctggccaaagaaactcacataaacttggtgttagagaacatctagagagagagagaggaacttagagtcatttaaactcttcagtttacagagaaggatgctgaggacctagatgagaagttacctgcaaaaggcaaaagggttacttagtgtcagaaccaaggcaatgacttctctctcccagatctcctagctactggtcctgggccatttttttttttttaaataatcccaactttctttaaaagacaagcatttcagtaagctagttattttcatgggttgctcatccatttttttcagtgatctaaaaatgtagggagatggctactactgaagttgtctgtctacttgggataatagcaaattaattgaagacaatgggaaagtaagttataaaaaatactgggaaatctgtttctcttctgagcaagcattcagggcaggtataaacatcaaacatagtgacattgtcaaaacctcttccatttgaacattgattaattcatcaaataaatggtatagtaa

SEQ ID NO: 73 - DNA, 519599 bp, Homo sapiens
gtggcccaatatcagctcactgcaagctccacctcccgggttcccgggttcacgccattctcctgcatcagcctcccgagtagctgggactacaggcgcctgccaccacgcccagctaatatgttgtatttttagtagagacggggtttcaccgcgttagccaggatggtcttgatctactgacctcgtgatccgcccgccttggcttcccaaaggaattgctgcctttaacatgtcattgatcctttatttttcctggaaatttttcattattcaccatctttttgaacaaccccagctgcccttcaacccagctcctcagctgaccccttttccatgatgcccactctgatgacatatgtgggcaaatagatttttctaaaatgccctgttggggtgctgacacctataaaagttatgtatgtacaggtctgcacatcccacagaccaagactacttctgggagtgagaaatcgtagtaataatgcatagcatgatagaagcagtgtctgggaatcagaccatggatatgtgaatacagacagtgactaaagagctgcagagaccagctgggttctgaagtctctgagctttgggaaagtgtgtttcctgggaccagcgtcagatgttgtggggctgccctgtggttccgacacagctgctcagtaatgagcattcactcagagaaatccaggccttgaggctgggccctgtgctcactgatggacactcggcagctgtgtcccctctggcctggcagagttccctgagcagggacctgtgtatggtctcaacaggtgcttcctcccagggccttgcaaaaagaaaagcaagccttcctcctgctcagtctgcagagagagctgagctgcatccccaggtctcaaggaggggcccggcagtccctgggcggaaacacatttgcatgagcaacccctcctctgcaacagtgggaagaaaaggaggcctggggcagcccagtcccactgcgggggtaagaggttgtgtccaccatggcctggactcctctcctcctcctgttcctctctcactgcacaggtaggaatagacttcagagaccagggtcagccacccagcctgattctgactcttctggcaaagatccctgaaaaactttaccctggtttctgccttagcacccattaatgtctgtgtttccaggttccctctcgcaggctgtgctgactcagccgtcttccctctctgcatctcctggagcatcagccagtctcacctgcaccttgcgcagtggcatcaatgttggtacctacaggatatactggtaccagcagaagccagggagtcctccccagtatctcctgaggtacaaatcagactcagataagcagcagggctctggagtccccagccgcttctctggatccaaagatgcttcggccaatgcagggattttactcatctctgggctccagtctgaggatgaggctgactattactgtatgatttggcacagcagcgcttctcacagtgacacacacagatggggaagtgggacaaaaacctcaccctgctctgggtcttgctctgtaccaatttttaaattttaaaataactggcctaggcacaaactatatttggaagtactttctagttgtaaaaggctcttctctcaattttctatccatttttctgaagtctcagtaaaacaaaacaaaacaaaacaaaaccacctgatgaccctgaagtgttggctggttgtccacatgtgctaacaccagtgcctgtggagctggacgtttttttcttgaaagaagcaaaatgaggctttcctagctcacatcatggtcagagcctggggacaacatagcaggtgaacagtgccctgcagcatggactctgctcttccagcgtacgggcagagacctccccttccatccccagtagtctgttctcagggctgtctgaggctcactgtgtcccaggaacaaggcactcaaatatgaaatgctgcctgaggactcaggtcagggaattctggatatagtgctgacctggctcagtcctgggtacctgcatttcagtggcaatgtcaggagatggcgttagatattagggtaactgcgggcccgatgccagtaaacctctatgtaggacatgacagaatcaaggggaggctccaccatggctgagacaagccagaggctgctccttggccatgggggaagtagatcccatggatgtgactcctgtagctcatcccactcaggaccacggggactgctgagggtgggtttcctgatccctcagggcctgactgtgttctcttctcctctcttacaccattggagcttctcactgactcaggtctagtggtgagtctgtggaatatctggatacagaaactgcccaatatttgcttcaagtgactcctccctgggaaactcttgaggaggcccccacctcaaggtcatctttttctccatggggagcagcagaaacattggccattcccatggaaatggctatgaggcctcccagagagaacccctaagtttatgacctaggacaatagtgatggtccctcaggggtcccagcctgcttctcctgatctgggtttatccacacagcctcctggagtgcctctgggctccagcctgaggacctggctggttatcagtgtcacacagctgcatcctgactccatgttaccaagggttcctgttccatgtggaaatgatagaaagatctccccactcatcctgtctccccatccctcctttatccctgcctgtgaccaacaccagttcatgccaagacttcagctgtcagttgtgttactgaaagcagagcaagggttcagggacgataactccttttcttactggtctccccagtggaaagagaatcagtttgtttcaagaagtaaaataagctgcccacacatggtgggtgaggatgaggtggaaatgacaagaaagaatccagcctggctgggcatggcagctcacacctgtaatcctagcagtttgggaggcggaggtgggtggatcacctgaggtcaggagtttgagaccagcgtgagcaacatggtgaaacatcgtctctactaaaaatacaaaaattagttgggcatggtggctggcgcctgtaatcccagctactcgagagactgaggcaggagaatcgcttgaaccagggaggtggaggttgcattgagctgagatcatgacactgcactccagcctgggcaacaggcagagactccatctcaaaaaaaaaaaaaaaaaaaaaaagaaagaaagaaagaaaagaaaaaaggaaaagaaagaatctaggcagtgtgacccagaagtccaggagccttcggcctggtcccacaggtgtcccctcctttttgaacaggtatgctggccatttgctgagctctgaaactgtgggagtgataacaagaaaggcgaatccagcctgtgtgacccacagatgtgagagaggtagtctgatgcttaagaaaaggtgggatcagccttctgaaaggtctggatctggcttggcctagagctggtgtagaagagaagcaagagagatgcttagccttgggtggcccaggcccagctgtcctgtcaaggggctgagctctctgcaacatggaaatcctgcagagccatccttgggaggctgtgatctcagtaggatgcaaaaatgctaatggaagtgagcaggggatggtttatgggggaatgaggggacggtgtggggtcaggtgtggtaaggagggtgcaccctgaagaggagagtgtccattgtgactcacaggaggaggaggcccggggcccagagcagtgacaaaaggaggacctggaaggacctgggccctcaagacacacagagactggggttttggtctgtccctgagggtccctcaggaggatcacataaaaaatccatagtcagtgtcctctgtccaaggctcactgtcccagctgttgtccctcccggatcctctgggtgtccacatcctgtagttttggacctgttcttctctctgccctcaacctaacagctgatggggcatccaccaggaagcgcatccgtgggcagggaggaggccgtgggcagccttgtcctgtatgtgagacactgctcagactcggtgaccccctgttcattaacgtgggaggaaaggaaaacaaaattcactgtgaacatctatacatcatcaaagaaaaagcaatgagaaaaaacaggaagtgaagcccagctctaatagtttatttctacttggaaataaataaaacttaatatgcctgatgtgttatgtaaatacaacaaacatattttaaaaactataaaaattatgtaaaggcacatggcttacactaaaagaaacatttaaaataacaacacccttgaaatgcaatcccaaaacacagcatacattttatttcagttccatgtatggactggttttatttaaatgtctgtattaggtttcactatttggttgtttaaatggagcatttaaaatcttattgtattacaacttatatcaacataatcatcttgctgtttttctgtatccccttaaaattccctaaacaaatatttattaagagcccagggtgtatcatgccagaactcaggcagtcacagacataacctgtttcatttttcattttgatcaacagaattatgttttctgttaagcttgttgtttttagttcattagattctagacgtcattacagatcaaagacgaaaaatttctatcatctttaagccacccccacaacactcactactgaatttgaaccaaaatcttctcctagaaatcctcgttggcggctcgatagtaagagctgccatgtatcaggctcacctgaggacagacgctggttaaaccaagttgaagttttaattcttcccatcttcaaagactgagcatctttgctctttttgctcataagtgaaacactccaaagtcatttgccaggatcccctgtagatgggcattcagtgtacagactcctaggcaagatccctggtcacagtatccaaatgactttgactgcaaacctggggaagtagagagagaacaaagatttaccagaaaaaccctctgggaatgtcttcccaaggcaccctagagggaagagctccctttctcttcagctccacaggatccacagaggaaggagagctctagccagcaggaaggagccacatgagaggagaggaccaggtgtcccacacaggtggggaagtgagtccatggggctggtccccgctctgggcttgatcctgacataagaggactctgtgtagacaccacctgagtcctctgcaatgtacagccacagagccatggacagattcactcctgaggagtccagtagagcgcgaagactgccttgaggtcacagcgggaagacacaggtgtcacttgagctggcctggacctgagagagggggcagtggacagaacagaggggaggcagtggtgtgaatgagaggctctggtcaccttatcatagaatggtttaccttggctggacaccaggggacgctgggggaccatttctgagaagacgcgcggggggcgggggtgggcggtgatgggagcacaaccggccacctgttgtgcctgttgtcctctgctcagggctcacaactgtgttctccccaccctctgggaccacagagctccacccctgccacaccctgacatcctcaaggcaaggagcctgacccagggctcagggtggggtcacaaagctgggggggtctgatttgcatggatggactctccccctctcagagtatgaagagagggagagatctgggggaagctcagcttcagctgtgggtagagaagacaggactcaggacaatctccagcatggccagcttccctctcctcctcaccctcctcactcactgtgcaggtgacaggatggggaccaagaaaggggccctgggaagcccatggggccctgctttctcctcttgtctccttttgtctcttgtcaatcaccatgtctgtgtctctctcacttccagggtcctgggcccagtctgtgctgactcagccaccctcagcgtctgggacccccgggcagagggtcaccatctcttgttctggaagcagctccaacatcggaagtaatactgtaaactggtaccagcagctcccaggaacggcccccaaactcctcatctatagtaataatcagcggccctcaggggtccctgaccgattctctggctccaagtctggcacctcagcctccctggccatcagtgggctccagtctgaggatgaggctgattattactgtgcagcatgggatgacagcctgaatggtcccacagtgctccaggccaatagggaactgagacaagaacccccttcctcctctgtcaggagggtgagccccagcagctgctgctcaggcctggcctgtggcttctgctgctgcagcttccttcatgggtccaggggcatccagggccctgcctgagagtggaggctcctcctccccttcagtcctcagagtcaggaacaggacatccaggaaacagaacatcctcctccctgcagcttaggacacagggtctctgcactgaagtcctgggctgaggtggcaggtccagttgtgtcatctcagacccacctctgatggggaacccgtgtctccgtcatcctccttttcccatttccaggagtttccagagtggtgtcttcctccccctgctcctcagtgtgaatccctgtgcttcctttctctccagcctattcttttttaataaaactcctttcatgtaggaactatgcacatctaataaactacccatatttataacaggaaattagacaaattttggcatttttctggttccttgaaaacatcaccatccccgggagctattgtgaccatcccggcagctcctcatgatgcttgtctcctccctccctcccctaatggcctctcaggaagccacagatctgcctctctcactactgtttggtttttttttctggaatgtatcagtgttatcaaacgttatcttcccatttgttcaggcttctttcactctgcacacttgctttgagattatccctgctgtcgctgaattgcacccatcccttagagggctcattactatctttaagggtccttaggccatttttttctgattttattcatgtatttcctttaaagtttgaatttattgttcatcaaacaaactctatgggtgatgttcatctaaggtgacaggacagtccgtgatggtttgtcaggattcttgcttcttcagttcttttcttggctctctctatagtggaagaggttctcatcttttatttatttatttatttattttggggtttttttaagggttttagcgattttccctttttaattatttttaaaatttgttattttattttaataggtttttggagaacaagtgttgcttggttacatatataagttcgttagtggtgattcctgagattgtggtgcactcatcatccaagcagtgtacactgtatccaatgagtagcctctcatccctcacctccctcctatgctttcccccgagtccccaaagtccattgtatcattgttatgcccttgggttctcatagcttatctcccacttatgagtgagaacatacagtgttttgttttccattcctgagttacaccagttagaatgatagtctccagttccatccaggttgctgtgaatgccattattttgtttatttttatggctgtgtagtattccctggtatgtgtatgtatacatcacatttgctttacctacttgttgatttatggacatttgagctggttccatgtttttgcaattacagattgtgctgctataaacatgcgtgtgcaagtatctttttttgtataatgacttctttttctctgggtagatacctagtcgtgagattgctggatcaaagggtacgtctatttttgtttccttaaggaatctccacactgttttccacagtgattgtactagtttaccttcccaccgccagtgtgaaagtgttttgttttcaccacatccatgccaacatctgttatttttttattatagctattcttgtgataggaaggtggtaacacagattgtggtaccgatttgcatttccctgattattagtgatgttgaacatttttctatatgtttgttggccatttgtacaagttcttttgaaaattgtttattcgtgtccttagtccaccttttgatggaagtgtttatttttttcttgataatttgagttcttcgtacattctagatattagtcatttgttggatgtatagattgtgaagattttcatccactttgttggttgtctgttaactctgctgattctttcttttgctgtgcagaagtttttttcgtttaattaagtcccatctatttatctttgttcttgttgcatttgcttttgtgttcttggtcatgaaatatttgcctaaaccaatgtctagcaaggttgttctgacgttatcttctagaattcttaccgtttcaggccttagatttaattatttgattcatcttgagttgatttttgtataaggtgagagatgaggatgcagtttcattcctctacatttggcttgccaattatcccagcaccatttgttgaatatggtgtcatttttctactttatgtttttgtttgctttgtcaagcatcagtgggttggaagtatttggtttcatttctggattctttattctgttcctttggtctgtgtgcccatttttatatcagtaccaagcagatttagtgactatggagtcaaactttactggagtttgaagctgggtaatgcgatgcctccagatttgttccttttgcttagtcttgctttgtctatgcaggctctttttggttccatatgaattttaggattattttttccaattctctaatgaatgatggtgatattttgatgggaattgcatagattttgtaacttgcttttggcagtatgatcattttcaatgtattgtttctacccattcatgagcatgggatgtgtttctatttgtttgtgtgtgtcatctatgatttctttcagcagtgttttgtagttttccttgtggaggtctttcacctccttggctaggtatatcctaagtatgtattttgcagctatttgcgaaaggggttgagttcttgatttgattttcagctcgtttgctgtcattgtataacagagctactgattcgtgtgccttaattttgtatcttgaaactttgctgaacttatttacagttctaggagctttttcgatgagtctttaaggttttctaggtatatgatcatattatcagcaaatagtgacagtttgaattcctctttgtcaatttggatatctttgatttgtttctcttgtctgattgctctggctaagccttccagtactatgttgaatagaagtggtgaaagtgggcattcttgccttgttccagatctcaggagaaacgttttccacttttttccgtttaatataatgttgactgtgtgtttgtaatagagggcttaatagaggacataagttatgtcttttctatgtcaattttgcaaagagttttaatcatgaagtgatgctggattttgtcaagtattttttctgcatgtattgagataatcatgtcatttttgtttttaatgctttttatgtggtatatcacatttattgactcacatatgttaaaccatctctgcattccctggtttgaaaaccacttgatcattgtggactatgtttttgatagctgttggatacatagaataatttaggaaggagtccccctttttccttcctgtggattaatgcattagtcagcgttctctagagggacacaaataatggaatatatatatatgtttattaagtattaactcacatgaacacaaggtccaacaataggctgtctgcaggctgaggagcaaggagagccagtccgagttccaaaactgaagaagttggagttccatatttgaaggcaggaagcatccagcatgggagaaagatgtaggctgggaggctatgcccatctctcttttcatatttttctacctgcttattttctagccatgctgtcagctgattagattgttcccacccagattaagggtgagtgtggctttcccacccactgacaaaaatgtgaatctcctttggcagcaccctcaacagacacacacaccaaggatcaatacttttttttttttttttttggagatggagtcttgctctgtcacccaagctggagtgcagtggcgcgatctctgctcactgcaagctccgcctccagggttcaagcaattctttgcctcagcctcccgagtagctgggactacaggtgcccaccaccatggccggctaatttttttgaatttttagtagagacggggtttcaccgtgttagccaggatggtctcgatctcctgacctcgtgatccgcctgcctcggcctcccaaagtgctgggattacaggcgtgagccactgcgcccggccaatactttttgtccttcaatccaatcaagttgacgctcagtattactcatcacaagtccactccttgtcagcatgaacccatatacaacttgtgatatcgtacataatcttcaaataaagacaataataaagtcataattacgcctaacataatacaattatccttcatacaaccagaacgcacgaatccctaacacaaatactattacatcaagttactgatacttaaatgctgatgtgacgtcaataaatcttatgttatatgacaaaggagaaaggaaataaaatgaagatattttcttagtacgagtttatagatgcgcaaacatgtttttaacaaaagaaggaggaaatactcttgacaattacactcctcgtttctgccgctggccatagctggtattgatgactaccttcttctactacccattctgtattccctttgccttcagcaagcacctcagtaggttgtgttttttttcctggtggagtgacccaaatcttcattcctgaagggtcccattgaccttaatcacagggcatggtaatagcaagaaatgccctaatgcatctcctgtattccatgcatgttcttcagtaactccattgtggagtagtaaactgatttcattttgatagtctgggtcaatcaccccagccgacactgtaactcccttcttagccattgacttaaaggtaggagaagcccaaaatgtccaggtggcaatcttaacttccagtttaatggaatcattgttgtgtctccaggtggtagtgttccttcctctggaagtaaatcctttgagccagcagaacataatgtctcaggaacaggaagcaaaacatttgctagtggatcactagggttgatggtgagtggtgccacttccacttccaccccttgattcctggatccatgaatcctggctacaggagggacagtaccatatattggatgctgatttaaagcatacacagccatctggagaactttgccctggccctgcaaagtattgtcacctagttggcaatgtaattgtgacttcaaaagccattccactgttctatcaatccagctgtttcaggatgatggggaacatggtaagaccagtgaattttgtgagcttgagcccactgctgcacttctttagtcataaagtgagagcctttgtcagagcattgttgtgtggaatatgatgacagtgaatgaggcattccaagagtacacggatggtagtctcataggcaaaccaatatctaggataagtgtctatttcagttaagacaaacctctgcccttcctgtgatggaagaggtctgttgtatttctcctcacacagggcaccagttgagatattgctcctcagaagacagcattagctgcgggggtctgcctgcagaccctgactcaaacgacggatgaataaaaacggacactgacacacagatattctgtttggccagtccggctgggttctttgattctgagtgtccgacaacatacacaccaggagaggtttgtcactgtggtgggtcctgagcagctggtactccaggcatttatttagtatacaattaacaacagaagctttgagtaaacacacttgtggataattaacatggttaagagagtagttctacgaatgattaaagctcaggtaccctggtctaaagtaaataccattacggggcaatatccctggttgacctcccaccgagagggccatctggctcaaaggttagttaatggagatagggtaaacaggcttaactgggaaagcctccattgtccctagcatttaccctatgacctaatgctctaaggtaagaaccagctgccttcagcctgtacaattattacaagctatgtaacattttagccttccaaaatgtttgtgattattccctataactttccctaatatttccctttgatatttctgccaccatcctgagtgaatcccaacagaggtccaatataatcaacctgccaccaggtagctggctgataaccccaaggaatggtgccacatcaagggctcagtgttggtctctgctgctggcaaattgggcactcagcagtggctgtagctaggtcagccttggtgagtggaagtccatgttgatgagcccgtgtgtaacctccattcctgccagcatggccacttccctcatgggcccattgggcgatgacaggggtgtctggggaaagaggatgcgtggtgttcacagaactggtcatactctcctcttgattattaaaatcctcctctgctgaggtcacccgttggtgagcgctcacatgggatacaaatactttcacagtttttgaccactcagagaggtccatccacatatcttttccccaaatttctttgtcatcaattttccaatcatacttcttcctagtccctgtgacagttactacaggacagaatgaagggggactaacacagaaatgaagacaaagacaaagggatctgttttaaagaaggggtcagggggctccttgcttctagtgagcaagggccctgagctactgcaatccttcatatttattaggtagaaagaacagggaggaggaggtaacagttggtcagctgcttgatttatcacaggttcacaggattgctttctttatacaacatacttcagatgtgctgcagataatcaaaagaaacactgtgcttggggcgtgacggctctcagcattcgttctggtggtagatgcagtttgtcgtttgccaacaacctgcattcatgagaacagcttgctgtttgctccagtggtatactgagttggtcacgaccctcattctttcggcctccaagaagtccctgatcgtccagccaaaccgttgactacagcaaataaattcatatataatcacacatctggagatttctccttccatgcaaagagcacaaccaggtgtgctcctcaaagttctgcccaatgggaagatttcccttcaccgctgtacttcagggatgtcctggaaaggggctgtagtgctgcagctgtccactttccggtggtgcctgcatatcatgcagatacatttgtgaaccaggccctagtcttctttctgtcagctgatcatagtgaactgcccctgagaccaccagtgcaggctgggggatagtgcaggctggtggcaggagtggaggtcatggacatttgagccacttccccatgtaacttacttgtgccttcagcccaaatacgtatataccacttccactgaatgatggaatgctgctgtgcatgatccactttatggctaaatgggttagaaagcacccacttcatgacaggcagttcaggttgcgtggggactttaagacgcatagtcaaatgttcagtttccaccaaagcccagtaataggccaagagctgtctctcaaaaagagagtagctacctgcagaagatggcagggccttgcaccaaaatcctagaggcctccactgtgattcacttacagtggcctgacaaagactccaagtagctttgctatctgccgctgacacccaaataccattgggtctgttgggtcatacggcccaagtggcagagcagcttgcacagcagcctggacctgttgcagagccttctcctgttctgaatcccactcaaacctggcagccttttgggttacttgataaatggactggagtaacacacccaaattagagatatgttgcctccaaaatccaaataggcccactagccattgtgcctttcttggttgtaggaggggctaaatgcagcaacttatccttcaccttagaaggaatgcctcgacaggccccacaccactggacacctagaaattttattgaggtagaatgcccttgaattttagttggatttaccgcccatcctcttgcatgcaaatgtctcaccagtaagtccactgtgtttgctacttcttgcccactggatgcaaccagcacaatgtcatcaatttaatgggtcagtgttatatcttgcaaaagagacaagcaatcaaaatttctttgaataagattatgacacacagctggagagctcatatacccctgaggtaggaccgtaaaagtatattgctggccttgcctgctgaacgcaaattgcttctggtgggccttatggaccggaatggagaaaaaggcattttccaagtcaatggctgcatatgaggtgccaggagatgcattaatttgctcaaacaaggaaaccacatctggtacagcagctgcgattggagtcaccacttggttaaacttccgataatccactgtaattctccaagatccatctatcttctgcacaggccaaatgggagagttgaaaggggatgttgtgagaatcaccacccctgcatttttcaagtccttgatggtatcactaatctctgcaatccctccacagatgcaatattgtgggtttatttttttttaataaagtttcactctgttgcccaggctaaactacgatggcagaatcatggctcactgaaacctccatctctggtttcaagcaattctcctgcctcagcctcccaagtagctgggattacaggtatgtaccatcacaccccacgaattttttgtatttagtgtagatgaggtttcaccatgttggtcaggctggtctcgaactcctgacctcaggtgaggtgatccacactaagatccagcttatgtggatcttttctcttcttttcttggttaatctcactagtggtatatataattttatttatcttgtctaagaattggtttttgtttcatttatcttttctatcatttttttgtttcaattttatttagttctggtctgatattgctatttcctctcttctgctgggtttgggtttgcattgttcttgattctccatttccatgaggtgtaaccttagattgtctgtttgtgctctttcagactttgtgatgtacgtatttaattctaaacattcctcatagcactgcttttgctgtatcccagaggttttgataggttttatcaagatttagtacaactgcaaccttactattggccaacggcttttgaattcctaagagtgtgacctcatttaatcctgacaacagctttatgattgcttttcattcagtaggtcgtgattagagagggagtgcttgtggcctggatggaaggttctccagtttatcaaataaaaacaccgaaggtcagttaaatttgaattcagtaaaacaatgacaaagaattagtatgtgtaactcccacacaatattgttcatttgagatacaaacttaccttgtagttcatctgccaactgcacacagggttcaaagcctggaagaggcagagttagagctggtcttctcttcctgatgccaggtctatgagctgaacctcaaagacagggcttctctaacacagctaccctcaagtaagcacatcggttagcactaaatacacagtatacgatgcccaatcaataatgcctactcacttttctaattcttctttctattattcttcaaatctgcagactcaagacctcccgaaacattgcggcagccaggattttgaatgagggtcctcatatgtctttccaaacaagatgcaagggtgctccttggtccctacacagaggggcttaagccaggagtgcataagtaacatgtaagagacagaagaactcaacctggctctccctctgtgcagtgaaacacctaattccagggttctttgattctgaaggtgggtgggctgagagaaagaggagccccaccctgagagctccgagtattcaggacaagacttggcagcctgaataggggctatactcttgagtgtggaagaagcaggcatctctgggcacaggctgcttttctggtggcttctccttcaccaaactgggctccctgctgtgatgtctatcagagaatctccttcagtaagaccaagattccaggatttaactaaaaatagcagcacagaccagaaaggtatgtcatggtacttgaattctgtgcagagcaataagtacaaatgcagcttaacaggggccttcagagttgtatctttggtgaaggagaaaatagacaatggcagggagaaactgaaggactcagtaggtctggaactggggcagcactgggtgctataagcttgtccttcaggggtctacagatgctgacacctgggaagtcatcctgcatcatctgctcactgctcactgggctcagcagctatgtcctcacaaataaccagattcaatcaacctggccttctccacccaacctggggaatgtattccagtgactgtttcaactgaggttctatgaaggggttgggggataagaagaggggactgatttgcttgaagaaaccattgcacaccctttcctttcatctaaaacctattaatggaaactctgaggccacccatagaagtctagctggtcttctaaatttgggagttacgaaggagtcattcctgatcaatctacaggataaggggccatcagcagctggtggtcagagtgaggaagaaaatggcttccttgagagactcatcagcacagccaccaactctggggaaaatggggcacttgctataacagtcaccccaaactactcacaggagcctgagcctcgtcccctcaccttattgtttctgattctggtccatgcctctgttttccctggacccctcgcccatgtctgagtccagggtagcaggggtagttccatcccagtcaacatctatacagaagtaacagctgctatggcttgaagccgagtctacagttctacccatgagggcctctttttctccccaatcccctcacacaggtgaccagtgctgtgggtctggtggagtggccactggccactggtcccaggcgaacacaaagtatttattcctctctaacaccaggcatatattggagggggtttggtgggtgtagaacagagtggttcttccagatgcaaagcagtaagaccctgtctacagaaagtcatttcacaaacctccacaccctttcatgataaaaacgctcagtgaactatgaatacaaagaaactaccctaacatagtaaaagctatctatgaaaatcccacagtcaacatcacacataatcttaaagaccaaagatatgtttttgtaatatcaggaacatagcaacaatgtacacttcactgcttctattcaaaacagtattgaaagtcctagccacagcaataaggcaagagaaataaataaacaggataacaattagaaataaaaagtaaaactatctctgttttcaatggatttaatgtcatatgtagaatacccttaaaagttccacaaaacagcttttgtcagaatgattaaatgtattctgtaatgttcagaatacaaaatcaccatgtaaaaacacctcatggctgggcatggtgactcacgcctataatcctggcactttgagaggctgaggtgggaggattacttgggatcaagagttcaaggacagcctgggctacaaagcaagagcctgtctcaagaagaaaaacgaaagaaagagagaaacaaagaaagagatagaaagaaagaaagaagaaagaaaatctcttatatttcaatacttagaaaatctcttatatttcaatatttaaacaaggacacaggaaaaaacccaaaacaaaattaataaaacaaatcaaattgcaacatcattagagagagtaaaatatggctgggcacagtagctcatgcctgcaatctcagcactttgggaggctgatttggacggatcatctgaggttagaagttcaagaccagcctcaacaatatggtaaagcctcgttcctacaagataaaataaaataaaattgctagctgtggtggcacatgcctgtaatcccagctactcaggggtccaagtcacaagaattgcttcagcctaggagggagaggttgcagtgagccaagatcttgccactgtactccagcctgggtgacagtgagacattgtctcaaagaaacaaataaataaaaatgaaacagtaaaatacttaagaataaagttattcaaagaggtgaaagacttgtagattgaaaagtataaaacattactaaaagaaattaaagaatacacaaataaatggaaagaaatcctttgttcatatactggaaaactcagtattgttatgctaacaaaacaaaccaggaggaattgacagattcatttcaatctctgaaaacattccagtaatattttatgcaagaatagaaaaaaattaaacctaaaatatatatagagtatgaagggaacctaaacagtcaaagtcatcttgtaaaagaagaccagtgttggaggtctcacactttctgatttcaaaacatactacaaagctacactaatcaaaacagagtggtatatatgtaacatacatactgacaaataaaatagaactgagtgcctagaaaaaaaactcttagttatacagtcaaataattttaaacaaggttgtcaagacttttcagtggaaacagtacagtctttcacaaatatagacgttctgggaaataatactgaatggcttttgctgttgttgtttttgaatggtctcaaatgttctctcaaagatgctgcagaacatagcttattgattttgtaagttaaaaggctgagtaagactgtgagagactccctgctcatcatcattcttcttccacttccagtgactactcttatattctgtgccataagccaacagctactgaccccaggatcttttaatccttctgtaaaactgtcattaaaaaaaaattgtctaaagtaaattttttaaaaaattctcacttaaaccagctgtttatccaatataaggctcaacacaaatagttacagaaagccagtaggtcattaaaacaattaatttagtcattcaaataaaaatgaacaccatgtaacactaatatcaaattatagtcacaggggcaggatttcagcaacagcaagagaaagtagcacaaataggaatgagcaaagaatagacaattaatgagtgtgaattggcctggaaaatattgtggcaatgtccaaagataaatccacagttatttgtgaaacaagtgaaagaccacgcattctcagtccaggaaagccaccagggggtggtctgggtctcttgaactgtaagaagctcaagaggtccaaacttcatgaaccctgcacaggtgctcattgactcatgtaaacgttagagcagctgcttcctcccacaggacaaatccacagcacacagcctccctgggctggcccctcacagtgtagctgctctcaggcctgtggacccaggtggtgataaaggcagtaaagatttgcataaagcagcacacagcacaccccctccatggagagagctcaataggagataaagagccatcagaatccagccccagctctggcgccaggggtcccttccaatatcagcaccatggcctggactcctctctttctgttcctcctcacttgctgcccaggttaagagagatttcaaataccagcctttggagggatccttctgtctgcccttctaatttctaacatgtgtctgttttttgtttcagggtccaattctcagactgtggtgactcaggagccctcactgactgtgtccccaggagggacagtcactctcacctgtgcttccagcactggagcagtcaccagtggttactatccaaactggttccagcagaaacctggacaagcacccagggcactgatttatagtacaagcaacaaacactcctggacccctgcccggttctcaggctccctccttgggggcaaagctgccctgacactgtcaggtgtgcagcctgaggacgaggctgagtattactgcctgctctactatggtggtgctcagcacagtgacagactcataagaggaaccaagacataaacctccctcggcccttgtgatgtggagattgtgtgatcatacacaccagctctcaagacagcctacatgtggaccagccatagaaaggggaaggaaagggtctgaattgatttctatccctccttgtgccctgaagtggaggaaatgtgagagtgatttgcagtaattgaatgagacaaagcaaaagttatttgttttatatgaaaaaaaaaaacagaaacagcaggatcagatctaaaggctgagtctaaatgcatttcctccagacagaagcttcttcaaacgatgggctttctgagctaagagcaaagaaaataaactctccacgggtatattattaaagtttattttattgagttactttcaaagcaatccatgactattatataaagtcagaaagtattaaaaatcaccaagttctctgctaagctaccttatcccatgcaatcaaaataagtacttttcttcatttggatgcattttttatttctgtttttaatatttccacaatggtgattaaacctggtgctcattcctctggtttgatccacctttatgctcttgtcatttaaagttaatgtaagtagtgttccatttatttaaaaggataaaatattttaatagttgatcattgcattttgaactgagtaccagtgaagtattctagcttttaggtaatttcaattgtttgctagtcaatgatgttatacgttgttgtcattaaaccattcctggtcatttctgtggattttgtgaggtcagagaaaatgtctgtgcttttcaatggaaagccttgggtacattattcctgacttcccaacgcacaaaatagagaaacacaaatttcctgctcatgttagttagagcataagagattcaggtacgaggaacaatttataccccaaactacatacagtgtcttcaggcatgtattagaagtgtacttctcaaactctctgatacccttagttctgaagaagctcaaagttggctaatacttttatatttatctttttattttttttacctcagccagcactttctcctgattcctggggttttctgcatttccagtgaatccagtgaatcacacaaataggctaactgattcttcccaaactccagcactctcccttatgtgctgatctagtgaggaatcacatgggaagagagacccatggatttctggcggcctgggaagtgagttcatggctggcctcagcttgcaaaccagacacttgtctccttgtttccctttactgttcattgggttcagcagctgtgtccttccaggtttcctggacagtgatggaccacactctcccaactcccaaccacccgctcctcaaaaggaataaccagactcagcaacttatgtgaggggcacagccaggggtcaggatagattggcattaagtcccctcaattaagagaggccagggaaggggggctgttccccctaatccgtgtggctcaggaagcagagctctagagacatctctaccatggcctgcaccccctcctcctcaccctcctcagtcgcggcacaggtggctggagacagggagtcagggactggcactggcaggaccagggctctgctttgctcccctggctcactgagctgcctccctcaccctgtgtctctctcccgactctcagggtcccgggcaatcatggctcatcaggtaacctgcaccgtctgtctgtggctaaaccagccaccatctcctgaactggaagcagcagcaataaggttcttggaattgtgacctggtgccaacaatgaccaggaagtgcctccaagcttctgactcatagaagtaaatatctgcccgcagggattcaggacagacgctcaggctaccagtcttgcatgaagcccttcctaagcatctctgggctttaggctgaggacaaggctgatcactcctgttggcttcagacagccccctggaggtccaaacagtgctgcagtctgggaaagtgagatgagaacacgccaggtctcctaggagcatgaccttccaatggcaccacccacaaccaggacagctggtctgtttaccatttgtgtggatgtttcttgatgctgccgctaaccagggcccaagacttagttcggggacagtgatctagagaatacagctttgttctctcacagccagccctcagaggaagcccttagcaacagcattgtcagactgcctcaaaaaaatcagtctttgattccaggaacaggctgccctggggacagactcaagatgagtcagggtaagcagggacagaatccagctgggtctgcctcaggcatgtgcactaacgcaaaggtctgttcatccttattgtctactaaacacctattatgtgccagtctcaggagagtgctcaggatacagagtttacaagacagacagggttcctgtctttacagggataatgcctcacagaagagtgagcaccaacaaatcaatgagaataaggcatattgtgaggtataaaatggttgacatgggccagaagacagtgagcaacaagaagctattaggaggttgtaagcaaggagatacagactctggtttgagattcaggaggcaaagtccagcttctctaaggaagatgaaaaaggaggggacagagtgaagaaagatggtccagttaggacatggtggctttgtacacatgagagatgaggtttctggcaagtaatgtggcagctgagctgaggcctgtgctgtggatcccagacgggagccacctgctaggcctaggctggagccctctgcctctgctcacgaggaccagcagctgtgtccttacaggtccttagggagccacagaacagccccaccctggtccaccccatcccaggctcagctttctaggcaagggtcagagtcagggcctagggtgggacttggccagcccaggggaggaggctggtgtgcatgaagagaccctccttcatcctgggctgctggcgaaagtaatagggactgggggagctcaagcccagctgagtgtcatcaggatgcagagctgtgtgtgggtccccaccaaggcctgagctcctccctttctcccccttctcattcactgcacaggtaactagggctagggatcagggctgtgggtgaatggaacgaggaccctgcatgctgccctctcaactgacccacctctctcaccctctgttagtccaggtgtcaaggttctgggcccagtctgtgctgactcagtggtgtgaagagttcctgtgggtggggtaaactgccgccatctatcacacttgaagcagaagcaaggctgggtgtgggcctgtgtcctggtatcagcagtgcccccaaactcctcatctatgacagcagtcattggtctgcacaggtcccagcgaagttctcaggtcccaggttggggatcatggcatccctgagcatctctgggctccaggcagagaatgaggctgattctttcgctcatcttgagacccaaggatccatgattaggcagtgctgcaggccagtgggtagctgggaggaaaaccttctgtctccccagtaatgtgtcttccctcttcagcctccaccccttcagcacaagtttctggggaggagggtctgaagcccgggtgagaaaaagggtcaaggctggccttaggacctggatgggcacagtgaccccctgctgagagggccttcatgagcaagaaggctgggggaggtcctgagttgatttttacaatggaaacagacaccagctccccatccttgttcaaaagcatctcaggaccttttcctctgcagatggcaagggggagaatctccctctgagatacatgagaattcccttcccatgacctgtcctgtcacctggatgaattcgtatttggaaaccaaatgactccccagtgccaggcattacatcctcacagaaaacctgccagaatgagcaagatcttccctccctgacccactggccaggaatctcggacatcaggatggctggactagatcactcatgccatctcccctgacatcatcatggttaccggggggactctctgattaatttgggccacacagtgcctgtccctggcattgcagttggggacgcttacaggctaagtttatggctgggagacctagggtctagaaaggagaggaatagaacagaagctttgcctacatggccccctgtgtgcatcactcttccctccacctttatcctaagttcatgatgggtgatgtctccttgaggctggaacctgggcagtgacatgggcctgtgtgtcctcatctcacaatgcttcatcttgggctccctgacctttctgatattcctataatggatcaatttcaggctaggacacagccatgcccatacaggaggcagtgatctgagaatcaggtagtcttagaagagacagaaagcaaataaacaccctcatgttggcctcctaagcccagaggacataaggaaatgaaaggaattcaagaagaaacataagtggtcactgcccaccatcacctgggcacctgttctccacctgcccctctctcagtgaggaccagactcagaggcctagagaaacacgtcttcatctgttcacaccgtggggtgcctccttctggactcatcccaagactgctgctcccccagcttacctgtgtaactgctgagagtcttcacagggacctggtcacagggtttgggatcaggatcagcctggctttaactcagctgtgaccctgccccttcaggacaaaaagtgaactattagggctctaactgaactctcctgatttacttaaatcttatattctccttctcaatatccttctaggaagttctgtctctacccaataatgtcaggtcatttcctcaggcctagagccatttgatttccagacttctatactcacacttatgctctcattctctgtcatggttcatttactacgcagcagctaatgaggccaaccatgtatctacagcccattgacatgaaaaatggggaggagagggttccttagataaatacagggttagcaaaggaaagtttcttaggaatcacttcaggatccaagaaaattcattccagagcttcgagagtttacaactcaaaaacaacagcataatatatgaggtggtgaatcttcttggccttctcaatgaataacctcagaaatggtcagagaatatgcttcaaaaaggtaagagtatgactttcacaaacatatagtattcacatatgtcaacaattttaattggtttatgtattttggagaaaaacagtatgatgataaataaatgttaaaaagcatttttaaaaactcagtgcttatactccaccaggatagaacctgtgaaggaaatttctgtgttgaagatacactgtcttttagaataatagcaacatagctatgaattttgtcttctcatctcacaatctacaaattaaaatcaccccatttatgtgaaatatctagaaaaatacaggtacatttggacattcccatctgccaccacccatccatcttctcctaaagtggaatccctctgcccccattctgctcctctccacacatctacctgctaacacgtgactcctccctgccttcctttccagatccctagcagattgggcccaccaggggaacaagctcttggacctggggatcaaaagtgcatcttgttggacttctgaggacttgccctgcaagggtctctttctggatcacaatccctctgttcctgggcatccccttttgctggatcctgttatttatctctgtgttactccatctaggtctactctgtggacttccctgcatcttcacctgaaccccaggaatcttcaagtcatgccaatattccctcagttctcctgaaatgtcttattttctcttctcctgagatcccaccaagtcatcccttctgagacccctgagtgtagcagggccctctctggtctctttgcttcaattatgaatgaggagaatgggaggtcctctttgccgctcctacccctgtgttgccatcaggatcagcttcatgaggcagaatgaggctgtctagatcaacatggctttcccaacattgagctctgtgcccagcacaaggtaggtgctcagtaactatttgagaaaacctacatttcatcacactggccacattacactgagtccaggatggggatgaactgggagaagcagtggtggaaatattcctctctctgctttcaggctaagaactgatgggacgttcaccagggagagcatcccttggcagaaagggggccatgggcatccttgtcctgtatgggagacactgctcagcctgggggaacctctgttcatgaaggtgggagaaaaagataaacaaaattcactgtgaatgtctatgtatcatcacagaggaggcaatgacaagaaaataggaagtgcaagcccagttacaattggtttctactttaaaagaaataaaatttaatatgcctggtgtgttatgtaaacacaacaaacatttttcgaaaactataaaaatatttaaagtaacatggtttacaataaataggaacatttgaaataatgacaccctggaaatgcaatcctaaaatacagcatacattttatttcagttatttatcttgactggttttatttaaatgtctatattagagatcactacttcattgtggatttttgtttgtttgcttgtttgttgtttttgagatagagtctagctctgtcacccaggctggagtgcagtagcacaatctcgacttattgcagtctccagctcccaggttcaagcacttctcctgcctcagcctcccacgcacctgggaccacaggtgcgcaccagtatgcctggctaatttttgtgtttttagtagagatggggtttcttttttttttttttttttttttgagaccgagtcttcctctgttgccaggctgaagttcagtggcgcaatctcggtacactgcaacctctgcctcccaggtttaagcaattgtcctgcctcagccttctgagtagctgggactacaggcacccgccaccatgcccagctaattttcacatttttaatagagatgggatttcaccatgttgcccaggatggtcttgatctcttgacctcgtgatccgcccaccttggcctcccaaagtgctgggattacaggcgtgagccactgcacccggcctaagatggggtttcatcatgttgaccaggatggtctcaaactcctgacctcaagtgatccactcacctcagcctcccaaagtgctgggatgacaggcgtgagccacagtgctcgacctagtacattgtttaaatggtgcatgtaaaacctcatggtactacaactgcctggtgacagactcaccagagtaaataactatcctgctgttctccaaccacatgggattgccccaaaaaatatttgttgaatcccaggtgtatcatgccagaactcttgcagtcatatatacaatctgtttcattttaataaataggattatcttttttcttcagtttactgtttttaatgtatcatattctagatttcattacacatcaaagatgaataatttctatcatctttcagacatgcccaaaacactcattagcgattttgaacagtattctttcctaaacatcctagttggaatggttgatcctaaaagctaccacgtgtcaggctcacttaagtacagactctggtcaaaacaagctgaagttttaactcttccatcttcaaatactgagcatatttgcttgttttgctctttagcaaaacactgcaaagtcatttgccaggatcccccgcagattggcattcagtgatggagaacagactcctaggtgagatccctggtcacaggatcccgatgactatgactgcaagtctggaaaagaagagacagaacaaagatttaccagcataaccctctgagaatgtgccccaggcatcccggagggaagagctccctatcgacccaggactgcagaatccacagaggaaggagagctctggccaccagggagcagccacacgagaggagaggacccagtgcccccacaggtgaggaaatgagtccatggggctggtcactgctctcgatttcattctgacataagaggactttgtgtagtcaccacctgagtcctatacagtgaacagccaaggagacatggacagattcacccctgaggaacccagtagaatgtgaagtctgccctgagctcacgaaaaaaatgactcagggggctgcctggcctggccctgatggagggggccatggacagaacaacggggagtgaggggtgtctctgagaggctctggtcaccttgttatacaatggtggtgtacatgaccaaaatggacaccaggggatgcctgcgtaccattactgagaagactgggtgtgatgagagcaggaccagcgccacctgtcctgcttggtgccctatgcttagggcttacagatgtcaactctgcaccccctgggaccacatagccccacccctggcactctctgacatcctcaggcagaggagcctgacccagggcccaaggtgggatcagaaagctggagggtctgatttgcatggatggaccctccttctctcagagtataaagaggggcagggagagacttggggaagctctgcttcagctgtgagcacagaaggcaggactcgggacaatcttcatcatgacctgctcccctctcctcctcacccttctcattcactgcacaggtgcccagacacagggtcaggggaggggtccaggaagcccatgaggccctgctttctccttctctctctagaccaagaatcaccgtgtctgtgtctctcctgcttccacggtcctgggcccagtctgtgttgacgcagccgccttcagtgtctgcggccccaggacagaaggtcaccatctcctgctctggaagcagctccgacatggggaattatgcggtatcctggtaccagcagctcccaggaacagcccccaaactcctcatctatgaaaataataagcgaccctcagggattcctgaccgattctctggctccaagtctggcacctcagccaccctgggcatcactggcctctggcctgaggactaggccgattattactgcttagcatgggataccagcctgagagcttgcacagtgctccaggccaatggggaactgagacaagaaccctcttcctcctccgccaggagggtgagtgcctgcagctgctgctcacacctgacctgtagcttctgctgctgtagcttcccccatgggcctcggggcatccagggccttgcctaggagtggaggctccaccacttttgtcctcagagtcaggaacagggaccccaggagacagaatatcctgctcctcagcttgggacacagggtctctgcactgaaatcgtgggctgaggtggcaggtccaactgtgtcttcacagtccttcctgtgcctgcccatggtgtggggacggagtgaggaagtgtgggccattgagcttcactagaggcctgagggagcagaggtgctcccgaagacctggactccttccgtcaccctcctcccatcactctcctcactgtagctgtggccaggtgagggctcagggctacttgaggaccttgctcaacccagggcctccatcccaggcattgtttccaaactctgtaagggctgtctctgaatctgtagaaacatttatttctatgtgcccaggactgggttagagggcaccaaccccaccccttgcaaactgctcatcacctctcagtgaaacaatgaggagaagaaagagttagaaatcagaagcctccccaaggctcccctctctcctctcaaccagcctccccttggcttcctccttccacagaaataaagaggaggcagccacagaaggcaagggaaggtccaggcattataccaggcagtggagccagccagtccccccagatggtggagggaggtggtggaggtgtctgggaccagaaaatagtgaggaccctcttactaaagtgaggaggggtggcataaactgaggctcagatggtggaccagatctcctgagccatctactcatttcttcttgagtttcagtttcagtaagaataggataaaaaaaaagtctgaagaggttcctttcctcagataagaattcgtagaggattattgcccactcaggcattgaggggaggctgagcctccctctcaggccaatagaactgggggctttcatgggaatttgattgtactgaagctcccagactctgacatctaagacttatgctctcgtagcagagcccagcactgataccaaaatggataaaggctgattgataagcctggaatatcctagctgacaccgacttgtggaaaagagaatcaagttagaatattgatgtgataaggtggcatcgcacagtgaggagaggagagcttgtgtgggggagggtagaggagccattagagggttggacaaagaggacacagaatctgaggtaagtttgtgaggaaaactccagatgcttcagagaagatggacaaggaggtaggcagtatgaaggccatgggaccagctctagtcaccgggagtgagtggtgagattcagcaccagtgtctggggaggaggtactgaagcctgggtgaggggagatgctcaaggctggccttaggacctgagtggggcacagtgatcacactgctggggggtccttcaagtgcaagggggctgcaggaaggctcgagctcattgtcacaatgaaaacttagacaacagctccccagacttgttcaaaggtgtcacaggactttttcctctccacatggcaacggggagaggaaaacttatctctgagatatataagatgtttgttctccataacctctcctgtcccctggctgaattcctatttggaaacaaaatgactctccagttttacatatgacatcctcactaaaaaaaaagttccagaatgagaaagatctgccctccctgacccactggtgaggaatctcagccttcaggacaaccagacgaaatcgttcatgccatctcccatgacagcatcatggggaccagggagcatatcttatgggtttgggccacacactgcctgtcccaaacattgcagctggggacacttatatgctgaactcatggctgggagatctggggtctagacatgacaggaagaggaaaaagaccaggagctctgcctaagtagccccagtgtgtgaatcactctaccctccaccctcaacttcagttcgtgatgggtgttgtcttgcgaaaactgacagctgggctgggacacaggcaagagagactctgacccacaaatctccatcgtgggctctctggcctttctgatattctttttgcacatcaattctgggccaagacacatccatgctcatcaagaaggcattgataggagaatcaggtagcctccagagagacaggaagcagataaacaccctcatgttggcctcctaagctcagaggagaaaaaaaagggaaagaagttcaagaagccacactagaagccactgatcaccatcacctcggcacctgtcctccatctgcccctctttcaagtaaggaccagactcaggggacagcacctgcacctccctttctgtccatgcactgtgtagggagcctccttctgctctcatctcaaggcgactgctccgccaggtcagccgtgtcactgctgagagtcttacctcagtcctggtcacagggtcttggatcagcagcaacctggctttgattcagctgtgaccctgccccttcaggacacaaagccgatgattaaagcctaactgaactctcctagatttctcaaaccttagattctccttctctgtgtccctctagaaagtgccacctctaccaaataatttcatgttatttcctcaggtctagagctatttgattaccaaaattctatactcactcttctgctctcattccttgtcatggtccattttccactcaggagctaatgatgccaaccctgtatctacaggccattgtcacaaaaaaaaaaagaaatgagagggttccttagataaatacagggttagcaaagaaaagtttcattaccccttaggaattactccaagatctaagaaaattaattccagagcttcaagagtttactcctcagaaacaacagcatgaatacattaggtagtgaatgttcttggtcttctcaatgaataacctctgaaaggttcagagtatacgtttcaaaaagataagtgcataactttcacaaaaatgtaatcttaacttatgtcatcaattttaattggtatatatatttctggaaaaaaaagcagtatgatggtaaaagaaatgtaaaaaagcctttgtaaaacccagtgcttacagtccaccaggatagcacctgtgaagcaaattttctttgctgaagatacaccgccttttagaataatagcaagatagtttgaatttgtcttcttctctcacaacaatctaaaaattaacatgatcccatttatatgaaatatctagaaatatatctgtacatgtggacattcccatcgcacacctcccatccaggctgtcctaaagtggcatctcctcttcttctgctcatgttctccccctctcctcacctctcctgctgacacgtggctcctccctgccttcctctccagtagccccagcagatcaggcccaaccagtcaacaagctcctggacttggggaacaaaagtacatcttcttggatttctgaggacttgccctgccagggtgtctttctcaatccaatctctccttcccggcagtccacttctcctagatcctgtaatttatctaatcttattcatctgtatctacttcgtggacttccttacatcttcacctgaacaccaggaatcttcaggtcatgcccatatgcccttggttctcctgtagtcccttcttccttcttcccctgtgatgccaccaagtcgaagtctcttctcagaccctggagtgcagcagggacttctctggtctctgccccagggattaagggggtggaagagtggactcctgtgcccttcctatgcctgtgttttcatcagggttagctgcaaaaggtagggattaggctgtctaggtagggattatggcattaggtagggattatggcatttccagagctgagctctatgcccagcaaaagatacgtgctcagcaactacttgacagagacctacctcttatcacatgggacacattatactggacccaggatggggctgaactgggagaggtagctgtggacctgctcctcgctctgccctcaccctaagagctgatggggcatccaccaggaagagcattcctgggcagggagagggccatgagcagccttgtcctgtatgtgagacacagctcagcccggtcacaagatccagatgactatgactgcaattcaggggaagtagagaatgaagattgaccagaataaccctctgggaatgtgccctgggcctcctagagggaagagcttcccttctattcagcgctgcaggatccacagaggaaggagagccctggccaccagggaggagccacatgagaggacccggtgtccccacaaatgggaacgtgagtccatgaaagtcggtccctgctctgggtttgattgtgacctatgaggacattgtgtagtcaccacctgagtcctctacaataaacagtgagagcgccacggacagattcactcccgaggagcccagtaaagtgggaggactgaggtcacagggagaagacacaggcaccacctggcctggccctgacagggggcagtggacagaacagtgcggaggcagtggggtctctagaggctctggtcaccttgtcataccatggtttgtctcggtctggacactagagggcacttggggatcattcctgagaagactgaggttgatcagagcagaaccagccacctgtcctgcctagtgtcctctgctcagggctcacagctgcgtcctttacacccgtgggaccacacagccccacccctgccaccccctgacatcctcaggcatagggacctgacccagggcccagggtgggattagaaagctgggggtctgatttgcatggatggaccctcccactctcagagtatgaagaggggcagggagagatttggggaggctctgcttcagctgtgggcacaagaggcagcactcaggacaatctccagcatggcctggtctcctctcctcctcactctcctcgctcactgcacaggtgactggatacaggtccaggggaggggccctgggaagcctatggattcttgctttctcctgttgtctctagaagccgaataatgatgcctgtgtctctcccacttccagggtcctgggcccagtctgtgctgacgcagccgccctcagtgtctggggccccagggcagagggtcaccatctcctgcactgggagcagctccaacatcggggcaggttatgatgtacactggtaccagcagcttccaggaacagcccccaaactcctcatctatggtaacagcaatcggccctcaggggtccctgaccgattctctggctccaagtctggcacctcagcctccctggccatcactgggctccaggctgaggatgaggctgattattactgccagtcctatgacagcagcctgagtggttccacagtgctccaggcccggggggaactgagacaagaacccacttcctcctctgccaggagggtgagccccggcagctgctgctcaggcctggcctgtggcttctgcggctgctgcttccctcatggtcccaggggcatccagggccctgcctgggagtggaggctcctcctccccttctgtcctcagagtcaggaacagggaatccaggaagcagaatatccctctcccttaacttgggacacaaagtctctacactgaagttctggactcaggtggcagatccagttgtgtcacctcagacccacctctgatagggaacccatgtattcattattctcctttccccaattccaggagtttccggagtggtgtcttcctctccctgctcctcaatgtgagtccctgtgtttcttttctcccaggcctattctttttttttttttttaacaaaactcctttcatgaaggaaaaatgcacacctaataaaccagctgaatttatagcattaaattcggcccattttggcatttttctggatctttgaaaatatcaccaccactgagctatgcaacctctgactaaccccagcagcccttcatgatgctttgtcatctccttcactccccgaatgccctcctgggcagccaggaatctgcctttgccactactgtatggtttccattttctgaaacttactagtgttatcaaacactatcttcccatttgttcgagcttctttcactctgcacacttcttttcagattctccctgctgttgctgaattgcatcccattctacagagggctcattacaacctttgagggtctaggacattctcttctgattctatttatttacttatttattttaaagtttgaattcattgtccatcaaatcaaactctacgggtgatgttcatctaaggtgacaggagtcagtgagggcttctcaggattcttgcttcttcatctcttccctctaattctttctataatgggagaatttcttatctttttaaagtttttctatttattattttatgttggcttttaaggtttttagtgttttttaaaatttttttatttcaataggtttttgggaaacagatgttgttttgttacataaataagtttgttagtggtgatttctgggattttggtgcactcatcacccaagcagggaacactgtacccaatgtgtagtcttttatccctcaccccatcccaccctttctcctgagtccccaaagtccgttgtatcattcttatgcctttgtgtcctcatagcttagctcccatttatgagtgaaaacatatgatgtttgcccttttattcctgagtgaattcacttataatgatagtctccattccatccgggtttctgttaatgccattatttcattcctttttaaggctgagtagcagtctacatatatatatatatatatatatatatatatatatataccacatttgcttcatccactcattgattgatgggcatttgggttggttctatgtttttgcaattgcaaattgtgctgctataaacatgagtgttcaagtaattttttcatgtaatgacttcttttcctcttggtagatacctagtagtgagattgctggatcaaatggtagatccagttctttaatgaatctccacactcttttccatagtggttgtactagtttacattcccaccaacagtgtaaaagggttcccttttcaccacatccatgccagcatcaattattttaatttttttattatgcccattcttgagggagtaaggtggtattgcattgtgactttgattttcatttctctaatcgttagtgatcttgagcattttgccatatgcttgttagccatttgtatatcttcttttgagaattgtctattcatgtctttagcccactttttgatgagattgtttgtttttttcttgctgattagtttgagttctttgtagattctggatattaatactttattagatgtatagattgggaagattttctttcactctgtgggttgtcagttaactctgctgactgtttattttgctgtgcagaggctatttcatttaattcagtcccatctatttatcttcgtttttaatgcatttcattttggattcttggttataaagtctttgcttaagccaatttcttctagaatttctaaggtttcatgtcttagatttaagtctttgaccaatcttgtgttagttttgtataagatgagagatgaagatccattttcattcttctacgtgtgacttgcctattatctcagcaccatttgttgaatagcgtctccttttcccactttatgtttttgtttgctttgtcaaagatcagttaactctaagtattttgcttcatttctgcattctctattctgttacatcggtctatgtgcctatttttataccagtaccatgctgttttggtcattatggctttatagcatagtttgaagtcaggtaatgtgatgcttccagatttgttatttttgtgtagacttgttttggctaccggggctctttcttggtttcatatgaattttagttctatgaagttctgtgaagaatgatggtggtattttgatggaaattgtattaaacttgtagattgttttggcagtatggtcattttcacaatattcattctatacatccatgagcataaaatgtatttccatttgtgtcatctgtgacttctttcagcagtgttttgcagctttcctggtagaggtctttcactttcttggttaggtatatttctaagtattttagttttttggcagctattgtaaaaggggttgagttcttgctttgattctcagcttggttgctgtcgttgtatagcactgctactgatttgtgtcctttaattttgtatcctaaaacttgctgaatactttcactagtgctagaagcatttggggtgagtcttcagggttttctatgtatacaatcatattatcagcaaacagtgacagtttgacttcctccttatcagtttggatatccctgatttctttctcttgtctgattgctctggctaagacttccagtactacgttgaatagaagtggtgaaagtgggcatccttttgttgttccatttctcaggggaaatgcttttaacttttccccattgagtataatgttggctgtgggtttgccatagatggcttttgttgccataaggtatggtcccttctatgctgattttgccaagtttgaatcataaaggatgctggatttcgttagatgccttttctgcatctattaagataatcatgtgattttgtgttttaattctgtttatatggtgtatcacatttatcaacttgtggatgttaaaccatctctgcatttctggtataaaagcaatttgatcatggtagattatctttaagacagctgttggatttgggtagctagtattttgttgaggatttttgcatctagattcatcagaaatattggtctgtagtttatttttgttatgtcctccctggttttggtatcagaatgatactgtcttcacagaatgatttagaaaggattcccattttctctatgctgttgaatagagtcagaaggattggtaccagttcttctttgaatatctaatagaattcagctgtgaatccatctggtcctggattttttgttgtttgcaattttttttattaccatttcaatctagctgcttgttattggtctgttcagagtttctacatcttcctggtttaacctagtagtgttgtatatttccaggagttcatccatctcctttaagatttctagtttatgtacataaaagagttcatagtagcctttaatgatcttttgtatttctgtggtatcaatagtaatatctcccgtttcatttctaattgagcttatgtgggtcttctctcttcttttcttggttaatctcgttaatggtctgccaattttatttatcttttcaaagaaccagctttttgtttcatttatcttttgtatttttttttgttttgacttcatttagttctgctctgatcttcattatttcttttcttttcctgggtttgggtttggattgttgtggtttctccagttctgtgaggggtgaccttagattttctacttgtgctctttcagactttttgatgtaggtatttaatgctataaactgtcctttaagcaccacttttgctgtatcccagagcttttgacaggttgcattaagatttagaacaattgcaatcttactatcaatcaacagctttttaattcctgaggatgtgacctcatttaatcctgacaatagctttattattgcttttcaggcagtagaccgtgattgaagaggtaatgctttgtggcctggaggtaaggttctaaaatttatcaaatattaaattggtgcacaagtaattgcaggttttacaaataaaagtaatggcaaaacccacaaggacttgtgcaccaatgtgatataaacactggaggtcagttaaatttgaattcagtaaaaacaatgataaagaatctgtatgtgtatcacccacacagtattgttcaattgtaatacaaacaactgggtgccctgcattttatcgggaaactccacacagggttcgcagcttgaaagaggcagagctgtggcaggcctgcccttcctgatgccaggtctaggtgcttaacgtcaaagacagagcttctctaagagagctaccctcaagtgaacatgtcagttggcactaaatacatgtgatatgatccccagtcaatgatccccactcacttccctaattctttctattatcctttaagtttgcagactcagggcctccccagaaattgctgcagcctgagttctggacctgggaccgcatgtcctgtcacaaccagatgcaaaagggctctttagtccctacacagaatggcttcagccaggagagcataaataacatgtaagattagaagagctcagaggggctctccttctgtcccatgacagatgaaacttcagggctctgatgcttgtcagggaatctccttcagtgaggccaagatcccaggactttactaaaattagcagagtggaccagacaggcatgtcatggtacaggaattgtgttcagaacaataagtgcagatgcatcttaacaagggccttcacgttctatctttggtgaaaaaggaaatagacaaaggcatggagaaactgaaggactcaatgggtctgggactgaggtagcgctgagtgctttgggcttgtcctggagcagtctgcagatgataacagctgggaagtccacccctgctgtgaccttgtttcatctgcccactggatcagtggctgtgtcctcacaggaaagctggctgtagccagactggccttctccatcccacctgggaaatgtattcagatgactctctggggtgaggttctactaagggcttgggagttatgaggagggggctgatttgcatgaaagaaccatttcaccccctttccttcatctaaaacccattaatagaaacttcagggccattcatagaagtccagctggtctcctacatttgtggggcataaaggatcaatgcctgatgaatgcctgatcaatctaaaggaagaggggctatcagcaggtagtggtcagagtgagaaaggaactgacttttttgagagattcatcaacacagccaccaactctgggacaaatggggtgactctctgtaactgtcaccccaaattacccacaggacactgagccagtcccctcattctattgcttctggttctagtccattcccctattgtccctaaacacgttgcccatgtctgagtccagggtggcagggatacctccatcccagtcaacatctacagagggcctcttctgttcccctctcacctcatgcaggttactactgttgtgggtctggtggagtggcccctggagaacacaaggtatcccttcctctggaaagccaggcatgtaatagacatggtatgggttgatgtagagcagagtggctcatccagatgcaaagcagtaagaccttggctacagaaaattatttcacaaaattccacaccctttcatgacaaaaacactcgatgaactataaatagaaggaaactacctcaacatagtaaagaccatctatgaaactcccatagtttacatcacataaaatctgaacaaccagagacattttctgtaatatcaggaacaaaccaaggatgcatactttcacatcttcaattccaaatattattggaagacctaggcagagcatttagcctagaaaaagaaataaacagaataaaaactagaaataaaagtataaaattatctctgttttcagatgacataatgtcatatgtagaacgccattaaaagacccagaaaataattctgaaagaatgattaagtgaatttggtaatgtttcaggatacaaaatcaccacttaagaacatctcatggctaggcatggtggctgacgcctataatcccaacactagggaggctgaggtgggagaattgcttggggtcaacagttcaagaacagcatgagcaacaaagcaagaacctgtctctaccaaaaataaaaaaataaaaaggaaggaaagtcacttgtatttctatacttaaccaaacaggacaccacccaaaatgaaattaagaaaacaattcaagaggacccacagaccctctgaaggaaggggactgcacccgcaggacccgggagacaccgcaaatactgtgagtgcctcaactgcggaagtgggaaaaggagaccctcctctcccaaacacacacccctactgaagaatgtgaaagtctgttagcaggagaagttctcaactttacctggaacggagttaagttagacagccaagctcagtgaaatacacaggtgtaggaggtagcggggaggccctgggaacttgctgaatccccaagcaacccattcctttctggcaccacaggaatacatcaggaaggaggacagacaagcagcgggtaaaactccacgggaagaaggacttccctagctgaactttgcaacaattcgaatcgggtgagaggcctcctggctctagtatccatggcactagtatccatggctgagaggcccatggatagttcacatcacaggactctgtgcagaaacccccagtaccagcccagagccgggtagacttgctgggtggctagacccagaagagaaacaaaaatcactgcagttcagctcgcaggaagacatccacaggaaaagggggagagtgctacatcaagggaacaccccatggaacaaaaaaaatcttaccagcctttagccctagacctctcctctgacagagcctaccaaaatgagaaataacttggggggaagagtgggagaggggcgaggagtaaaagacaacaaacatggtacagtgtatactgctcaggtgatggctgcaccgggatctcacaaatcacccctaaagaacttactcatgtaaccaaacaccatcttcccaataacttacagaaaaaaaaaaaagaatattataacaatggaatcatatattatgcagcctttcagcattggcttttttcacggagcacaatttccttgagatatatctgagttgcgttgtatcaattatatagtttgtttctttttattgctgagtaatgtttcatggtacggttgtatcaagcttgtttaaccattcgccagttgaggaacatgtggattatttccagtttatttttttggctattaggaataaaactactatgaacattcttatacattaaaaaaaaaagaaaacaattcaaatttcgtcattagaatgagtaaaatgcggctggcacggtatctggtgcccataatcccagcactttgggaggctgagacgggggatcatctgaggtcaggagttgttagagaccagcctggccaatatggtgaaaccctgtctctactaaaaaaagattaaaaaaaattagctgggtgggtggcacactcagtgattgcagctactcatgaggctgaggcacaataatcacttgaacccaggagacagagtttgcagtgagaggagatggtgccactgcactctaacctaggtgacacagtgagactctgtcccaaataaataaataaatgtaaaatacttaagaataaacttaagaaggtaaaacacttgcacattgaaaacaataaaacattgctaaaagaaattgaagaatacacaaataaatggaaagacgtttttgattatgtattggaaaactcaatattgttaagataccagtagaaaccaaaataaaatatactatagagtcatcacaatctttatcaaaattccaatactacttggtacaagaatggatataattctaaaatccagatacccaaaatagccaaaataatcttgtaaaagaagaacgttgttggaatcctgacacttcctgattccaaagcatactaaaaagatacactaatcaaaacagagtggtacatatagacagacatacagacaaatagaatagaattgagtgccttggagaaaactctcagttatatggtcaaatgattttcaacaagcttgccaagaccattcgtgagggaaagaacagtctttttaacaaatgctgttgagaaaactggatatccacatgcaatctggaagtgaatcaaagacacaaatgggagagccacaactgaatcttaaaagaaaacattgggaagtaggtccacaacgtagggtttggaaatgatttcttggatatggcacaaaaaagacagggaaaacatagaaaaagaagaatatagataaattgcatttcatcaaactgtaaaacttatgtgcagcaaaggacactaccaacagagtgaaaatgcagataatagaatgggaaagattgttacaaactttatatctgataaggcatccaagctatagaaagaacttctacaactcaacagtaacaacaaaaataggaataacccgaaaaaaacaaggacaaaggacttgagtagatattactacaaaaaaagatctacgaatgtccaataagtacatgaaaagatgtacagcatcaccaattattagtacactgcaaatcaaatcacaataatatacaactctatacccattaggatggcattaaccaaataacagaaaattaaaagttctagcaaagatgtttagaaattgcaactgttacgatttgctggagagactgcagaatgatgcttccactgtggatgccttatggctgttcctcataaaatcaaacatagaattaccattttatcagaattttcacttctgggaatgtgcctgaaaaaattgaaagcaagatctcaaagagaaaattgtacatcctcgttcatagcagcattgttcacaatagctaaaaggtggaggcagcccaagtgtcaactaatgaatcaacaagatatattatacacacacaagggaatattattcagccttaaaaagaaagtctgacccatgcgatggcatggatgaacctttaagacatcatgccgtcagaaataagctgacttcaaaaggacaaaaattgtttgccagcccttatatgaggtacctagaatagttaactccacagtgacaagaagtaaaacgatgtttcccaggtatgaagttttggtttgggaaaataaaaaatttgtggagatgagtggcagtactgtggttgtacaacagtgttaatttacttaatgtcactgaagtatacatttgaaaattgttgaaataatgtattttgtgtatgaatattttactacagccaaaaagaggaagatttatgtttggtgcagtttctctacctccaagaacagtggaaacctacaggactaggagagtgtgcatgagtatccaggacactcttccttttatgccagccccacagcatccaggacacccttccttttattccagccctgcagcatcctaacaagttaagagagtcagacgtacctcattacaggtgactcagaataatatgagaaagtctagaggtggccatgatgttagcggtgggtgcccaacccagcccaggagcagccgcaaatgcaacagtggccaaagaaggggagatgaagctggtggcagaggtagcagcccctccagctggagaggggcatctgcttctgtacaaaatggttcacagttgataagtcttgcatagatgcctcatcgtttacctcatgaccaactacagttttcattgcaatgtacgttatcatagcagtaatgtctatttcctcctgtagcaagcaaacatgaacgaaacgtgctttactgctttgtccaacaggacatgttagtcccaaacacaggctgaatgtttaaaggtaacgttctctaaagataaggatattataccatttattgataaatacggggattgcatgatgaccattcagacacttggaataattacttggctaaataacattgtttaaacaatgagtaaatttagttattctttgcagagcaaaaaagatccaagtttcaccagtcccttggcaaacactacatttcaaactatggaagggagacatcctgaaattttgtgctactctttctgaagacacagaaacagtcaagtcatacctaatacttatgagcataaagctttgataaaattcaagaattatttgcattttgaggaaaaagactttgtcgctaaagcagagaagaacctaaaacggactcctcatagtgagctaatattttataaaaaggtgtcaatcaaggtgtggcttacaaaaatactttcaaggatgtttactttccagccatctcactggacaagaactgggtggttttcattaactttggactgtgctttaatttcctaaaaatgatgtcacttactgccctgagtgacatgggatgggatgctgtggtagagcacactctggctgatgtcttgtacctgctggagacagaaaaggatgggagacacagtcctccacaggaaatctcaaatgggtccctctttcttttcagatatggactttctggggagtaatactgtagggcttttcttgttgttgcctttaactgtctcaaatgttctcccaaagatgctactgaacacagcctctcctttgagcaagttaaaagtctgggtacgactgtgagaggctcctgcctgccaacactctttctccactttcagtgactgctcttcttctgagggccgtaaaccaacaactgctcatcccaagatccactaagccctctgggaaattggtgctgtactgcataccctgcctgctgggacttgttacattgatgtattttctaaggagtgaataatcttgtccaagtaactaacttatttaaagacattttcttcggtgggcactgactccatggcacccgttttccaaggagttggtgagcttgtttctgagaatgccagaaatcaatgtacattccaaatcattctaaaagtgatttcttttcggtgtgggtttggttttgttattaattttgaaatatatctttgaatactgagatctctgaaactactagatctctagaagtgtaattgggaaagaaggttgcttgcagctttaacaaaatgagaaactcttcccaaatacaacctgttttgaagttaaaaaaaaatgtgacattagaacctgcaaaatctaagagtttccaacagcagtctcaattctgatgctaactgtaagctagggactcccccaacaacgcttcacttcttatgattcccaagaaggactcacatcactcactgaaacttgtgacgtttgttgatatgattttttacaacaaaagaatgcagattaaaataattcaaggaaggaggtacatgggcagagttcaggagaattccaagcacaggcattcagttgtcctctcccagtaaagtaatagacaatgctgcattctcctggcagcaatgtgtgattctgtgcatgaattattgccaaccaggaaagctcgctgaagcttggtgtccaggcaggtttttttgggggtgtgagttggggatggggttgcttatgtagaccttgttgatcatccttatggctgactccgacttgaatttccactgaattgacaataaaacttcaaccttaaatatttggttattttctttttaataaattctctaaaataaattattttgaaaatgctcgctttagctagctgtttatccaatatgagactcaacataaatagtttcaaaaagccagtgggtcattaaaacaattcctttagtcatccaaaacattcagataaaaattaacaccatgtaacactaaaatcgaattatagtcactggggctggatttcaacaacaggaagagaaagtagtacaaatagggatgagcaaaaaatagacaagtaatggatgtgaattggcctaggaaatttacagtggcaatgtcaaaaaggtaaatcaatagttatttgacaatacatgctcagtccaggaaagccaccagggggcggtctgggtcgtctgcatcataagaagctcaaggagttcaaactgaatgaaccctgcacagttgctcactgggtcgtgtaaaatgttagagcagctgcttcctcccgcaacacacggccactctgggcagtcccctcacagtgtggctgctctcagggctgagaacctgggtggtgctaaaggtggtgaatgtggtaaagatttgcataaagcaccacacaacacacctcctccacacagggatctcagtagcatcttcaaaggatgggctttctgagctaagagcaataagaagaaactttctaaacttactaaaatttatttattgagttatgttcaaagcaatacatgcctattacataaaatcagaaagtatttaaaatcaccgagttctcggcaaaggttctttattccaagcaatcaatatgactatttttttttatttggatgcattctttcatttttgttctcagtatttccacaatggtgatcaagccttgtgctttttcatctgcttttatacccctttatgatctagtcatttcaggttaatgtaagtagtgttccatttcttaaaagggataaaatatttaaatagttgctaattttatttttatttgaataccaatgaaatattatcatttttagataattcttattgtttgctactcaaacgaagatatgatattatcttattattaaaacactcctggtaacttctgtggattttgtgaggtcagaaaaaaaatgcctgaaattttcaatggaaagccttgagtacattacacctgacttcacaatgcagtaaatagagaaacaagagtttccgattcatgtaagaaggagcataacagattaaggtatgaggaataatttatatccaaaactacaccagtgtctccaggcatgtgttagaacagtaccccccaaattctgttgtgcatatgcatcttctggggattttacaaaatgcagattctgattcagtggctctggagtgaggacacagtctctgcatttctagaaagttcctaccacacaaaatccacatatatgtttgaacaataacaaggccagccaggagaagaggctcaggtgtgtaatcctagcactttgggagtttgaggcaaaagaattacttgaggccaggagtttgagaccagccagggtaacgtcacaagatcttttctctacaaaacatgtttttaaataataaaaaatgaattagccaggcgtagtgtggcatgcttgtcatcgtagatacctaggaggctgaggcaggagggtcgcttcaccccaggagttcaaagctgcgatgagctatgattatgccactgcactccagcctgggtgacaaagtgagaccttacctctaataacaaaaacagccataacaaattcataagaatagtgtaaaataaggagaaaccttggcagacaataacctaagagatatctcagacatagtgaactaatgtgtttggatgacagaagaaccccacacttggctggctgtggtgactcaggcctgtaatcccagcactttaggaggccaaggcgggcagatcacctgaggtcgggagttccagaccagcccggccaacatggaaaagccccgtctctactaaaaatgcaaaattagccgggcgtggtggcgcagcctgtaatcccagctactcgggaggttgagccaggagaatcactggaatccgggaggcggagtttgcggtaagctgagatggaacgagccacactccatgcaggaagacgaccagggaggacagctgcaaagcagggagaggctcccctttctttaagaaacaaaacaaaagcaaacaaacaactaacctgacctcccctctggctcccatccaacattcttactagcttctcatctagtcttttctgtagtgtagcccatccttaccctctcccctcccacatctctgattcctgaattcccttcttgggtctctctccttttcctgtcaaccacttctcccctctatcatcctgagttaattatcaagagctttatagcaggaagcctattggtatttttccagattttttttcttggaattggacattcatacattttctctctttttttgggggggtagggtggggtgggggtgggggtagggacagggtctcaccctggttgcccaggctgtggtctcaactcactgcaaccttcacctcctgactcaagcaatcttctcagctcagcatcccaagtagctgtgactatgggcacgcaccaccacaccctgctaatatcttgtatttttggtagacatggggtttccccatgttacccaggctggtcttgaatttctgagctcaagtgatccaccctcctcagcctcccaaagtcctggaattacaggcatgagccgctgtgcccagcctattttttctcttttacgagcctctctgattccctagttctgaagtagcccagagttggctgattctcctattttgcctcagctagcacttcctccttctcctttttttttttctccttctgatccctggagtcctctgcatttccactgaatccagtgaaccacacaagcatgctcatttattctccccaaactccaccactctgccttatgtgctgatccagtgagaatcaagaaggaagagagacccatggatttctgtgcagcctggaaagtcagttcatggctggacttggctgggacaccagacacctgtctccctgtctctatttagtattcatagggcccagcagctgcatcctcccagggtgcctgaagagtcactgaccatgctctcctacccagcctcaagaagccacccagtcctcgagaagtataatcagactcagcatcttatgtgaagggaacaaccatggggacaggttagacttgcattgagtcccctcctctaagaagggccagggaaaaggggctgttccccctaatctgtgtggctcaggaagtagagctccagagacttctctaccatggcctgaatccctctgctgctcaccctcctcagtctctgcacaggaggctggagatagaaaggcagggactggcactgggaggaccagggctctgccttgctcccccggctcaccgagccacttcccacaccctgtgtctctgtcctgactcttagggtcctgggcagtcagggctcacttggtggcctgcacagtttgtctgtgactaaaccagccaccatctcctgcactggaaacagcagcaataacgtccttggaattgtgtcctggtaccaacaatgaacaggaagtgtccttaaacctctgatctgtggatgtaaatatccacctgcagatccagaactgattcttgagtgatcagtctggcaaggaggccttcctgagcatatctgggctccaggctgaggacaaggctgatcactaacgttggatttggacagttctctggaggcccccacggtgctgcagtctgtggggaagtgagatgggaacatttcaggtctcctaggagcacgacccgacagcaccacctacaactgggaaaactgggctgtttaccatttgtgttcatgtttgcttgggctggtgctagccagggcccaggtctcaggtcagggacagtgatttagagaatgcagctttgtttcctcagagtcagccctcagagaaagcccatagcaacagcattgtcaaattgcctcaaaaaaaatcagaaagtccttggttcctggaacaggctgccctaggaacagagcccaatcggtcagagcaagcagggacacaactgtgcagaaaacaacaagttttacttagggagataacggttgactgtataaaatgagaaatatgtcacactactcacttgtaaaagtaagtttaccaatgctattcatttccctatatcactacgttgagtaaaaactctaaaatgtatgaaaccactgtagagataacttttgctgaattgctactttaacatgtcatggatcatttatttttcttgcaaaattctcattattcaccgtccttttgagtaacccccagctgcccttcaacctagctcctcagctgacctcttctccatgatgcctaccctgatggcacatgtgggcagttaggtttttctagattttaaaagttatatatgtacatgtctacatcccatggaccaagactcactctgggagtgagaaatcacaataatcatgcatagccttatggaattagtgtctagcaatcagaccatagaggtgtgaatagagacagtgactaatgagctgcagagatcagctgggccatcaggaggtaagtgtcctctaaccagcatgggatgctgggggactgccctatggtccctacacagctgctcagtaaggaccattcactcaaagaaatccaagactaggggctaagaccccgtgctcactgaggggtacttagcatctatgtcctcccatggcatggcagagtcccctgagcaggaaggtgtgtatggtttcagtaggtgctttcttccggagccctctcaaggggaaaagcaaaacttcttcctcctcagtctgcagtgtgagctgagcttcagccccagagcttagagaggggctgggcagtccctggatgaaaacacatttgcatgagcagcccctcctctgcagagtatgggaagaaaaggaggcctggggcagcccagtcccactgtgcatgtcaggctgtgtccaccatggcctggactcctcttcttctcttgctcctctctcactgcacaggtagggacaggcctcagagatcagggccagccacccaacctgattctggctcttctggtaaagatccctgaaaaacctcaccctgaaccctgcccatcaaccatgagtgtctgtgtttgcaggttccctctcccagcctgtgctgactcagccaccttcctcctccgcatctcctggagaatccgccagactcacctgcaccttgcccagtgacatcaatgttggtagctacaacatatactggtaccagcagaagccagggagccctcccaggtatctcctgtactactactcagactcagataagggccagggctctggagtccccagccgcttctctggatccaaagatgcttcagccaatacagggattttactcatctccgggctccagtctgaggatgaggctgactattactgtatgatttggccaagcaatgcttctcacagtgacacacacagatgggaaagtgggacaaaaacctcaccctgctttaggtcttgttcttaaaaaattttaaattttaaaataactggcctaggcacaaactacatttggaagtactttctagttgtaaaaggctcttctctcaatttcccatccattcgtctgaagtctcagtaaaacaaaacaaaaccaaagcaactgatgacactgaagtcttggctggttgtcatatgtgctaacaccactgcctgtggagctggacttttgttcttgaaagaagcaaaatgaggctttcctagctcacatcatggtcagagcctggggacatcctagcaggtgaacagtgccctgcagcatggactctgctcttccagcgtacgggcagagacctccccttccatccccagtagtctgttctcagggctgtctgtggctcactgtgtcccaggaacaaggcactcaaatatgaaatgctgcctgaggacacaggtcagggaattctagatatagtgctgacctggctcagtcctgggtacctgcatttcagtggcaatgtcaggagatggggttaggtattagggtaactggggacctgagaccagtaaacctctatgtaggacatgacaggagagtcaaggggaggctccactgtggctgagacaagccagaggctgctccttggccacgggggaagtaggtcccatggatgtgactttcctgcagctcatcccactcaggaccatggggactgctgagcgtgggtttcttgatccctcagcgcctgtgttctcttctcctctcttacaccattggagcttcttgctgaatcagggtctagtggtgagtatgtggaaagaccaccacatctcaaggtcacctttttctgcatggggagcagcagaaacattgggcattcccgtggaaatggctacggaggcctcccagaaagagcccccaagtttatgacctaggacagcagtgatggtccctcaggggtcccagcctgattctcctgctctgggtttatccacacagcctcctggagcacctcttggctccagcctgaggactggctggttatcagtgtcacacagctgcatcctgactccatgttaccaagggttcctgttccatgtggaaatgagagaaagatctgccccactcatcctgtctccccatccctcctttatccctgcctgtgaccaacaccagttcatgccaagacttcggctgtcacttgtgttactgaagcagagcacaagttcagtaaaaataatcccttttcttactggtctcccaatgcaaacagaatcaatttgtttctagaagcaaaaggagctgcccacacatggtgggtggggatgaggtagggacaagaaagaatccaccctgtgtgacccagaggcccagaagcctttagtctggttccaaaggtgtctcctcctcttggtgcagttatgctgaccatttcctgagctcagaaactgtgcgagagatgccaagaatgaagaatccagcctgtgtgacccagagacccaaacgtgagacaggaagtctgatgcttaagaaaacgtgggttcagcattctgaaaggtctagatatggcttggcctagagctggtgtagaagagaagcaagagagatgctcagccttaggtggcccaggcacagcggtcctgtcaaggggttgagctctctgcaacatggatatcctgcagagacatacttggggaggctgtgatcccagaatgacacaaaaatgctaatggaaatgagcaggggattgtttatgggggaatggggagacaggtgtgggataagatgtggtaaggagaatgcagcctgaagaggagactgtccattgtgactcataggaggagtagggccggggcctacagtagtgataaaaggaggacctggaaggacctgggccctgaagacacacagagactggagttttggtctgtctgtgagggtcccatgaggataaaaatccatggtcagtgtcctctgtccagggctcactgtcccagctgttgtccctcctggatcctctgggtgtccagattccgtagctgtggacctgttctcctctctgtcctcagcctaagagctgatggggcatccaccaggaagcacatctgtgggcagggagggggccatgggcagccttgtcctgtatgtgaggcactgctcagcctcggtgatccctgttcattaacgtgggaggaaaggaaaacaaaattcactgtgaacatctatgcatcatcaaagaaaaagcaatgagccaaacaggaagtgaagcccagctctaatagtttgtttctacttggaaataaataaaacttaatatgcctgatgtgttacgtaaatgcaataaacattttttgaaagctataaaaattatgtaaaggaacatggcttacactaaaaggaacacttaaaataatgacacccttgaaatgcaatcccaaaacacagcatacattttatttcagttccatatatggactggttttatttaaatgtctatattaaatctcactattccatttttaaatggagcacttaaaatctcattctacggcaactgcctggtgatacatttaccagtggaaatatcaacaaaaccatccagctgttttcctccatccccatagaattccccaaactagtaattattaagagcccaggatgtatcatgccagaattcatgcagtcgtaggcataacctgtttcatttttcattctgatcaacagaattacaatttttcttaagcttgtttttagcttattagattctagttgtcattacagatcaaagataaataattttctatcatccttaagccacccccataacactcactactgaatttgaaccataatttttccctaaaaatcctagttggggtgcttgatgttgagagctaccacgtatcaggctcacctgaggacagactctggttaaaccaagttaaaattttaattcttcccatcttcaaagactgagcatctttgctctttttgttcataagtgaaacactccaaagtcatttgccaggatcccctgcagatgagcatttagtgtacagactcctaggcaagatccctggtcacagtatccagatgactatgactgcaaatctggggaagtagagggagaacaaagatttaccaggaaaaccctctgggaattcctccccagggaatcctagaggaaagagctccctttctcctcagcgccacaggatccacagaggaaggagagctctagccaccaggaaggagccacatgagaggagaggacctggtgtccaacacaggtggggaggtgagtccatggggctggtccctgctatgggcttgatcctgacataggactttatgtagataccacctgagtcctctacaatgtacagccaaagagccatggaaagattcactcctgaggagtctgaagactcctcagtagagcgtgaagatagccctgaagtcacagggaggagacacagacaccacttggcctgccttggacctgagagagggggcagtggacagaatggggggaggaagccatgtatctgagaggttctggtcaccttatcatagaatggtttaccttgatctggacaccagagggcgcatggggatcattcctgagaagacaggggtgatcagagcagaaccagccgcctgccctgcctggtgtcctctgctcagggctcacagctgtgtcctccccaccccctgggaccacaaagctccacccctgccaccccctgacatcctcaagccaaggagcctgacccagggctcagggtggggtcacaaacctggggggggtctgatttgcatggatggactctccccctctcagagtatgaagaaagggagagatttgggggaagctcagcttcagctgcgggtagagaagacaggactcaggacaatctccagcatggcctggtcccctctcttcctcaccctcatcactcactgtgcaggtgacaggatggggaccaagagagaggccctgggaagcccatgcgaccctgctttctcctcttgtctccttttgtctcttgtcaatcaccatgtctgtgtctctctcacttccagggtcctgggcccagtctgtgctgactcagccaccctcggtgtctgaagcccccaggcagagggtcaccatctcctgttctggaagcagctccaacatcggaaataatgctgtaaactggtaccagcagctcccaggaaaggctcccaaactcctcatctattatgatgatctgctgccctcaggggtctctgaccgattctctggctccaagtctggcacctcagcctccctggccatcagtgggctccagtctgaggatgaggctgattattactgtgcagcatgggatgacagcctgaatggtcccacagtgctccaggcccagggggaacagagacaagaacccccttccttttctgccaggagggtgagccccggctgctgctgctcaggcctggcctgtggcttctgctgctgcagcttcccccatgggtccagggatatccagggccctgcctgagagtggaggctcctcctcccctgagtcctcagagtcaggaacagggtgtccagaaaacaaaagcagggtgtcctgctccctgtagcttgggacacagggtctctgcactgaagtcctgggctgaggtggcaggtccagctgtgtcatcacagacccacttctgttggggaacctgtgtctccatcatcctactttttccatttccaggagtttccagagtggtgtcttcctcccccttctcctcagtgtgaatccctgtgcttcctttctctccagcctattctttttttaataaaactcctttcatgtaggaataatgcacatataataagccacccatatttacaatagggaatgagacaaattttggcatttctatggatccttgaaaacatcaccaccaccgggagctatacaacatacaacctgtgaccaaccccaatagctcctcatgacccttgtcacctcattccctcccccaacaccctccttggaagttgcagatctgcctctgtcactactgtttggtttctcttttctggaatgtatcagtgttatcaaacattatcttcccatttgttcaggcttctttcactctgcacacttcttttgagattctcgctgttgttgctgcattgtacccatctcgtagagggctccttactatctttgaaggtccttaggccatttttttctgattttatttatgtatttattttaaagtttgaatttattgtgcatccaaatcaaactttaggggcaatgttcatctaaggtgacaggacagtctgtgatggcttgtcgggattcttgcttcttcatctcttgcttctgattctctctatagtggaagaggttctcgtctttcatttatttatatatttatttatttactgatttatttgggtttttaagggttttagtgatttttctctttttggttatttttcaatttttttattttaataggtttttgggggacaagtgttgctttgtcacataaataagttctttagtggtgatttctgagattttggtgcactcatcacccaagcagtgtacactgtacccaatgagtagtcttttattcttcacccccctcctaccctttctcctgagtccccaaagtccattgtatcattgttatgcctttgtgttctcatagcttatctcccactgatgagtgagaacatacaatgttttgttttccattcctgagttactgcacttagaataacagcatccagttccatccaggtcgctgtgaatgccattattttgttccttttatggctgggtaatattccatggtatgtgtatgtatacatcacatttgctttatccacctgttgatttatgggcagttgggctggttccatgcttttacaattgtgctgctataaacatgcgtgtgcaagtatcttttttgtataacgacttctttttctctgggtagatacctagtcgtgagattgctggatcaaagggtacatctatttttatttccttgaggaatctccacactgttttctgtagtgactgtactagtttaccttcccaccaccagtgtaaaagtgttttgttttcaccacatccatgccaacatctattattatttttattttttgattatggccatttttgtggtagtaaggtggtatcacatcgtggttttgacttgcatttccctgatcattagcgatgtcaaacatttttctatatgtcttttgtccatttgtatatcttcttttgaaaattgtttattcatgtctttagtccatcttttgatgggactgcttattttttttcataatttgtttgagttctttgtagactatagacattagtcatttgttggatgtatagattgtgaagatttgcttccactcggtgtgctgtctgttagctctgctgattcttttgctgtgcagaaggtttttagtttaattaagtcccatctatttatctttgttcttgttgcatttgcttttgggttcttggtcatgaagtatttgtctaaagtaatgtctagaagggtttttttaatgttatcttctagaatttttacagtttcaggccttaaatttaagtctttgattcatcttggcttgatttttgcataaggtgagagatgaagatccggttttattcctctacatttggcttgccaattatcccagcaccatttgttcaataggatgtcctttttccactttatgtttttgtttgctttgttaaagatcagttatttggctccatttctggattctctattctgttcctttggtctacgtgcccacttttgcaccagtaccttgcagttttagtgactgtgagtcaaattatgctagagtatagtttgaagttgggtgatgtgatgcctccagatttgttccttttgcttagtcttgctttggctatgcaggtcttttttggtttcatatgaattttaggattgttttttccagttctgtaatgaatgatggtgatattttgatgggaactgcattgaatttgtggattgcttttggcaccatgatcattttcaacatattgattctacccattcatgagcgggggatgtgtgacatgattttttcagcagtgttttgtagttttccttgtagaggtctttcacctccttggttgggtatattcctaggtgtatttttttgcagctatttgtaaaaaggtttgagttgttgatttgattctcagcttgttcactgttattgtataacagagctactgatttgtgtgccttacttctgtatcctgaaactttgctgtatttatttaccagttctttttttttttttttttttttttgagatggagtctcgctctgtcgcccaggctagagtgcagtggcgcaatctcagctcactgcaagctccgcctcctgggttcacaccattctcccaccttagcctcccgagtagctgggactacaggtgcctgccaccatgtccggctaattttttgtatttttagtagagacggggtttcaccgtgttagccaggatggtctcgatctcctgactttgtgatccgcctgcctcggcctcccaaagtgctgggattacaggcgtgagccaccgtgcctggccatttatttaccagttctaggagatttttggatgagtctttaaggttttctaggtatatgatcacattatctgccaacagcaacagtttcacttcctctttaccaatttggatgtcctggatttgtttctcttgtctgattgctctggcttagacttccagtactatgttgaatagaagtggtgaaagtgggcattcttgtcttgttccagttctcaggggaattgtttccaacttttttttcctttcagtataatgttgactatgggtttgaaagagtgggcttttcttaccataaggtatgtctcttctatgtcaattttgcaaaggcttttaaccatgaagtgatgctggattttgccaagtgctttttctgcatgcattgagataatcatgtgatttttgtttttaatgctttttatgtggtatatcacatttattgacttgcatatgttaaaccatccctgcatccctggtatgaaacccacttgaacatggtggactatgtttttgatagctgttggatttggttagctagtatttcatttattatttttgcatctatgttcatcagggatattgttctgtagttttcttgttttgttatgtccttccctcattttggtatgagggtgacactggctacaaagaataatttaggaagaatttcctctttctccttcctgtgaattagtgcattagtcagggttttctagatggacagaactaatggaatctgtatatatatagcatgatcacaacatcccacaataggctgtctgcaggctaaggagcaaggagagccagtccgagttccaaaactgaagaacttggagttccatgtttgagggcaggaagcatcaagcataggagaaagttgtaggctgggagcctaggcccatctctcttttcatatttttctgcctgcttattttctagccatgctgttagctgattagattgttcccacccagattaagggtgggcatggctttcccacccactgactcaaatgctaatctcctttggcagcaccctaacagacacacccaggatcaatcctttttatccttcaatccaatcaagttgacactcagtattactcatcacaagtccaccccttgtcaacttcaacccatatatatcttctgagatcatacataatcttcaaataaagacaataataaggtcataatgacacctaacataatacaactatcattcatacaaacagaaacacatcaatccccaacccaaatactgttacataaagttaacgatacttaaacgctgatgtgaagtcaataaatcttatgtcacatgataaaggagaaaggaaataacatgaagatattttcttaggacaaaggtatacacgcacaaacatgtttttaacaaaagaaggaggaaatactcatgacaattacactcctcgtttctgcagctggccatagctggtattgatgattactttcttctactatccattctgtattctgtattccctttgccttcagcaagcacctcagcaggtcgtggatatttttccagatggtgtgatccaaatcttcattcctgaagcatctggttcatttgtagtcctgcctggatagggctgttttagttttccatggaccttaatcacagggcatgataatactaagaaatgccctaatggatctcctgtattccatgcatactcttccttacctccgttatggagtagtaaactgatttcatcttgatagtctgtcccaaacaccccagccaacactgtaactcccttcttagcctgttgacttaaaggtaggaggagcccaaagtgtccaggtggcaatcttaacttccccagtttaatggaatcattgatgtgtctccaagtggcagtgttccttcctctggaactaaatcctctaagccagcagaacataatgtcgtgggaacaggaagcaaaaattttgctagtggatcactaggggtgatggtgagtgctgccacttccacttccaccccttgattcctagactcatgaatcctggctatgggagaaacagtgccatatattggatgctgactcagagcatacacgccttctggggaacttagccccagcactgcaaagtattgtcacctagttgacattgtaattgtgacttcaaaaggccattccattgttctatcaatccagctgcttcaggatgatgggaaacatggtaagaccagtgaattttatgagcatgagcccactgctgcacttctttatgaataaagtgagtgccctggcgagaacaatgctatgtggaataccaggatggtgaataaggcattccatgagtccacggaggatggtagtcttacaggcaaacccatatctggaataagtgtctatatcagtgaggacaaacctatgcccttctcataatggaagatttccaatataatcaaccttctaccagatagctggctgatcaccccaaggaatggtgccatatcaagggctcagtgttggtctttgctgctggcaaattgggcactcagcattagccatagctaggtcacccttggtgagtggagagccagttcgagttccaaaactgaagaacttggagtatgatgttcaagggcaggaagcatccagcacaggataaagatataggttgggagggtaggccagtctctcttttcacatttttctgtctgcttatactttagccatgctggcagctgattcgattgtgcccacacagattaagggtgggtctgcctttcccagcccacttactcaaatgttaatctctttcagcaacaccctgaaagacacacccaggatcaatactttgtatcctttaatccaatcaagttgacactcggtattaaccatcacaattaatgtcataggattagtactaattcttctttgaatgtctgatagaattcaactgtgaatctgtctggtcctggctttattttgttgattttttttaaattaccatttcaatcttgctgcttgttactggcctgttcagagtttctatatcttcctcatttaatttgggagggttgtatacattcagaaattgatccatctcctctgggctttctagtttatgtgcatagaggtaatcagagtagccttgaataatcttttatatttctgtggtatcagtattaatatcttctgtttcatttctatttgagcttatgtggatcttctcccttttcttggttaatcttgctaatggtctattaattttatttatcttttcaaagaaccagttttttgtttcatttgttttttgcattgctttttgtttcaattttatttagttctggtctaatcttcgttatttcttttcttctgctgggtttgggtttgccttgttcttgagtctccatttccatgaggtgtaaccttagattgtctatttgtgctctttcagactttgtgatgtatgtatttaatgctaaacattcctcatagcactgcttttgctgtatcccagaagttttgataggttgtattaagatttactacaactgcaaccttactattgaacaatagctttttaattcctgagagtgtgacctcatttatgcccaaaaacaactttatgattgcttttcatgcagtaggccatgattagagagggagtgcttgtggcctggaggtagggttctccaatttatcaaataaaaacattggagtgcagttaaatttgaattcggtaaaacaatgacaaagaattagtatgtgtatctcccacatgatattgttaaattgaaatacaaatttacctgggtgcgctgtagtttatctaccaactcctcacaggcttcgaggcttggaagaggcagtgttggggctggtctcctcttactgatgccaggtctatgagctgaacctcaaaggcagagtctctctaacacagctaccctccagtgagcatgttagttagcactaaatacaccatatacgatttccaatgaataacacctactcacttccctaattcttctttctattattctccaagtctgcagactcaggacctccccaggggttgctgcagccagagctctggatgagggacctcataagtctttcaaaaccagatgcaaggggactactcggtccccacacagtgaggtttaagccaggggtgcataagcaacatgtaagagacagaagagctcagtatggctcttatggctctccttctgtccagtgagaaaactccagggtccttttgatgctgaaggtgggtgggctgagagtaggaggagacccaccctgacagcccagagattccaggacaagacttggcagcctgaaaaggggccacactcttgagtggggaagaaggaggcaactctgctcacaggcgtgcatttctggtggcttcccctttaccaaactggactccctactctgatgtctatcagagaatctccctcagtgagaccaagatcccaggacattgctaaaaacagcagcatggaccagacaggtatgtcatggtacaggaattctttgcagagcaataaatacaactgcagcttaagaggggccctcatagtcataactttggtgaagaagaaaatagacaaaggcagggagaaactgaagggctcaataggtctgagactggggcagcactgggtgctataggcttgtccttgaggggctgcagataatgacagctgggaagccatcatctgttcactgctcactgggctcagcagctgtgtcctcacagggaaccagattcagccaacctggctttctccaccccacctgggaaatgtattccggtgactgtctggactgaggttctatgaaggggctaggagacaagaagagggagacaggctggtttgcataaagaaagcattgcacaccctttcctttcatctaaaactcattaatggaaactctggggccatccatagaagtctagctggtctcctaaatttgggagttatgaaggattcattcctgatcaatctacaggaagggccatcagcaggaggtggtcagagtgagggagaaactggcttccttgagagactcttcaacacaaccaccaactctggggcaaatggggtgacttgctataacagtcatcccaaactactcacaggaacctgagcctagtcccctcaccttattgcttctgattctggtccatgcctctgttttccctggaccccttgcccatgtctgagtccagagtggcagggatggttccatcccagtcaacatctacaaagaagtctacatctacagctactatgacttgaagcagagtccacagttgtacccaagagggcctcttcagctcccccaccccttcacacaggtgacctctactgtaggtctggttgagtggcccctggaccctggtgaacacaaggtatttattcctctctaacaccaggtatatagtggagcaggtctgggtgggtatagagcagagtgtctcttccaaatgtaatgcagtaagaccctggctacagaaaatcatttcacaaaactccacgccctttcatggtaaaaacacccaatgaactatgaatagaatgaaactacctcaacacagtaaagaccatctatgaaaatcccacagctagtgttggccgggctggtctccagctcctaacctcgagtgatccgccagcctcggcctcccgaggtgccgggattgcagacggagtctcgttcactcagtgctcaatgttgcccaggctggagtgcagtggcgtgatctcgtctagctacaacctccacctcccagccgcctgccttggcctcccaaagtgccgagagtacagcctctgcccggccgccaccccgtctgggaagtgaggagcgtctctgcctggccgcccatcgtctgggatgtgaggagcccctctgcccggctgcccagtctgggaagttaggagcgcctcttcccggccgccatcccatctaagaagtgaggagtgtctctgcccggcagcccatcgtctgagatgtgcagagcgcctctgccccaccgccccgtctgagatgtgaggagcgcctctgcccggccgcgaccccgtctgggaggtgaggagcgtctctgcccggccaccccgtctgagaagtgaggagcccctccgcccggcagccaccccttctgggaagtgaggagcatctccgcccagcagccgccccgtccgggagggaggtggggggccagcccccgcccagccagccgccccgtccgggagggaggtggggggtcagccccctgcccggccagccaccccgtccgggagggaggtgggggggcgcctctgcctggccgccccttctgggaagtgaggagcccctctgcctggccaccaccccgtctgggaggtgtacccaacagctcattgagaacgggccatgatgacaatggcggttttgtggaatagaaaagggggaaaggtggagaaaagatagagaaatcagattgttgctgtgtctgtgtagaaagtagacatgggagacttcattttgttgtgtactaagaaaaattcttctgccttgggatgctgttgatctatgaccttacccccaaccctgtgctctctgaaacatgtgctgtgtccactcagggttaaatggattaagggcagtgcaagatgtgctttgttaaacagatgcttgaaggcagcatgctcgttaagagtcatcaccactccctaatctcaagtacccagggacacaaacactgcggaaggccacagggtcctcggcctaggaaagccagagacctttgttcacttgtttatctgctgaccttccctccactattgtcctatgaccctgccaaatccccctctgcgagaaacacccaagaatgatcaataaaaaataaataaataaataaataaataacaaaaaaaaaaaaaaagaaaatcccacagctaacatcatatgcaatctgaaagaccaaagaggtttttgtaatatcaggaacaaagcaataatgcacactttcaccagttctattaaaagcagtattggaagacctggcaagagtaattaggcaagaaaaagaaataaacagaataaaaattagaaataaaaaataaaatctctgttttcagatgacataatgtcatatgtaaaatgcccttaaaagtcccacaaaaaattattagaatgattaaatgtattcagtaatgttttataatacataatcaccttgtaaaaacatctcatggctaggcatggtgactcatgcctgtaatcccagcactttgagaggttgaggtgggaggatttcttgggttcaagagttcaagaacagcctgggaaagaaagcaaggctctgtctctaagaaagcggtggggggtggggggaagagagaaagagagagaaagagagagaaaagaaagaaagaaaaagaaagagagagaaagaaagaaagaaaggaaagaaaaagaaagaaagaaagaaaatctgttataattctatacttaaataagcaaacaggaaacaactcaaaatgaaattaagaaaagaaatcaaattacaacatcattcgaaagagtaaaatacggctgggcacggtggctcatgcctgtaatcccagcattttgggaggttgatttgggggtatcacctgagattagaagttcaagagtagcctggtcaatatggtgaaaccctgtctctactaaaataaataaataaataaataaataaataaataaataaataaataaataaaatttaaaattagctaggtgtggtggcacatgtctgtaatcccacctgctcggggttgaggcacaagaatcactcgagtatggtaggcagaggttgcaatgagccaagatcctgccactgtactccagcctgggtaacagagtgagacaatgtctcaaataaacaaataaataaagataaacgagtaaaatacttaagaataatattaatcaaaatggtgaaagacttgtacattgaaaactataaaacattgcaaaaagaaattaatacacaaataaatggaaagaaatcctttgttcatttattggaaaactcaatattgttaagctaggcatacaaaccaaaaggaatctacagattcattgcattctctatcaaaattccaagttagtatggagatcattaaaaagtcaggaaacaaaagatgctagagaagatgtggagaaataggaatgcttttacactgttggtgggagtgtaaattagttcaaccattgtggaagacggtgtgatgattcctcaaggatctagaaccagatataccatttgacccagcaatcccattactgggtatatacccaaaggattataaatcattctactataaagacacatgcacatgtatgtttgttgcagcactagtcacaatagaaaagacttggaaccaacccaaatgcccatcaaggatagactggataaagaaaatggggcacatgtacaccacggaatactatgcagccataaaaagggatgggttcatgtcctttgcagggacatggctgaagctggaaaccatcattctcagcaaactaacacaggaacagaaaaccaaacactgcatgttctcacttataagtgggagttgaacaatgagaacacatggacacagggagggtaacatcacacaccggggcctcttggggatgggagctaggggagggatagcgttaggagaaatacctaatgtagatgatgggttgacaggtacagcaaatcaccatggcacgtgtatacctaggtaacaaacctgcacggtctgcacatatatcccagaacttaaagtatatattttttaaaaagtgcaagccaaacaaacaaacaaaaagaatagaaaaaaattaatcctaaaatttatatataatattgagagaatctaaatagtcaaaatcatcttgtaaaagaagaacagtgttggagatttcacaccgatttcaaaacatactacaaagctacactaatcaaagcagagtggtacatatagacagacatactgacaaataaaacagaactgagtgcctaaaaaaacctcttagttatacagtcaaataattttaaacaaagttgtcaagaccatttagtggaaaaggacagtctttttcacaaatactgttgagaaaactggatattcaccagcaatctggaaatggatgaaagacccaaatggaagagccaaaactgtcaaaatcttaaaagaaaacattagggagaaggttcataatatagggtttggaaatgacttcgttaatatgacaccaaaggcacagaaaaaaatagaaaaagaagaatatagataaattggattttatcaaattgtaaaacttatgggcatcaaaggacactatcaaccgagcaaacatttgaatcatagaataggaaagattgtcgcaaattttgcatctgataagagatgcagactatagaaagaactcctaccactcaagagtaactacaaaaatgaaaacaatctgaattatatgggcaaaaaacttgagttcgtattgagtagactccaaagaagatctacaaatgggcaataagcacatggaaagatgttcagcatcactaatcattaggccagtgaaaatcaaaccacaataatatacaactccacacccattaggatggcattaccaaaataatagaaaataacaagatctagcaaagacgtatagaaattataactgttatgcattgctggagggactataaaatgatgcacccattgtggaggtcttatggcatttccccaaaaaaattaaacgtagaattgccattttatcggaattttcagttctgggtatgtgcctcaaataattgaaagcaggatctcaaagagaaaattgtacacccttgttcatagcagcgtcgttcacaatagctaaaaggtggaggcagctcaagtgtcatctaatggataaacgggatacagtatacacacacaagggaatagtattcaaccttaaaaagaaagttctgctattctgaataatgccgcaataaacatacgtgtgcatgtgtctttatagcagcatgatttatagtcctttgggtatatacccagtaatgggatggctgggtcaaatggtatttctagttctagatccctgaggaattgccacactgacttccacaatggttgaactagtttacagtctcagtaaactattgcaagaacaaaaaaccaaatgccgcatattctcactcataggtgggaactgaacaatgagaacacatggacacaggaaggggaacatcacactctggggactgttgtggggtgggggtaggggatagggatagcattgggagatatacctaatgctagatgacgagttagtgggtgcagcgcaccagcatggcacatgtatacatatgtaactaacctgaacattgtgcacatgtaccttaaaacttaaagtataataataataaattaaaaaaaaaaaagttctgactcatgcgatggcattgatgaaccttaaagacatcacgccagcagaaataagctggcttcaaaaggacaaatattgtttgcttgcccttatatgaggtatctagagtagtcaaatccatacagacaagaagtagaatgaagttttccaggtgttaagttttggtttgggaagatgaaaaatttctggagataaatggtggtactgtggttgtacaacagtgttaatttacttaatgacactgaagtatacacttgaaaatggttaaaataatgaattttgcatttgaataatttaccactgtacaaaagaggaagatttatattcagtgtagtttctctaccaagaacaatcaaaacatacaggattgggagagtgtgcctgagtattaggacacccttccttttatgccagcctgcagcttcctaagaggccaatagagttggaagcgcctcattactggtgactcaaagtaatgtgagaaagtctgggagtgaccatgatgtaagtggtgggtgtctgacccagcccaggagcagccgcaaatgcagcagctgccaaaaagggggagatgaaactgatggcagcagtaacagcctctccagctggagtggggcatctgctcttgtgcaaaatggttcacagttgatacatttagcacagaatctcatcctgtctacctgtcatgatcaactacaatttttattgcaaagtatgccatcagagtggcatattttatccagcagcaagcaaacatgaaggaagtttcccttagtgctttggtcaaactggcatggcagtcctgaacactgaatgaatatccaaagacaaggttctccaaagataaagatattatactatttattgataaatactgggagtgcatgatgaccattcagacacctgggaaaatgacttggctgaataacattgttaaaacaatgagtaaaaaaagagatgtgctcttggtaaaggaacacctggatccagggtataaagaccggaaagaagactaccgcagatttggacttttggatcaggacttggtaacattgaccctgtttacgacaaccaaaaacaaagcagtgctgtgtctacagtgggaatctgagtcaggaaactgcagcaggaacagcagaaaaaaggaagaggagctcagtgcaaacagaaggatggggagaccacagggaccaccaagaaggcccagagtgactttttgttttccgctcagggctgtcctcctcacaccccttggatcacacatttaatgaagacggctactggtatagtctaacttagcctgatcctcacacggttggtcctcagaagcttgaaattaactgctgggcaggaaaacctattcctggagacctctacagtgactgcttctatgaacaggttttgttagatcaacatgattaagctccccagttagagatctccagtgactggctggctgactgtggttggaaagaaggtctactttatggtgcagacctctcatgggatacggaaagggtcctggtactttgaaatcaccatgaatgagatgccaccagacaccactgccagactgggttgatctcagccctaaggtaactatgaagctcccttaggttatgataaatttagttattattggcagagcaaaagggaatcaatttccaccagtccactggcgaacactactgttttagctatgggcagggagacatcctacgattttatattaatcttcctgaaaacccaagagacagccaagttaccaagataaggctttgataaagttcaacaattatttttattttgtggaaaaagactttgtggctaaagcagggaagagtctaaaacagattccatatagtaaaataatattttataaacatggtgtcaatcaagatgtggcttcaaaagatatttttagggggttacttttagccatctcactggacaagagcttcatagtttccattaactttggactgtgctccaagtatcctccaaagaatctcacttactgccctgtgagtgacatgggctgggatgctgtggtagagcacactctggctgatgtcttgtattttctggagacaaaagaggatgggggcacagtcctccatgggaaccctgaacaggtccttctttcttttcagatatggactttctggggaataatattgggtggcttttgttgttgttattgtttttgaactgtcttaaatgttctcccaaagatgctacagaacatagcctatccatttaccaagttaaaaggctgagtaggactgtgagagatgccctgctcatcatcattcttcttccacttccagtgactgctcttatattctttgccataagccaacaaccgctcatcccaagatctcataatccctctgtaaaactgatgctgtactacataccttgccagctgggacttgtaatcttactgtattttctaaggagtgaataatcttgtccaggtaactaacatatttaaagacattttcttctgtggacactgactccatgccacctgttttccaaagaagtggtgaagctgtttctgagaacacctaaaatcaatggttgtacattccaaaccaatctaaaagtgatttccttttgctgtgggtttggttctattactgatttggaaatatacctttgaacactgagatctctgaaactactagacttctagaagtgtaattgtataagaagtctgtttgcagctttaacaaaatgagaaactcttcccaaattaaagctttctttgaagttaaaaaaaaaagaataatgtgagattggaacctgtgaggtctgaggattcccaagagtactctcaattctgacgctaattgtaacctaagggctccccaacagcccttcacttcttatgattccctagaaaaactcacataactccctgaaacctgtgacatttattgatacaaatttttacagcaaaataatacagattaagataattcaagggaagaggcacatgggcagagttcaggagaattccaagcacaagcacccagttgtcctctcccagtggagaaatagacagtgcttcattttgctcacagcaatgtgtgattctgtgtatgaaacacctatttcctgggtgagccaaccaggaaagctcacccaagcttggtgtccagagggcttttaaggggtggtctgggtgagagtggggttattatgtagaccttgtggatcatcctcaaggctcacttcagtttccattgaattaacaataaaacttaaaccttcaatctttggttattttctttttaaaaattctctgaagtaaattattattaaaattctcacttaagacagctgtttatccaatatgaggctcaatataaacagtttcaaaaagtcagtaggtcattaaaacaatttcttcagtcattcaaaccattcagataaaaattaacaccatgtaatacaaaaattgaattatagtcacagggacaggatttcagcaatggcaagaaaaagtagtgcaaataggaatgagcaaagaatagacaagtaatgggtgtgaattggcctcggaaataccatggtaatgtcaaaaagataaatcaattgttattttgttaaataagtgaaaggccaggcattctcagtccaggaaagccatcacagggcagtctgagtcttctgcatcttaagaagctcaagaggttcaaacttaataaaccctgcacagttgctcactggttcatgtaaaatgctagagcagttgcttcctcccactcagcaaatccacagcacacagtcaccctggtctggcccttcacagtgtagatgccctcagggctaagaacctgagtggttctaaaagtagtaaagatttgcataaagtaccacacaacacaccctctccacatagggagctcagtaggacataaagagccatcagaatccagccccgactctggagccaggagtcccttctaatatcagcatcatggcctggactcctctccttctccttctccccatgtacctcctcacttgctgcccaggttaatagagatttcaaataccagcctttggagggattcctgtgtctccctttctaattcccaacatgtgtctgttttttgtttcagggtcaaattctcaggctgtgatgactcaggaaccctcactgactgtgtccccaggagggacagtcactctcacctatggctccagcactggagcagtcaatgggggtcattatccttactggttccagcagaagcttggccaagcccccaggacactgatttatcatgcaagcaacaaacactcctggacccctgcccagttctcaggctcagtccttgggagcaaagctgcccagacactcttgggtgtgcagcccgagaggtgaagctgagtactactgcttactgcaccatagtcgtgcttggcacagtgacagactcagaagaggaaccgagacataaacctctctaggcccttgtgatatgaagatcatatgatcacgcacaccagctctcaaggcagcctacatgtggaccagccatagaaaggggaaggaaaggatctgaattgattcctatccctgcttaagccctgaagtgaaggaaatgtgagaatgatctgggaagaactggatcaaaaaaaaaatcagaagtttattgctttgtattctaaaaggagcactaacagctggatcagatctaaaggctgaggctaaatgcatttcctccagaaagaagcatcttcaaagtatggggtttctgagctaagagtaaagagaagaaactctacttttgtatatttctaaagtttgttttattgagttactttcaaagcaatacatgcctattatgtggaatcagaaagtattaaaaatcaccaagttctctgcaaagctaccttatcccagataatcaatagaagtacatttcttcatttggatgcattctctcatttttgttgtcaatattttcacaatggttatcaaaccttgtgctcattcctctggttttatacagctttttgctctgtcatttaatgttaatgtaagtagttttccatttatttgaaagggtaaaatatttgagtagttgctaattttatttttatttgaataccaatgaaaaattataatttggggtaattcaaattgcttgtcagacaaagatgtgacattgggctattattaaaatgctcctggtcttctctgtggatttagtgaagtcaaacaaaatgcctgcaattttctatggaaagccttgagtacattatgcctgacttcacaatgcagaaaatagagaaacaagaatttcctgctcatgtttgctggagcataatagattcaggtacgaggaacaacttatattgaaaactacgtcaatgtctccatgcatgtgttagaacagtacttcccaaactctattgtgcatacaaattatctggggattttataaaatgcagattcttattcagtgggtctggagtgaggacacaatctctgcatttctcacatgtgcctgccacacaaaatccacatatatatttgaataataacaagtccagccagcagtggaggctcatatgtgtaatcttagcactttgggaagctgaggcaaaaagattactcgaagccaggagtttgaaaccagccaagagcaacatagcaagatattttctctatagttttttttaaataataaaaaatgaattagccaggcatagtgctgtatgcttgtagccctaagtactaaggaggctgaggcaggaggagagcttcagcccaggagttcaaacctgcagtgagctatgatcatgccactgcacttgagcctgggtaacagagtgagaccttgtctctaataataataagaaaaacgacaacatatccataagactagtatcaaataaggagaatccttggcaggcaagaacctaggagaaatctctgacatagggaatttaccagcttgcatgatagaagaaccccacactccatggagggagatgaccagggaggacagctgcaaagctaggaaaggctcccctttctttgagagcaaaaacaaaagcaaacaaacaacaaacctgaccttccctctggctcctgtccaacactcttactggctcctccttcagcctttcctataatgtggcccatccttaccctctccccttccacatctctgattcctgaattcccttctttgttctctttccctttgctaccacccacttctcccctctaatctcttgagttaattatcaagggctttataacaggaaactcattggcattttttctgcatctgtccttgaagttgacactcatacttttatctctttcttgaacctctcagatatgcttagaactgaagaagcccgaagttgattgattctgttttttcacctcagccagcaccttcttcttctcctttccaggagaatctgtatttctctgtatttccagaattctctgtatttccagtgaatctgtcagacacagtaagtactcttcaaaggtttaatttctgacttcattgttctttgttctcgagatgaacttccttgtcccttctcctaagctacctgctctgtaaacaacttctcccaccagtcccaatctgtaactcacatctcctccttatttagaaagagtcctcttttactccttgctacccattctgtaaactgcccctcccacaaaactacccttcccacatttgccatgccctgacatgcccaaacataccttgtaccataatggactgcctctcccttcccacctaattagccatactcaattttaaacagtagccaatcaggtcagtttagattgtgtggtccaactccagccaatggggacaggacacagaagcagggactaaccacgttagggatgaaaaccccttccctcctttgtttggtgtgctcttgcagtggtcagaagtgcaagcggcactcttctgtagaaataagtttgccttgctgagaaatattttgtctgagtgctcattttccttgcgactctgagctcttgtttctaacaaaatagggggtcatctgggattcccattctcctctgaggaagggcctctgatcacctcttaggaggagatgcatcccactgcttcattgcagtggcctcaggggtaaggaatcaggacccacccagcatgataaataaacccagactctcagcaacacaggaagaaaaggcctacagttaccgtggcgaccaggtaactgtgcacagacaaaggtaagaaaaaccactagggcagtgaagtacttccttagtggtcaggacattctgcaggttgaaaatgtgtgaatgagatgcacaattaagtgcaaagtgagtgtggagtaaagtaaagggtgcaagaaatctctagtaagagaggttgagccccagggaaatggtgcaagaaatctctagtaggagaggttgagccccacgcacactcagcagggaaaggagagcgagaaacctccagtagcggggattgagcctccagggaaaagggtgcaagaaatctttaatacgagagattgagcccccattaacctccaagacgggagtgcaagaaatctctaatatgagagatatgagcccccattaacttccaggatatgaaataccctagtaaaacaagaactacaaagggcaaaggagataacacaattccctctgatagccttctaggtctcatgttaaaatattggagggataatgaaaggactaaacacaagaaaaagcaacaaatgatcaaatatgggaattgttttatttggaccaaagaacctattctcaaaccttcagttttctggccaaggtttggatcaaatgagagttggatttgtcaacttttaatagagtatgtaaatgacaaaagtcctgcttcccaagaggaaatagactctgctgtgtcttggtggcaggggccggtcctcctctacccccttaaaactagtaaggataagccagaaactaattcccctgtaggaactaaggccccacccctgagcaatccatgtgggatcccttagaccatctgcctccaccagatacccctaacttctctcaagcagccacccagacccttcccctgctcacattatgccctccctccttataatcctgactgttagggctgtccccaacctgaacgccctcctgcaagaaggcttcaacgtgagatagagcaatgtaaaaaggatattcaaaacttccctttcccctcctcctcaaaagagtctgccccaatcgtttttcccttaagggaagtgtttctaggaggagagggagttggctttgtaaatgtccccttaactagttcagaggtcagaaacctgagggaagaacttaaaccactattagattatccttttggggtcgtggatcaaattgaccaatttgtaggatcacaagtatacacttaggctgagctaatgtccatcttaagtgttctctttccgggggaggaaagaaccatgatacagaaggctactatgatagcctgggagtgcaaatatcctcccagtcaaaatacccctgcagcagaacaaaaatttctggcccaaaacccccaatgggataataacaatgcagccaactgagaaaacatgaaagaccttagggaaaaggtagttaaagggattcaggaatcagtgcctcaaacccaaaatatttcctgagcatttaatatacagcagggaaaagaccagggagccatggagtttttaaacagactcaaggaacagatgagaaaataggcaggcttaaacataaaggatccccttaggcagggatgttaaaactccattttgttactaatagttggccagatatcatgaagaaattacagaaaatagagacctggaaatatcggcctatagagggaacaagagggcagggagaggagagagaaagactgacagagggaacggagggagccagggagagagggggggagatacaaaggcagaaagagagagagggagggagagacagagaggcagatagatggagaggcagagagacagtgaggaaaagtcagagacccagacagagagggagagaaagagaggcagagggagagaaagaggacgaaacaaatgtttcaaatgtgaaaaaataggtcacttcaaaagagaatgtcctgaatgggaaaaagaaacaaaagtcatatataaaagcagatcagctaatattaaatttctgttaattccagaggcaggaacatatctattagggagagatttaatgctaaaatttggcttaggcctttatattaatcagggaaaatttctcatctccttaaacctactcaccaccacggatgaagagcgtatccatcctgacacatggtcaaaagaagaaaattgggggaaattacagttcctccaatcaagcccaaattaaaaactcctggggaggtagtaaaaaaccaaaatctttcttttgaaagctgagggaataacctcacagaccaaatagccaaacaagctgccatttcctctgaaacgcccatgtttcacctcaccccttgcctttctcccccaaccgccattgccatcttctcccctgctgaaaaggagaaattaataagaataggaaccaaggaaaactcagaagggaaatgggtgttaccagatcaaagagaaatgctatccaaacctctcatgagggaggttttatctcagctgcatcaaggaacccactggagacctcaagctatgtgtgatgcagttcttagagactatggatgtataggaatttatactctagcaaaacaagctacagatagttgtttaatatgcaaaaaaactaataagcaaaccctaagaaaaccatcctttggaggaagaaacccaggaaattaaggccattccaaagcatccagatagattacaccaaaatggcctcaataggtcacctaaagtatctaccagtaatagtggatcaccttactcgctgggtagaagctattcccttttcaagtgtagccaccagtaatgtagtttagacattaactgaaaatattatacctaggtttggattaatagaaaatattgattcagataatggaaactatttccctgcacatgtcattaaaaagctagcccaagtattacaaataagatgggaataccatatccctggcacccacctttatcagaaagagtagaaagaatgaaccaaatcctaaaaagccacctaatcaaactagttttagagactcgactaccttcctattgcctaattgagggtccgaactgcccctcggaaagatattggcttatctccttaagaaatgctatacgggttgccttatttacactccactgctgacattcctacatttgaaactaaagatcaatttctcaagaactatataattggtctgtcttccactttctcttccctcagaactaaagaccttttagcactgacaccacccttggagctcccagcacatcagcatcagcctgggatcacattctcatcaaaagctggaaagaaggaaaactcgaaccggcttgggaaggacactatctagtgcttctaactacagaaattgctgtccgcacagctgaaaggggatggacaccccacacacaagtgaaaggagtgattttcacagcgagagaaaaatgggccgtcaccccagggcccacccgcaccaaattaaaaagggctgaataatcatttgtttattttcccttttctttccaacagaaagtcacctcatcatcagtgtgcctcaaactaatcgtcccttaaccctccagttcgatgcttgttcagtcacctcatgtagagatgaacgagctcaaaggcagctatcaaatgtagataagtatctgtgtccgtaccgtagtgagtcaaccaagtataagtatagagccttaaaaagtccctgtggtgactggacagatgtttggtggaccacccaatatggagggtggacagccaggccccctttttcaaacaattctgaggactgaaacagaaactccaacttattcgtggtaccaccccaccaaattgtaagtcattgcagtgtaaccccttattgctaattatagataatccccaaacaatgacccaagaaccctccatattcgaatgatatgggttaggagcagatgttacaggacaggaccccataggaatcttctttctgaggttggctagaccatcagttaaaaacaataaagaaatccagacccagagtccagggaacctatgggagccaatgctctccccaaacatatcaggctcagcattctcttctcatctccagaatgacccaactaaggtaatggttgtggaggtaaaagatttaaagcagactacagctctagagacagggtacaaagacgcaaatgcctggctggaatggattaaatctcctgtccacactctaaacaaaagcaattgttacacttgtgcacatggcaggccagaggccctgattgtcccctttccacttggaaggtcctccagccaaccaggcatgaactgtatggtagctgtcttccaacaccccacagcctggggtaatgaattatgctgaactctctctctgctatttcctgaagtccagcaccctgtgggtcagcccctgagggccatccagcttctgtctcctgatgcaagtttcaccccatgtctctcacgacaaggggaaaacttagcatttcttggagacctaaagggatgcagtgagcttaagccattccaagagctgatcaatcagtctgccctgatccatccctgagcagatgtatggtggtattgctgcggaccattactagacacttccaagtaactggagtggcacttgcactctgatctaattggccatccctttcactctgacattttgtcaaccaaaaaggataaagacaaagcatcataaaacaaaagatgctcctcatgggtcctttgactctcatgcttatatagatgtcattggagtccagagaggagtgccagatgaatctaagccccaaaatcagatagttgcagggtttgagtccatactattctggtggttgactgtaaataaaaatgtatattggataaattacatctattacaaccagcaaggatttgttaactatactagagatgctattaaaaggatagctaaacagttaggacccaccagccaaatggtttgggaaaatagaatagcattagacatgatactagcagagaaaggtggagtctgtgttatgagtggaactcaatgttgtacttttatacctagtaatactgctcctgatggaaccataacaaaagcattacaaggtcttactgctttatccaatgaagtagctaaaaattcaggaataaacgatcccttcactaatttaatggagaaatggttcagcaaatggaaaagacttatgtcctcaatctttacttctcttgacattgtaataggtttgcttattcttgtagaatgttgtatcataccctgcacctgaggcctactacaaaggcttattgaaacaactctcactaaaacctttttcaaatccaccgcccccccaccttattcagataagctcctacttttagaaaaccaagcagaacaacagagtcaaggcatgttaaaaaggtttgaagaggaagaattataaaaatcaaaagggggaaactgtcagatacagtaagttcctcttaaaaggcttaatttctgaattccttgttctttcttcctgagatcaacttccttgtcccttctcctaagctacctgctctgtaaacaacttctcccaccagtcccaatctgtaactcacatctcttccttatttggaaagagtcctcttttactcctggctacccattctgtaaactaaccctcccacgaaactacccttcccgcctttgccacaccctgacttgcccaaacgtaccttgtaccataacagacagcctctcccttcccacctaattagccatattcaattttaaatagtagccaatcgggtcagtgtagattgtgcagtacaactccagccaatggggacaggacacagaagcagggactaaccacattagggatgaaaaccccttccctccttcatttggtgtgctctcgcagcagccagaggtgtgagtggcacccttctgcagaagtaaatttgccttgccgagaaatcctgtttgagtgctcattttccttgtgactctgagctcttgtttctaacaaatccagtgaaccacacaaatatactagccaattttctccaatccccaccattctgccttatgtgctgatctagtgaggaatcaaataggaagagagacccatggatttctatgcagcctgggaagtgagttcatggatgcactcagttgtaacaccagacacctgtctgccgtttgctgtttagcattcacagggcccagcagctgtgtcctcccagggtgcctggagcatcactgaccacaccctcctacctcccacccacctactcctcaaaaagaaaaatcagactcggcatcttatgtgaggggcacagccaggggtcaggatagatttccactgagtcccctcccctaagagacaccagggaagaggggttgttccgcctaatctatgtggctcaggaagcagagcactacagacatctctaccatggcctggaccctctcttcctcaccctcctgagtctctgcaaaggtggctgtgacatgactctgatgactggagaaacaccagggtcctttgtctcacactgagaaaattagtgacatggacacacattgagtggttttaaggaacagaaagtttaataggcaagaaagaagaaaacagctcccccatacagagggaggagggatcctaatggaaaatcccacatgcaatggaaaacagctgattatattgggaggctggaggaggcagtgtctgatttgcaaagggcccaggggattggtttgaccaggtgtgacattcatgcagcctgtaaaaaaaactggccctcccaccttagccttttaatatgcaaatgcaggtcaccatgatgtcctgcacatgtggcttttatctggaggctgccatgacacctggcacacgtggtgacaaaaagaggagggcgaaagccaccatattgggtggacctggcttctagccaccagcatttgcatatcagtgcttgccagtctggtttttcaagctgctttctgttagcaaagaaatggtttgggggtcgctttttattaaaggaaaattccaccgagaacttacaccatttctagctgcctaaaaattatttcttaatgactcctgttatttcccccctcaggagaagtaaacctaactgtcgttaggggatgttggacaacaattctttctggctacttccttctggaaaggggcgtcatgtaaggggacagcagttgggcctcctcctgaggttgatctaaggattctctgaagaatggcatgtccatgtgtggctctgtctgcagcattatttggagtttgattgcttctaggtgaaaagagataaatcttacaagaaggtttaaaatatagggttagaatatgagtattaagattaccactgttagtgggggtactatagaccacaactatgacagcagagtttgatacttgttagttacaccagtggattgtaatactgggttgtctccactagatgtcactgaatattaccagaaagattaatatgaaagtgacatttttccttgagaaaaccatacatttccccctttacttgccattagtgaatagttttaggcttagaccatttttataacttgcaatataattgggagaaatacattattgggtggctaaattaactttagtgttaatcttgacaattccttttctttaattattaaattatttcatgactttcacagaccctcttacaacatactcaaactttccgacttgtcctaaacatccttcctttaaataaccagtcatttgcttttaggacaagaatttcccacacaagatcttttcttatataaagttccttcttttataaccttctttctatagcttagagtgcaccatacaaccagtcttcaataaaaagtcctatcaaacttaatgatagtaaaactttcatgctatatccataactattactcctgctataagcaaaacagccttgactaaatctttcctgcaattgttaatcctgttataaggatgataattagacaagatgttacagcaattagaattttacaaccagaattccacattgtgagtgccatagtgtatagttctattgcaaatagtagtgtgactgtaacaattcccacaagactggcatagtaaataatttccattgaaaactttacttgccaagatataacatttccctttgggaatctacaaggttacaaatgcaattctatgaataatcaaaatctccctgcgaatatgcattaaaaagaagttctaatatttggtggcaaatttttagaggaaggggtacaaataataaaaagtggccgggcatggtggctcacacctgcaatcccagcgccttgggaggctgaggtgggcagatcacgaggtcaagagactgagaccatcctggccaacatggtgaaaccccatccctactaaaaatacaaaaaaattttgggaggctgagacaggtggattatgaggtcaggagatcgagaccgcctgtagtcccagctgctcgggaggatgaggcaggaaaatggcatgaacctgggaggcagagcttgcagtgagctgagatcgcgccactgcactccagcctgggcgacagagcaagcctccatctcaaaaaaaaaaaataaaataaatagctgggtgtggtggtgcatgcctgtaatcccagctactagggaggatgaggcagaagaatcacttgaacccgggaggcagaagttgcagtgagctgagatcatgccattgtactccagcctggtgacagagcaagactctgtctcaaaaataataaataaataaaaagcatctggtgaggtaggagtgggactgagtaggatgagtagccctcactcagttacttatcttttatgattttcagcttaagatcttctatttctccactttgatattcaggacgttcctctgggctgtcaggggttgctccctcaggcattcaggctttgacttgagtgtgatgtattcagaagttgacacctgtaacttttgctgccaagggggttgaaagagaacagtgtagggcccttcgcagcttggcttagggaaggagagagaggtgagagttttcactagtaccaaatttcctgggttaaataaaggtggttctatttcctggggctgggcttctgccagttgtgtcaatttctgttggaagtgaggtagagaggttacatgcttaaccaatttataggttttctgcctgaaaacagtctctgagcacattgacaaattttatcctttcctaagtgaaaagcttggtgaaggattttaagaactttccattggctggaggctggcaaatggagtttgccatcctctggctgtagccatcctgagagataaaaagcatacccttgagaagtggcctattctgtttctgcaggaaaatactgaggtttaatttctgttatggagcattcctagattagaagggggcttgaagtgtgttaatgccttgaggcttccttgcctttgacttagctgcctgattaatctatttcctttggctactttatttgctgccttttggtgttcctataatgtatccctgctatttctcacggcataaaaagtgaagataatagcctgctaattttctggtgatattttacaggaaatccattagtggtaagaggatgtctttccttttaaatggcagcatgagtatggagagctaagaaagcatacttggagtccgtgtaaatgttggctacctttcccttgcttaattgaagtgttctcgtaagagctattagttcagctaattaagtgcttgtgtctggggagagatgttgtttagagtgactactgcttatcctgccttatgtatttcttgctttaccggctgttagttaaaagcgccccctaaaggacagtaatcctgccacattacgtggggtgtaaacagttaagttctttcccaggattaatttggaggcttttctaactgtaaagctatcatgacaatggcttggaagcatgtgtaaataggtcctcctaactgcaactaaggttgagaaaaatattgtactagagtttttcctgagatgttccttatggtgatgctatgagaagaggggaggcctggattagagagaagaaaagagagagattggctttagtatttagaaggacatctactttccttcaatttccagaatcacccaggtcctggcaccctgttaaatgtgccacccatgtttgcaagcgtgaccctccaagccatggcaccagaggaactaagcttgtgggcctagtcgtgctaccccaagcagctctagtcctctgcctatgatttccctttgacttcctagacttgtgtgatctgtgtgtctcaccccacccccacccccaaaaaaatagatcttggcagaaactatatggaaggaaaggctcctttaatggagggaatgtgctagattgcctgctattatggcctgtgctaaagcatttacccttagaaaaatggttccagttaacttccagacttaaaatctccttactaattaagtactgttttaatcggagagagaacaggtgtcttaaaggaacgcggggacctaatggcgactttcctgctaatgggacagtatcggggcacaaattcggctgcagaggaattttactcctaatagttaaaagcagaattttcccgttcacaggagcagcataaatcctggtttccagtagaaaggtgcaaaaagaaaaaaattgagaagctgcggtgtaccgcggagatcagcaatgtgtcgcataaagaggattttatttccactaggtggcgctgttggcctagaaataccatgtgctcaccagaggaattttagggagtaacctcactgaggggcaaaggaagacttctgttcctagaagattgcaatggcattttcctgagctatctccccagttactacagcattttctgatcttgcctaccaggattacttccctacgctgtaaaaattcccgcacatttgacacacagagagagtaagagacataacgaccacggataaaaaaggaagaaggttctgcgacaggatagctagggatcctttaccaacatccagagcaggccgttggaggctgggtccagtcccgaaacctttgaataacaccaggctgtgccctggccagaaattctcagttgcttcagaacttttcccagcctcacgcgatggctaagtttccccatgaaaagaaactgatttgaagcatgaccaacattcccaaagacccgtgagtattgcgggttctccgtgttctgaccagcaagcctaacactcaagtctttagaacaacagccatgataagcgtatttagacggccaatggatgcccataattgatttgattttgattttaaaatagagaccaagaacctctgaatgacagaacagactttgagttcactcctctaatcactacgtcgatgaatgttgtaccttggattcccagtgaaggcaccagaaaggatacggctctgatgactggagaaacaccagggtcttttgtctcattctgagaaaattagcaacatggatggacatatgtggagtggttttaaggagtggaaagtttaacaggcaagagagaagaaaaacagctcccccatagagagggagaagggctccgaacggaaaaccctacatgtggtggacagcagctggttatattgggaggctggaggaggcagtgtctgatttgcacagggcccagggaatgagtttgaccaggtgtgtcattcacgcagcctgtaaaaaaactggccctcccaccctagccttttaatatgaaaattcaggttgccatgatgtcctgcacatgtggcttttatgtggaagctgccgtgacacctggcacatgtggtgacaaggagaagagggcgaaagccaccatattgggtggacctggcttctagccaccagcatttgcgtatcaatgcttgccagtctggtttttcaagccgctttctgttagcaaagaaatggtttgggggtcgctttttattaaaagaaaattccaccaagaactttcaccctttcttgctgcctaaaaattatttattaataactcctgtagtagctggagacaaggaggcagggatggcactgggaggaccagggctcttccttgctcccctggcttactgagccacctccctcaccctgtgtctctctcctgactctcagggtcctgggcagtcagaactcacttggtaacctgcacagtctgtctgtggctaaaccagtcaccatctcctgcactggaagcagcagcaataagggtcttgggattgtgtcctggtaccaacaatgaacaggaagtgtccccaaacctctgatccatagaagccaatatacacttttagggatgtaggactgattctcaagctatcagttttccaaaaaggccttcctgagcatctctgggctccaggatgagaacaaggctgatcactaatgttggcattagtgatcatgtttgtgatttgctataaaatcatccagcgatggagtaagatgatgggtaaaaagggttgaaagattaaacaagatgagtcacactgatgatgtcaaagctagctgatgggtgccaaggattcattagacaactctcagcatatttatataactcaaaaatttccataataatcactgcctaaaaaaatccatgtctgtgatgagaggtatatgtcctgcttttaattggtatgtaacctgattttaacaatgtggtatataatctgcttttaacaacgtggacaaaatgtaagcttacattctgacttcaagttgaagcccatcttctcctaacaggcaaaggaggagctggggtggaggctatgaaagggaccggagctcagcgtttcccaggacaaagaagtgagtgaggccggagtcccagcagaaggacgaggggctgtgagatgggctatgggagtgtgcaggggccacaacgtgcaggtcatgctgctggggccacaggattcaggttttatataaacaacaaggagccactgaaggtgtttaagccagggagtgacatgccacatctgaatgagaagcatctctctgaattccttgaggagacagtgtctgaaggaagtgagtgacctgattctagattatttactaaagcaccttgtaagtctagaaatccaggggccatttacaattagcacaagtgtagatgtgggctacattgaagaagtgatggtctcttgtcattcttcacagaactagaaaaaacaatcctaaaattcatatggaaccaaaaaagagcccacatagccaaagcaagactaagcaaaaagaacaaatctggaggcatcacactacctgatttcaaactatactataaggtcatagtcactaaaacagcatgacactggtataaaaataggcacatagaccaatggaagagaacagagaatccagaaataaacccaaatacttacagccaagtgatatccaacaaagcaaacaaaaatatagagtgggaaaatgacaccctattcaacaaatggcgctgggataattggcaagctagatgtaggagaatgaaactggatcctcatctctcaccttatacaaaaatcaactcaagatggatcaaggacttaaatataaaatctgaaactataaaacttatagaaaataacatcagaaaaactcttctagacattggcttaggcaaggatttcatgaccaagaacccaaaagcatatgcaacaaaaacaaagttcaataggtggaacttaattaaactaaagagctaaagaaaaaaaagagcttaattaaactaaagagctaaagaactaaagaaatcaaaataatcacttatagaatgatgaaatcggtgtctgggaatcagaacatggatgtgtgaatacagacagtgactggtgagctgcatggcaaaaggaacatcagcagagtaaacagacaacctacagagtggggaaaattcttcacattctatacatctgacaaaggactgatatatccagaatctacaaagaactcaaacaaactagaaagaaaaaaaaaactcatcaaaaagtgggctaaaggcatgagtagataattctcaaaagatgatatacaaatggccaagaaacatatgaaaaaatgctcaacatcactaatgatcagggaaattcaaatcaaaaccacaatgagataccaccttaccacctgcaagaatggccataattaacatataatagatgatggcatagatgcagtgaaaaaggaacacctctacactgctggtgggaatgtaaactagtacaaccactgtggaaagcagtgtggagatttttttaagatctaaacatagaactaccatttgatccagcaatcccactactgggtatctacccagaggaaaagaagtcattatacaaaaaagatatttgcacacacgtttatagcagcacaattcacaactgcaaaaatgtggaagcaaccaaaatgcccacaactcaatgagtgaataaagaaacaatatatatatgatgatatactactcagccattaaaaggaatgaattaatggcattagtagcaacctggatgggattggagacttattctaaatgaagtaactcaagaatgggaaaacattgcatgttctcactcagaagtgggagctggccaggagtggtggctcaagcctgtaatcccagcactttgggaggccgaggcgggtggatcacaaggtcaggagatcaagaccatcctggctagtgtagtgaaaccctgtctctactaaaaacacaaaaaaattagctggccatggtggtgggtgcctgtagtcccagctactcaggaggctgaggcaggagaatggtgtgaacctgggaggtggagctttcagtgggctgatatcatgccattgcactgcagcctgggtgacagagtgagactccatctaaaaaaaaaaaaagaagtaggagctaagctatgagaatgcaaaggcagaagtgttacgggaagtcagggaccccaaagggagggaccggctgaagccatggcagaagaacataaatcgtgaagatttcatggacattcattagttccccaaattaatacttttataatttcttacgcctgtctttactgcagtctctgaacataaactgtgaagatttcatggacatttatcacttccccaatcaatactcttgtgatttcctatgcctgtctttactttaatctcttaatcccatcatctttgtaagctgaggatgtgtgttgcctcaggaccctgtgatgattgtgttaactgcaaaaattgtttaaacaacactaaatctgggcaccttgaaaaaagaacaggataacagtgatgttcagggacaagggagataaccattaggtctggctgcctgagagccatgtggaacagagccatacttctcttctttcaaaagcaaataggagaaatatcgctgaattatttttctcagcaaggaacagccctgagaaagagaatgtgttcctaggggtaggtctctgaaatgaccgctctaggaatgtctgtcttttacagttgtagataagggatgaaataagccctggtctcctgcagcgctcccaggcttattaggatgaggaaattcccgcctaataaattttggtcagactagttgtcttttctcaaaccctgtctcctgataagatgttatcaatgacaatgcgtgcccgaaacttcattagcaattttaatttcactccggtcctgtgatctcgccctgcctccatttgccttgtaatattttattaccttgcgaagcatgtgacctctgtgacccacaccctattcatacactccctcccctttgaaaatcactaataaaaacttgctggttttgcagcttggggggcatcatggaacctgccgacatgtgatgtctcccccagacacccaactttaaaatttctctccttccctttatttctcagaccggccaacacttagggaaaatagaaaagaacccacactgaattatcgggggcgggttcccctgataagaagaatgacacaatggactttggggactcaggaggaaagggtgggaaggagggaaagtggtaaaaactataaattgggtacaatgtatactgctcgggtgatgggttcagcaaaagctcacaaatcaccactaaagaacatactcatgtaaccaaatatcacctgttgatattactcctatcaacattactcctacctgtgtctgtgtatctttgtcatgtgacttatcccccttgactttgtgcttggccctgttctcactttgagtaatggaacatttgtggaccttatgcaagctcaagtttaaatgtccttgcaccacttggtttgccctcttttgcaactctcattactaagatcttgtcctggatagtttttggcccttcaggctgggtttccaaataaacacgtgtgagtaataaatgctgatatttgtgactgttacatagcaatatatgaatgatacatctaacataaagcagacactggatattggtgtggtgagtgaaaacactcaggcttgtatgtatgtagattcctctcccacagagggcagtcatcaatattaccaactcaactaagaggatgattcttatttggtgcagtttctctaattccaagagcagtggagaagtctaataccagggcagtgagcacgaccatctgaacaactcttccttttatgctggccctgacgcatcctaacaggccaagaaacttggaagtgcctccctggaggcagctgggagagtgatgacagatcgggctacgtgggtgatttatttatattcttctattgtctaagatggatatgtttatttaaaattggaaataactgctataattaaagcattgaataaaactaaaattaagaattaaaaatttatatattctccaacatcctatcagtcaaagaaaattacaggtgggtattaaattgtcagataaaagaagaactttcagagcaaaggaaagaaatgaatatttataatctccaagcattgcatgtatattttctctaattctaccatttggctacattttaaggtgccctaaaatttgctttttttttttaaattttctttcgctttccaattctatctcattatcacccatgaagtcccatctttatttttttaacaacaaaatattaggagaaaattaatcatcatttaatccatttatttttatttatttatttttgagatggggtcttgctctgtcatccaggctggagtgcaatggcacaatcacggctcactgcagcctctgcctctggagctcaagtgatcctcccacctcagccttccaggtagctgggactataggtgtgcgccaccacacctggctgagtttttaaaatttgtatagagatggggtctcactgtgttgctgaggccggtctcaaactcctaggctcaagcaatcctcccacctgaacctcctaatgtgctgggattataggtgggagcaataatcatttaatctaaaattctctcagatgagtaggtatgggaaaatttttaaaaaaataataatattaaaataataatataatctaaaacctttttttcacaaatatatctcaggcccaaattttcatccgtccatccatacattcatcaattcattcactcaaccatcaaacatttatttatttatttttttgagacagagtctccctccattgcccaggctggagtgcattggctcgatctccactcactgtagcctccgcctcccaggttcaagtgattctcctgcctcagcctcccaagtaactgggactacaggtgcaagctaccacacttggctaattttttgtatttttagtagagatggggtttcaccatgttagccaggatggtgtcgatctcctgacctcgtgatctgcccacctctgcctcccaaagcgctgggattacaggcatgagccaccacacccagcccatgaaacatttattaagggcccattctgggtgacatattatgttaggttggactgtgagggtataaatacaggacaaatgagaagggttccttctgtcaaggagaacacactcgaagatactagaaataaaatagaaacttctacgctaattactaatacagagaattaccagatttttgaaagctcaactaataaagcaaccacccttttctggatatatcaagaaagtgtctgccttggatgtgggatcttagaaaaagaagagtaagtatggaggaaatgaggtcatctccaacagagggactgtgtgatagtatggactgcatatttctgtctcccccaaaattcttagattgaaaccctaaccccccatgtgatagtatttggaggtagagcctttgtgaaataattaggtttagaagaggacatgagagtggagccctcatgataggattagtgtccttaaaagaagaaaaagagactagatctttctgccatgccaggctacagagaaaggtgccatctacaaaccagaaagtggaccctcgccaagaaccaaatctgcaggcaccttgatcttagacttcccagcctccagagctatgagaaataaaggtttgttgtttaagccatccagtctttgctattttttttatggcagcctgaactaagacagcctggcaaacacaggaaaggaagctataaaagggcacaatgggctgggtgcagtggctcacgaatgtaatctcagcactttaggaggccgaggcaggtagatcacttgaggccaaggagttcgaaaccagcctggccaacatggtgaaactccatctctacagaaaatacaaaaattagccaggtgtggtggtgggagcctataatcccagctactcaggaggctgaggcagaagaatcactttagcccaggaggtggaggttgcagtgagccgagattgctccactgcacaccagcctgggcgacagattgagactccgtctccaaaaataaaaggcaccaatgactgtgtgttgagtgaccaattgtgttgagccatagaggaaagatgtaggcaccagtgacttgtccaggatcagggatgacacacttctttttcttgatagctattctgtcctctcccagacattttttttttttttttaacactgctgtcgcccaggcaggagtgcagacatggctcattgcagcctgaacctcctgggctcaaatctcccacctcaggctcccaagtagctgggaccacaggcatgtgccactatgcttggctattttttttttttatgtttcgtatagatagggtctcgctatgttacccaggctggtcctgaactcctggcctcaaatgatcctcctgccttggcctcccaaagtgctgagattgcaggcatgagccgcctcacctggcccctctcccaaactttcttttgaggttaaataatgtaaaaaggaagagtgtgtagaacaaaagtaatagctaatgtaaaaaaaaaagtttaaaacaaaaattatccatatctcactacttagagataaccattatatatattttgacaacaaatacccttctggatttctgcatttgctctgtcagatgttagttgaggtgggacagggaaaggggttaagggaggaggcaaggaaagaagggtcagaatgcaatttatcttacgaggcgttttcccatttagtaatacataatcaacatctctgcatgttttcaagtatataaagctccttagatcattacttattcatagtattacagggattctatgttttctctattataaactacatgttgttgaacttctttcaaactacatctattcatacagcaagtcatttactttgtaaaaattcctaaacttaaatatctggttcaacacaagtatgcaaaattttgtacagattttatttaccatagaactatggctacaaattaaatgaaaataatagtaataaattataataatataggagtcacctcacagatgtttccagtcacaaagtaaggcttttcctgctttgtacttaagttgaaatccccccaaagtgcataaaggcggatacatcctttctagggtacccttttcaccctgtagatgaaccctgacgtggccaactgatctaccgacagtagtacactctagatgtcttttattaaaataatagataatagagtaatccacaaactaggaccttacacacatacgcacagagcaaaagctcctgaggtgcagagcctacaggaaacctcatcaaaagctctgatggctcctgtcgatgagcacctttaggaggggctgctgttgtcttaagtcagaacagagatagtttgtgcctctccattttgaaatgctccagatttcccttccctgtcttggtctctcagagcctaatgtctgtgctggactagcatagtcagtctttggttatgtgtctgtattttctatttaaagtagtctaggctgggtgcagtggctcacacctgtaatcccagcactttgggaggccgaagtgggtggatcacaaagtcaggagttacagaccaccctgaccaacatggtgaaaccccatctctactaaagatacaaaaaattagttgggcgtggtggcgaatgcctgtaatcccagctactcaggaggccgaggcaggagaatcgcttgaacccgggaggtagaggttgcagtgagctgagatcacaccattgcactccagcctgggaaacagggcgagactccatctcaaaaaaaaaagaaaaaaaaaacattagtcggggtggcggcgggcgcctgtaatcccagctactcagaaggctgaggctggagaatcactgaacccaggaggcagaggttgcagtgagctgagattgcaccactgcactccaacctgggcaacagagggagactccgtctaaaaaactaaaataaaataagatactctaaagtaaattatttaaataattctcatcttaagcaagcagtttattcagcatgaggttcaaagtaaataacttcaaatcagatggtcatgaatataacttctttagtcattcaaaacactcagataaacaagacggataacactgaaatgaaatacagacaatgcagtggattttcaacaataactacaaaaaggactgaacaaagagacaaacaatgaatgtgggcttgcctaggaaatacagtagaaatgtcaaaaaaagttaaatgaatgagaggggtactacaatcctccaccccaggaaaccacagcaaggtgccgtggatcctctctgaagcctgacgttcaggttgttcatattttaggtaccctggacacttgctcataggccctgcaagaggttacagcagctgttccctcccacagggcaaagccagatctcacagccacctaggcctccccatgacagggagttgctccctgggacaaagaccagaataggaggaggagggagagataaaaggctcagatttgcataatgtgtcccacaaatacctaacctttatgcaagaggtgaggagggcataaaagagccattagagagtccaacactagctgtgaggccagtgggcccttggaacttcagcaccgtggtctagactcctctcctcctcctcactcagtcactgcccaggttcacagagatttcagatcagcctttagaatgattcttctgccttcttttgggagaaagtgggtctaggaaaaatagaatgcaaatatttttccaatccatagggaacaataagaggtatactagatgaagagtttatggtcaaatattttttcaaaaaaaaaatctctctatgatgtaattctgactgataatagcaaagaaaacaagctccttattttatataaaaaatttttctttttttttttttttttgagatggagtcttgctctgtcacctaggctggagtgcaatggcacgatcttggctcactgcaacctccacctcctgggttcaagtgattctcctgcctcaacctcctagggattacaacctcctagtagctgggattacaggcagccgccacaacgcccggctaatttttgtatttttagtagagacagggtttcaccatgttggtcaggctggtctcaaactcctgacctcgtgatccgcccgcctcggcctcccaaagtgctgggattacaggcatgagccaacgcgcctggcctaaaaaatttttcaaaacaatgcaagtttactacataaaatctggctttttttttttttttttttttttttaatgatgtggtcctgctctgtcattcaggctggagtgcagtggcacaatcactgcttattgcaggcttgacctcccaggttcaagctatcctcccctacctcaatctcccaagtggctgggaacataggtgtgtaccaccacacttggctaatttatttattttctgtacagcctggatccccctgtgttgcccaggctggtcttgaacttctgggctcaagctatccttcctcctcagcctcctaaaattccggaattacaggcgtgagccaccatgcccgacctagaagtatttgtttcaaggagcatatttaactacgccgtaaagaccaaatagttcagaagttagatgttacaattttagtctcttctcctacttcttcttttttttttttttttttttttttgagacagagtctcactctgtcacccaggctggagtgcagtggtgcaatcttggctcactgcaatctctgcctcctgggggggtcaagcaattctcctgcctcagcctcccgagcagctgggagtacgggcatctgccaccacgccggctaatttttgtatttttagtagagacggtgtttctccacgttggccaggctggtctggaactcctgagctcaagtgatttgccccgcctcggcctcccaaagtgctgggattacaggtgtgaaccgccgcgcctggctgttctttcacatattttctccatagttcagatcacaatgtatacaaatttttttcctgctagttttctttcacattactgcaatctatctcttttaaaaaaagtatatagtgcagctatttcagccaggcacggtggttcatgcctgtaatcccagcactttgggaggcagaggcggctgaccacttggggccaatgagtttgagaccagcctgggcaatgtggtgaaaccccatctctactaaaattacaaaaaaataattagccgggcgtgggggcccgcggctgtaatcccagctcctcaggaggctgaggcaggagaatctcttgaccgcaggaggcggaggttgccgtgagccgaaatagtgccactgcactccagcctgggcgacagagtgagtgaggctccgcctcaaaaaaaaaccaaaccaaaacaacaataacgaaaaacaacaaaaaaagtagattgtgcagctatgaaatgaaaagtacaaaactgttcagtttccaggcatttaaaattatttctggccaggcctggtggctcatgcctgtaatcccagcactttgggaggccgaggtgggcacatcacctgagatcaggagtttgagactagcctgaccaacatggagataccctgtctctaactaaaaaaaaaaaaaaaaattatttctactttacatttacattagtacaaccaaagtattgatgaattatcttacatactcaattttggatatatacataaacattcattctgtaaatttttattggatatgttaaaagcatcccatgaggccagcagtggctcacgcctgtaatcccagcattttgggaggccaaggcaggtggatcacctgaagtcaggagtttgagaccagcccggcctacatggtgaaaccctgtctctactaaaaatacaaaaaattagccgggcatggtggcaggtgcctgtagtcccagctacttgggaggctgaggcaggagaactgcttgacccctggaggcagaggttgcagtgagccgagattgcgccattgaactccagcctgggcagcagagtgagactttgtctcaaaaaaaaaaaaaaaaaaagcatcctatgaaaaaaatgaaattattacctttttattcatatattgaaataacttccaaaaaggcttatgccaattgaaactccttttaatacatcctcactgacagtaaacattacaatttatataatattcatcagtacgctaccattgctttaattcccatttttgtttttgctatggagactaaatattttgcatttatttaccaatcagctatatttattctttgtgaaatggacagggatttttttctttacaacaattttataatagtgcattagagatttgtcttagtaatctttttttttttgagatggagtctggccctgtcacccaggctggagtgcaatggtgcgatctcagctcactgcaacctccacctgctgggttcaaataattctcctgcctcagcctcccaagtagctgggattacaggcgcccaccaccatcatgcccagctaatttttgtatttttagtagagatggggtttcaccacattggccaggctggtctcgaactcctgaccttgtgatctgcccaccttggcctcccaaagtgttggaattacaggcgtgagccaacacacccggcccccgatttttcttagtaatctttggaaacacttcagaaatatttttaattagccctttcataatctcaggctataattttcctgtttatatgccataaaatgtgaacatgttacaccgtcaaataaaaaaagcaaggtgcagaagactgtgcataatataaatcagttatttaaaaaaaagaaaagaaaaaataagaaactatctgaaaggctaaaaaaagaatctgagttgttactttttcgatgtttgaagaatgtgaatatattatatactcaacattttaaaataaatgaactttaaaaagaatcctctcaaaatggtgtcagccacaatggcacaccagagagtgggaaggcaacacaatgaccattaactcagttttagctgccttccttgtatcataaaaacttctaatgttccattttccctgtggtaacttccaagatggcctccagtgattccccaccctctggtattcctatctgtatatggtccattcccacatagcatcagggttgctctgggtgaccaagagtatacaacagagtgaagttattttacctccaaggctattataaaaaacattgcaatgccttccttgttctcttttggatcactcattctgtaggaagccagctgacatgtcatgaggaccatatgacaaggaacagagggaggcctcctgccaatacccaagtgagtttgaaagccctagtcaagcctttcacatgatatggccccagtcaacatcttaactgcaacctcatgaaagaagctgagacagcaccactcagttaagtgaccccaaattcctgaccctcggaaaccatgagataacaaatagtggtggttttagttgataagtttgcagtaatatattatacagcaataggtaactaatacagattttagtacctggaagggaggtgctggtgtaatacctaaaatgtaggagtggctttgaaactgggcagtgggcagaagctaaaaaatcttcaaggagattgtcagtgcaagccttagtagaaaactggactctgagaaggctctggtgtagcttaaaatgaagtgaggaacatgttattagaaaattgagcaaggggttacgtagttacgtagtggcagaaagtttagtgactatcacctagtcaggtgaaagtagaaaatgtacctgagtcatctaattgagatttccagccagaatgctgaaagtgctgattggtttcttcttgctacttatagtaaaatctgaggggacagaaacaagctaagggaagaagtgttaaacaaaaaagagccaagagccaatacctgctggttttgaaaattcccagtctttccagatggcaaaagatgctaaaattaactgctcccaagcaaaggttatatccagggcactaaagaaaggtgcagaaatatgaaagatgagggtaaaaatcctttttactttttctttgagacagagtttcacccaggctggagtgtaacggcttgatctcagctcacggcaacctctgcctcccaggttcaagtgattctcctgcctcggcctcccgagtagctggagttacaggtgcaggccaccatgcccagcaaatttttttttttttttttttttttttttagtagagacggggtttcaccatgttggccaggctggtcttgaactcctgacctcaggtgatccaccagccttggattacaagtgtgagccactgcacccagtcagagggtaaaatcctttaaggctctgaaagatcaaaaatgatgcttcagagtacagtagtcccctttatctgtggttttactttccatggtttcagttacccacagtcaattgtggtccaaaaatattaaacggaaaattccagaaataaacaattcataggttttagtttatttatttatttatttaatgacagggtcttgctctgtccttcaggctggagtgcagtggcgtgatctcggttcactgcaacctctgctcctcggcctcaagcaatcctcctacctcagtgtattgagtagctgggattacaagtgcccaccaccacacccaactaacttttgtatttaagtagagatggggtttcactatgttggccaggctgttctcaaactcctgacctcaaatgatctatctgcctcagcctcccaaagtgctgggattagaggcgtgagccaccacactcagccaacaattcttaggttttaaattgcatgccattctggttagtgtgatgaaatctagtgcagtggctctgagttccattcaggacataaatcatcccattgaccagcatctctatgctgtgtatgctatgctcttgtggtgttataatatacattggttttgtccacagttcataactcccacagcccttgttacagtcttttgttataatgttcggtgttaggcctcagaggtaggcttctgaccttctgccatccttttacctgccccaaggcaggactctaatctttctgattgtgggttctaagaccctcccaagagagaatcctgccctatactctagcgggagagaatgcttaagtcatgaagcttccataaaaacccaagaagactgggttcagggagcttccagttagctgaacaacacttggaggttcttggaggttggcgcactcagggaagccatggaagctccatacctctttccacacaccttgccctgtgtgtctcttcatctgtatcttttgtaatatcctttataataaacctgtaaacgtgtttcctcaagttctgtgagctattgtggcaaattaatgaaatccaaagagggggttgtgagaaccccaacttgaagtcagtcagtcagaagttcagtatacccagacttgggagtggtgtctgggggtatggggggaagtctggaggaccgagaccctaacctgtaggatctgacactaaactgttccaggattcctgacactcagagactatgtgagttaatgtttaagctgttagttttgtggtaacctgttatgcagcaacagataacacattcccttccctgtttgcaaagcacacaatcccacccatcaaaaaacatggaaaaatggtactaaggtttcgatgtgtatgtttatacacacccatgcacacatccctcagacagcttttctgtcatttctgacattgtgcctctttctactgttttggattctatcaatccctggataggatcaaggaataaccccatcccattcacatccaaagttctaagccattagcccacatacatgaatacaggggaagatacaaatgagtctaagttataactagagcaggggtcagcaaacttttttctataaagtgtcaggtagtaaatattttaggctttgctgggtgtatatgggtctctggctctaacaatgttttgaaaatttaaacttagcctaaaagccacagtttgccaatgcttgccctaaagctaagaaagacttgtgtcttagtggcagtcttgccacacattgataattgttctaatttcaatctcataaccgggaaggaaagagtctaaaagggctaaccactgaaatggaatttactttatttatatgatgaatgcttttaaaagacaaaataactcacttatataacatttgtctgtttttttgagagagtctcgctccattgcccaggttggagcgcagcagggtgatctcggctaagcctccaccttccacctcctgggttcaagcgattctcctgcctcagcctcccgagtagctgggattacaggcacacaccaccatgcccagccagtttttctatttttagtagagacggggtttcaccatgttggccaggctggtctggaactcctggcctcaagtgatccgcctgctttggcctcccaaagtgttgagattacagttgtgagccaccataccagcatttgaaagaataaaaatcactatgggattaagtaaactcaattgtatttagaatttatcattcttttccatagatgttatcatgaataattacaattgcaaagtacatataactttgtatgttcctttcttattttgcattatagccaaataaaattgtgtactgcaatagctcctataatcactacttttgataactgaatactgtttgtagtaggtatatatttaataatttgactttcagtttggtttccaagttttgggttttttgtttgtttttgaggcagcatctcttgtcacctagtggtacaatcataactcactgcagacctcctggactcaagccctcccgccccatcctctcaagtagctggtcagactacaggtgtgcaccaccacgtcttaattttttttttttgagacgcagtttcactcgtttcccagactggatggagtgcaatggtgcaatctcagctcactgcaacctccacctcccaggttcaagtgattctcctgcctcagcctccccagtagctgggattacaggtgcccgccactacgcctggctaatttttgtatttttagtagagacgggttttcaccatcttggccaggctcgaactcttgaccacatatgatccacccacctctgcctcccaaagtgctgggattacaaacatgagccaccacgcccagctggtttgaatcctttgttaaagaaaattaaaaaataggttaggcatagtggcacacacttgcaatcccaacactttgggaggccagggcaggaggactgtttaagcccaggagttcgagaccagcctgggcaacatagcagaaccctgtctctaccaaaaaaaaaaaaaaaaaaaaaaaaaaaacctcacaaaaaacaatgctaaagaaagcgaatgagatataatgaataaaaacaaaaatagagaaaacaaaactaaagcaaatggggggttgcttcttggaaaaagtaaatcagaaacattgataaaaccaggacgaattaatgacaggaagaggaaatacactttaatattagaaatgagaaaggaagtgggattccgagtagttaaaaccatatcctatcccaaacagaactacttttgcttcaggaaaggaaggtttctaacaagaaagctgtaagtgcaaccaagtaaaaacttgggttagtaaagaaaatgattgtcttaatagatgttgtaaattataaaactaaataattctctttaaagattctaaaaaatagaaatagaaactttttttttttgagatagagcttcgcttgtttcccaggctggatgcaacctccgcctcccaggtacaagcgattcttctgtctcagcctcccaagtagctcggataacaggcatgcgccaccatgcctggctaacttttttgtatttagtagagagggggtttcaccgtgttaggctggtcacaaactcctgacctcaggtgatccacccgctttggcctcccaaagtgcagagattacaagcatgcgccaccacacctggccccaaaaatggaaatagaaattatttaagcaatatacttattacctttaagggcaaatcatttcttattaaagccaagaacaaagaagcccattaactccatcttaaatattgtttagaagttctggctgtagtgccgggcacggtggctcacgcctgtaatcccagcactttgggaggccgaggcaggtggatcatgaggtcaggagatcgagaccatcctggctaacatggtgaaaccccgtctcttctaaaaaaatataaaaaattagccgggcgtggtggcgggcgcctgtagtcccggctacttgggaggctgaggcaggagaatggcgtgaacccgggaggcagagtttgcagtgagccgagatcaggggccactgcactccagcctagctgacagagcgagactctgtctcaaaaaaaaaaaaagttctggtggtagcaataaggctaaaaatgaacacaagtggcaaaaaggcaaagattatacagtggtactaaataaaaattaaaaactaaaaataggccaggcatggtggctcactcctgtaatcccggcactttgggagaccaacgtgggcggatcacttgaggctaggagttcaagaccagcctggccaacacgatgaaacctcgtctctacgaaaagtacaaaaattagctgggcatggtggcacacgcccatagtaccagctgctaggaagaatcacttgaactcagggggtggacattgcagtgacctgggatcgcgccactatactccagcctgggtcacagagcgagactctgtctcaaaaaacaaaacaaacgtcccattttacttatggtggaaagacaatacagcaacaatacagcaacagcatttttttcacaaaacattttattactataattgatattttacttataatttttggcaacattaataaaataataaatttcacctgaaagaacaagcgagcaaaatagacaaggaaattcacaaagggcaataacaaaatagtaatcttgacatattcaatatatttgtaaacaaaacaaagtgacattgccttaaaaatatatagaggtatcaatagaaaaacagagaaagctcctgaaagaactcactatattaattttcatttggttgcaggcacagaaattgactcaagctagctcaattctaagacagaagcaaagcccttgatgctgatcgctttccagctttttcatgaaaacctaggaaatttaaatactttgaagaggaagaaaagagtggggagagagtaaagtgcctttaagaggaaaagtagaagtttttttttttttttaaagggagatctcattgtcagtggcattttaagagccttgaagctcaatgaaccaaaggaagtgtcaaacaattaagtgaggtagcaagccatgcaggcctaggggaagggcattctaagaaagacaacagcatgtgcaaagtctttggattgggaagaatgtgatttgcttaaggaatagcaaggccagtgtgtcaaaatagtgcgtcattggggaaaacagtggagaagcatgacagagaatgaaaaagagaggaaggaggtaggcaggggccagatcactggaatctacagttggcaattaatgaccatatgtactccttaagagcatgctttaatgaaactgcaaacaacagtgttgataataccaaccaatcactcaacatacaactaaaacacttcatatttttaccacagaaacagaatacgggaggtaagtatgaaaagtctgtagatctatttatacacagtgggagtatctacctgagacaagaaaaactggcacacacacacccacttgcacacacataccctttcttcaactaaagaaaggattcaggctgtaattttagcaaagtgtcttaacccaagcaacgtaactgaaaagacctagtatagtgttcaaggtgcaaatcaatcaaatgagtgtccggcaaataaatacaacagaatctatggatctagagtcagaaaattttctaaaatgtagataatatactcacaacttctttgttatctgtactgccttctactctaagagggatgctaagctcttaattatctcttcccggatttttgtgaaagcttaggaaatttaactagattgaggagggaagaaaggagtggggagagataaggtacctttaaaaagaaatcaaggaaaaagggagagatttctccagacctatgtctacagccaagatggcggattccttgactggtgaagacaggctgctgggcaccttggtcaggggtggaggaacaaaggatggcaccagaacacaagcagggagacaactccgggagtccacagaggcagccaagactgctgatgttcaggaaccaatactcaaaaggtactccagaatactgtgaaacagcccctggggagagcaagggaaaaagattcacccatagtacagattagataggatagatcagatgaaggacattaactctaagtcttaaaacttattgaattagagagacatttcttgcacactggtgtgtgtcaggtaagacccaaacagcattagtgtcaaaaaactgggaaactatacatttaacagaatagctgcaagctgtaatacattcatgtccaaagcaagacataaagttgcaagcttcacatgttcaattagggtaagatatatatgcacagaaaaatataaagccattatgggtttaaattcagtcagtcaccctgggctatttttgtccactgtacctactgttgttgggacagtcctcattccagcttaacagtgggaaaactaaatttagcccagtccaggaactggacagacaccacttgtttggcccttttcagttaaaactatgggtccagtacagttcaaattatagatattagggcttcttccccttgggaaacttgctttacagctgtggctgagaatatggccagttcattctccactaacggctagccagaagggagaggagagggaatgaatcaaattcacctttagatcacagaacaggaagtcagctagtaccaggcaccattctattaattttattgctatttcacctcaaaccaatgatacatgacggctgtttgatgtctgcaggggcccttcaccaaacaaaaccattttactttgaatggtttggcttccttggatgttttcaggtaggtaaagatactctgaagcagtgttccttttgacctggccccaagactagaatgaatgtgtgcctatccttcaactagaacaaagaaccactgctctccctcaactaacctccgccttcttggtctctgctcacgcagcagcttctctttcaattccacatcctggcttttcagaatcttttcaggttattttatgccagcacagcagaggcacttctgggaattcggcagcaagtgggccagggcataacaaagccattccagtctgactagagttaaccatgaaatgctgaatgcatggaaaaagctgtaaagaaaactaagtatttcaaaaattctatgaattctgtatatagaaaaaagagctttcaagcttaggagtaacatgaaataccaaaacaataaataggtgccaggggcagtgactcacacaacccagcacttggggaggctgaggcaggaggctcccctaaggtcaggagttcgagaccaccctgggcgacataacaagattccatcgctacaaaaaattaaaataaaaaactagctgggtgtggtggctgcgcctgtagtcctagctactctccaaaggctgaggcggaggaatgcttgagcctggaagttcaaggttgcagtgagctaggatcacgccactgcactccagcctgggtaacagtgagaccctgtctctaaagtaaaaaaaaaaaaaattaaaattaaaaaaataaattaatacctttctctctcacacacacacacacaaacaccttttatgtgttaagccagatacagttaacatgaaaaccagatgttttaaaataatacctcaaaattcagatcaaataatatatatcctgaatcttgtttaaaaagtcatatataatccactagtttcactatttttggtgctactgaataatgtatggtttgtattttttgttttatgaggttttttaatttggtttgaaatacttgctttagatttactgaaactagaattaatgggacttttttgaaattttgcttttagacctggggagtgatggttcagagtcagatgtgctcacagttatggatgctacatccactgatcctggctgaagaggttccagtgacacttgaatagtaacttttgtttcaggaggtaatccttctagttgcttaggcttcttaaacatttgatgacactgggtcttgtgctccattttctccttgaaagttaaaaactgtagccggcacttggaacactggtgtgcactctttccccagtggcccctataatgacacatgtatggtgttgctgttttgaaaattttgagacaaaagggacaaagcaaattctttgtgttttcatggcacgttctaaaatgtgtttctacatcagcaaagaccgacgatctataatggcaaacctggcacacatagggcatttcgccaggcttatgatggtccttcatgtgttgtaagaggacctgatctgtttcaaatgacaattcacagattttacagacagtagagggctcctgggcagtgtggacattttcgatgtgacactgtagctggaagggagtgggaaactgccggtggcagtgctggcaggtggtgtggttttcccagctgtcgttcctctgcttctcaaattccaaatgatgcttcacgtgattcataaacttaacattttttagaactttcacgcagctgaggcatttaaaggtggtgtgagtcttctgttccggctgcccttctcctttatgctgtccatagtaaaagtcactaagtaacacaatgggattttctttcttgggatcaaaggtcttgttttgacttgttagactcaaaatgtctgtttttgccaattcattttccctatcaagatttgtatttataggcttgaaatggatattgtcctttggaaaagctgctggaaaaggtgctccattctgaacatggcttaatgaggtatgaacattatttgagggtgtactttgctgagtattcattgtatgaaaggtatctgaagggaacgaagctgaagaatttccttctataattccatccctgagtttagcccttttgggatttatgctgtttacttcgaaagtggaaagttgctttgatacacgaggactttcatttatacctcctactgaaagtgctgtacttactggatgatgcaatgaatctgtgaatgtaatcaaaggagaaggtaattctgaagagttattaggcacaacttgtggtgaactatttctataatcaggtttagacaaaggctcaataataataggactatctgttgatctcgattcaagttgggaagctggcaggacggtcactgcttctgatgtaacggtctcatgacttttaggctgcaatttgcgagcagtatcttttctaaggtgatcatacttttttctccttgaccatgaacccggggtgactctgttcaaaatgtttgaaacgactggttttgaatttgaagtcaccccaacaaagattagctcagcatcttcatttacatgttccacaccaacaaagatgagctcagcatcttcgtcatctacttgtttggtttcttgtatgttcttctgtggttcaggctctttctcttcctcacatgattgttccattttctaatttttttattcctgaatggtggggccacaagtcccaatgcttcctttatataaactgccacctaagtacaaacatacatcagtaagtacaggaaaatgcattaccttatttaattttcctccaaaacattgtttttataaaccactattttacccacaaggacactgagactgaaagaggataaataacagcttaaaacctgtgataaaagatcaggttcctatgaatctagaatcataactttgctgtactgattgtgctctattccattttaaaaaaaaaacctaccagcagctaatcactaggcaaaattatatggaaaagacacacatttttatgagggcatcattgtgcagtgtttagaaacatgggctttggagttgaagagtaagctggaatccttagtctgccacacaccagatgcttcctctttagcaagttttttacttttaaatgtattttgctatcttaaaggcaaaaattcttatttcttagacttacagtaatagctggttttttaaaagcaccacctattcaatggcagcttgatttgtagtggaattggaagaaaattacaataaatgaaaatatctcaattgattcatatatagtaatctcataaacattaatatagaaaagaggtattaaatttatagagttagagtacctacacataaccaacaaacagcatagcacaatgtcaattgccaggcagataatctcatcccaactcatggccttaattataatccattcagtaatgcctcctaaattttcccctccagttctgacttacccactgaacttaaacacaacagtgcttcctcctcaatctcttctccacatagcaagcagattgattgtgttaaacaaagtcagactgtatcattgttcagctcaaaaccctccaacggctttctgattaactgagagtaaaagaccaagtattaccaatgcctagaagactacactaccaaccccacatactgctcctgcagttatctcatactactctccactatccacttcactgtagtcacactaacctccttgctatttattttaattttttaaattaaattttatttttttgagatggagtcccgctctatcacccaggtatatatttcagctcactgcaacctccaccttccaggttcaagtgattcttgtgcctcagcctcctgagaagctgggactacaggcatgcaccaccacacccagctaatttttgtattttcagtagagatcgggtttcaccatgttgaccaggctggtcttgaattccttatctcaggtgatccacgtgccttggcctcccaaagtgctaggattacaggggtgaggaactgcacctggccctccctgctatttcttgaacatactaagctcttttccttgctcaaagcccttgttccttccaatatgaatgatcatttgggtatccgcatggctagctcctcactgcccttagggctctattccaagtatccctctcggtgaggttcttaaatattccaaccaacctctaacccacattcctaatctcttttcccttttctttcatccccaaagccctatcaccatttaacatattacgatcctatttatcttgattattttctattgtccatccagtggaacataaaactcaaaagggcaggtattctatcttttgttgactgttgtatgcccagcacaaagaacagtgtctggcacaggacaggtgctcaacaaatacagaatttgttaaatgaatcaataaatatcgactctccttcataagatcctttatttttaaagaagattatgctccattaattccacattttctatgaatttactctgagaactttatccattggaaattccgtaggccaataaaggacttaaagctagctttttacaaatatttgaccacaaccaatagtttaaaaaaaaaaaagtgatatggagtccaattacacaagcacatacacataaataataactacctttactacacaggctgcattctaaaattttctatttcatttttcttgtctttttcttttttttttttttttgagacggagtctagctctgtcgcccaggctggaatacagtggcgcaatctcagctcacggcaacctctgcctcccgggttcaagcaagtctcctgactcagcctccagggtagctgggattacaggcacatgccaccacacccagctaatttttgtattttttagtagagacggagtttcactgtgttggccaggctggtcttgaactcctgaccttgtgattcaccagcctcggcctcccaaagtgctgggattacaagcatgagccatggattacaagcctgagctgtgcccagcctcatttttcttaaactaaccacagacccacaaaatcagttaagcctcatcactaggtcactactagttgtttcaaaaactggtctaatgctagcaaaatgtacgcactagaaaccaaggttcataactcaccaatttctaaaaacatatcaagattcactgtatccccatgtggacccttcaaatcagcataatccaaagcataaaaattaaattgacatctaataaatgccatgcacatttgttttaattttaattaggatatcagtatctaattttggaacatatagacaatatttattcctataaatatgtgtatcaccttggaagtgaatttaaaaaggaatacaatattaagtaagcattgtcaactatatacaaactggtgtatcatgaatagtgatttacaacttaattagtagatatataatgccagaaaaaatataaggcagatatgaatacactgctctctggagtcaactaaaattggtttagtctgtctatatacaacttcaatcgcctaactccaggatgatgtcacctagcccagtgtttcctaagcattactgacatttgggactagataattctttgctgggggctgtcgagagcactgtaggatgtttagcagcatctgtgatctctacccactagaaaccagcagtagtcccccagggtggcaactaaaaatggctccaggaattaccaaatgtcctgtgggaaaactcctgcccaaatccaatcttctcaggatcacttccacatttccagtaactaccttctacataattctaaatgtattttctaacatcctctctaaagaaaatatctggccgggcacggtggctcatgcctgtaatctcagcactttgggaggccaaggcagttggatcacaaggttaggaattggagaccagcctggccaacatagtgaaaccctgtctctactaaaaatacaaaaaattagctgggcctggtggtggacacctgtaatcccagctacttgggaggctgaggcaggagaatcgcttgaatccaggaggcggaggttgcagtaagccaagaccacgtcactgcactccagcccgggtgacagtgcgagactgcatctcaaaaaaaaaaaagaaaatattctaattcacaatcattaatattctccaatatcctaaaaaatcagactataatctgacaacatggccattagatttatctgaagattaattagtttattattgttattattttttctttttcaagacggagtcttgctttgtcacccaggctgaagtgcagtggcatgatctcggctcactgcaacctctgcttcccaggttcaagttattctcctgcctcagcctcccgtgtagctgggattacaggtgcgccaccacgcccagctaatttttgtatttttagtagagacggggtttcaccatgatggccaggatggtcttcatctcctgacctcatggtctgcctgccttggcctcccaaagtgctgggattacaggcgtaagccaccatgcccggccaatctgaagattaatttttaaagcccccagaagtttatgatttactaaagttatatggagggtttgtagacagagttagcactaagatgcctaattcctgaattctggttttgtgctctttctgctaaaactgacttagtgcacacttatttctgatgatattgctgttaactgcttagtctttaagaattaaagtgtctcattggattcattttttcactctctattttgtaaacctgttcaaacctcctctacctcccagaaaatgtcaaagtaccttataagccattttaaataacttttagagcatcactcattctacctctcatgtccattcctattaatggcccccagcccaggccgcaacttctaggtttaggtccactggttacttcatttttgtacacttgtactagaccctaaattgttctgtctcttttctctgtccttcaaattatataacacaacaccacaagatggatcttaaaacacaactgtaattatatcactcttctatccctaagcgttaaatgattcctccaattctagagaatattttaggtatacataatttgtgttatgctatgggctgaactgtgttccccccacccccaaatttgtatactgaagctataacccccaatgtgatggtatatagagatggtggctttgggtaataatcaggttaagatgtattcatgaggatagggccctcatgatgtgattggcgcccttataagaggagatatcacagaccttgcttcctctttctgtcatgtgagaacacagcaagaaggctgtcatccaccagccaggaagagagccttcactaaggaaccaaatcgtccagcatcttgatcttgaacttcccagcctaaaaatgtgagaaatgaattcctgttattaataaaccatcaaacaagtaaagaagaaaaacttaaactgggttctaatgacactgctggacttcctaaccagttgctcttggttagatttttggctgttgtccatactgattaaccctccatccaaccatcaatcaaggtgaaaaagaggaatagagcaaggatcaggaacaaagctaataagttaatgaacaagttcattaagaacaagagtagcattagaccatgagagttttcttctcctctagatgtccagagacccttctctacaaatgtccaccaatggatgaatgaatgcttattttccaatttgccagaatcttgagatactggggtagggaggttagacatgcaaagatatatcagatctaacaggtttgtcctcaaaaatcaattctcacctcccatgatgggagaagccaataggagggcttcaattccaaagaaagctgagagatcagtggatgataacccaccttccagattatttctatgcattcaaacaatggcccttctactagatcattgttttttgttttttttgagatggagtcttgctctgtcacccaggctggaatgcagtggcgcaatctcggcccactgcaatctctgcctcccgggttcaagcagttttcctgcctgaggagctgggattacaggtgcgtgccaccacgcctggctaatttttgtatttttagtagagatggggtttcaccatgttggccaggctggtctcaaactcctgaccttgtgatctgcctgcgtcggcctcccaaagtgctgggattacaggcgtgagccaccgtgcccagcctctagtaaaccattgttattaccacacacgagtttttaaccacacacatactcttctgaggaaaggcttccccaaactattggtccttatgatgagatctggccatatatatttttcttctgaaccccaggattgtggggctgtcacatttcctctaacagtacaccttaggagctcccagacttgaagaaaattggctgtttcccacatttgaacattttccactttttccctcagtctacctttttgaattgatttctgactacttctagataacctttttccattaatgaatattgagtgcttattgtgtgccaggcactgctttaggcacttgagagaaatcggtaaacattaacagacagaaatgaacaacaaaaacaaactatttcaacagaaggaactaacaaacagtccagtggaggaagaaagatagtaagtataataaaaatgcaaattctctggtgaactggaagatgacgttatagaattaggaaaaaaataatagagcaggcttagaagttgaggaggtataagagaattgtaattttacgtagtgtagtcagagtaagtctcatggagaaggtaaatttggacatacacttgaaggggataaaaggtcagagaggtagcaagagtggaaatagtagtaaggatctgtaaattcttcatttttctctcagtttagtctgtggcaactgtcatgtcttttgataaggaacgaccttggtttaatagttactcccctcctagactctcaggctagattttttttttttttaattgagacggagtcttgctcttgttgcccaggctggagtgcagtggcacagtcttgtgcacagtcttggctcactgcaaactctgcctcccaggttcaattgattctcttgcctcagcctaccaagtagctgggattacaggcgcccaccaccatgcctggcgaatttttgtatttttagtagagatggagtttcaccatgttggccaggctggtctcgaacccctgacctcaggttatccacccacctcggcctcccaaaatgctgagattacaggcgtgagccactgcgcctggccttttttttttttttttttttaagatggagtctcgctgtgtcacccaggatggagtgcagtggcacaatctcaactcactgcaacttctcctgagatgcttgtgcctcagcctcctgagcagctgggactataggtgtgcgccaccatgcctggttaattttttgtatttttattagagatggggtttccccatgttgtccacactggtctcgaactcctgacctcaagtgatccacccaccttggcctccaaaagtgccgggattacaggcgtgagccactgcacctggcctctcaggctagtttcaaccctattttacactcctctaccatcctcagcttacttttgaaaaagtatttattaaaaaatatttatgaaaaagttatttttgttttatttagttgccctgggatggaatacaaatgtttgctgtagttttaaggatcctataaaactcccatttactgcaaggatctctgtttaatgggcattcaattctaagatagcaaacgtgtagagttatttgtgggggtgggggacaagtttgagaaagaagcagtggggtgaagaaagtgataggcaagggaagatggtggggataggtaccataggagtcctggtggcctaaaatctaatcacagaagttactcaagtgggactgatgcctgaaaaaaatttgtgtgtggctataacagtgagtgggatctactcttttttttttttttttgagatgggagtctcgctctgtcacccaggctggagtgcagtgccgtgatctcggctcactgcaacctccacctcctgggttcaagcaattctcctgtcttggcctcccaagtagctgggactacaggcacatgctaccacgcccatctaatttttgtatttttagtagcgacggggtttgatcatattggtcatgctgctctcaaactcctaacctcaggtgatagacccgccttaggctcccaaagtactggaattacaggcgtgaggcaccgtgcccagcctgggatctactcttaagcaacagagaaaatcagtcatttttccccttttccttcccttcctcctatgagcagaatcttggtctccatctttaaaaaaaaaaaaaaaaaaaaaaaaaggccaggcacagtggctcacacctgtaatcccagcactttgggaggccgaggtaggcagataacctgaggtcaggagttcgagaccagcctgaccaacatggtgaaactccatctctactaaaaacacaaaaatttgccgggagtggtggtgggcgcctgtaatcccagctacttggtaggctgaggcaagagaatcaattgaacccgggaggcggaggttacaaaggagatttgacagggtggcagttcaaactaaaagtggtctgatagttcagagtcaagtttcttcactaaagctgagtttttaaagggcttgaagaatgatgtaaagaggggttgtggaggaccacaaaaaaagacaactaaaaaaaggcataacaaagtcaacttattaaatgcccagcaacagggtgaagttaaggggaatggtggaataaagacctacaaatagctgctgcttcataaaagcaaagagaacactagcaaaaactacaaaaatcacgtttttcagatcctggaaattaacgaaagcttgtaaaactcaaaagattttattacaaaatggcttggcggttcctcaaaatgttaaacatagacttatgatcccacaaatctaagtatacactcaaagaaataaaggtactcaagtacatgtatacatgtttatagcaacaactcataataatcaaaaggtggaaacaacctaaatgtccatcaatggatgaatggataaacaaaccatggtatatacatacaacagaatgtttattcagccataaaagaaacgacatactgatacatgctacaacagggtaaaccctgaaaatataccatgtaaaagaagtcagtgacaaaagctcatatattgtatgatttcatttacaggaaatatcagaaatagataaatccatagatattaaacaaagatttgtggttgccagaagataggaaagggaaaatggtgagaaactgcttaatgggtaaaggggttttactttggaatgatggaaatgtatcagaactagatagaggcagcacacgtacaatattacaaatgcactaaatatcactaaactgtttattttaaaatgactgatgttatgtgactttcacctcaatgaattattttttaaaaataaagagggtatattactaccaaccacacagaaaaaaagagaattataaaggaatactatgaaaaattatctgtcaacaaattagataacctagatgaaacaaattcctagaaagacaggaactaatgaactgactcaagaacaaacagaaaatatgaatggatccaaaacaagcaatagaattagtaatcaaaaaacttccccaaataaaagcccaaaatcagatagctatgctagtaaattcttaacgtttttaaaagaattaacaccaatccttcattaactcttccaaaaattagaagaggagagaaaactttgcacatctttctatgaggctagttattactcttacaccaaaatcaaaccaagaaatcatatataaaaaaagaaaactacaggccaatatcctttttttttttttttttttttttttttttggagacggggtctcgctctgtcgcccaggctggagtgcagtggcgtgatctcggctcactacaagctccgcctcccaggttcaggccattctcctgcctcagcctcccgagtagctgggactacaggagcccgccatcacgcccagctaatttttttgtattttttagtggagacggggtttcactgttttagccaggatggtctcaatctcctgacctcgtgatctgctcgccttggcctcccaaagtgctgggattacaggcgtgagccactgtgcccagccaatatcccttacagaggcaaaaatcctcaacaaaatgttagcaaacaaaatctaacaacatatataacgattacataccatgaccaagtgggatttatttaaaaaatacaaggatggttcattctatgaaaatcaaccaacaataattttatttttattatttttaattttaattttttttttgagtcggaatttcattcttgttgcccaggctggagtgaaatggcacgatcttggctgaccacaacctccgcctcccgggttcaagcaattctcctgcctctgcctcccaagtaggtgggattacaggcatgcgtcaccacgcccagctaatttgtttgtatttttagtagagacatggtttctccatgctggtcaggctggtctcgaactcccgacctcaggtgatccgcctgccttggcctcccaaagtgctgggattacaggcgtgagccaccatgcccagcctataccattttaataaaggacaaaaactacacctgcctgcagaaaaaacacttgacaaaagctaacatccttttatgatttgaaacaacaaaacgattaggaatagaaggaaactttctccaccagacaaaggcatctgtatgagactcacagctattatagtatcatacttaatggtgacactgaaagtacccctgcccctaagatcaggaacaagacagatatccactttaaccacttcaactcaacaccgtactagaggttctatagccaaggtaattaggcaagaaaaggaagcaaaaagcattcagattggaaagcaagaagtaaaaccataatggagatgacaaatacaaataactcaattttttaaaaggccaaagaacttgaatagacatttctccaaagatgatacacaaaagaccaagtaaatatattcagtgtcattaatcataaaagcaatgcacattaaaaccaccttgagataccacctcacacctagtaggatgactactattaaaaaacaaacattgttggaaagaaattagaatcctcatgcacagtcactggattgtaaaatggtataactactatggaaaacagtacagaaatgcctcataaaattaaaaacagaactactatatgttctagcaatcttacttctgggtatatatctaaaataattgaaagcagggtctcgaagagatactggcacacccatgttcacagaaggactattaaaatagccaaggggtagaagcaacccaaatgtctacccaaaaatgaataaacaaaatattatatatatatatgcacacacacacaatagaatattattcaacctcaaaaaggaagaaaatctgtcacatgctacatgtttgaaccttgaggatattatgccaaataaaataaaccagtcacaaaaagacaaatacttttgtatttgtataattccacctatatgaggtaactaaaatagtcaaattcatagaaacagaaagtagaggccggaagcagtggctcacacctgtaatcccaggactttgggaggctgaggtgggcagatcatctgaggtcaggagttcgagatcagcttggccaacatggcaaaaccctgtctctactaaaaaaaatacaaaaattagccagatgtggtggcaggcacctataaacccagctacttgggaggctgaggcaggagaattgcttgaacccaggaggcggaggttgcagtgagctaagatcacgccactgcactccagcctaggcgacaagagagaaactctgtttcaaaaaaaattagctgggcgtagtggtggcacacacctgtagtcccagctactcgggaagctgaggcagaagaatcccctgaatctgggaggcagaagttgcagtgagtggagatcgcaccactgcactccagcctgggcaacacaccaagactccgtctcaaaaaaaaaaaaaacaaaaaacaaaaaacaaaaaaccaaaaaaacaaaaaacagaaggtagagtaatggttaccaagggctaggggcagaggaaaagggtgagtctgttgtttaatgggcattgtttcagttctgcaagatgaaaaagttctagagatctgtttcacatcaatgcttgaaactactgaactattaatttagaaatggttaaggtggtaaattatatgcgtttttaccacaataaaacaattcattttaaaaacaggccccaatcggcatggtggctcacgtctataatcccagcactctgggaggccaaggtgggagaatcacttacagtcaggagtttgagaccagcctggccaacatagcaaaaccctgtctctactaaaaatacaaaaattagccggcatggtggcacgcgcctgtaatcgcagctactcgagaggctgaggcaggaagaatcacttgaatccaggaggcagaggttacagtgagccgagatcatgccaccacactccagcctgggcgacagagtgagactctgttaaaaaaataaaataaaataaaaaataaaaaataagctagacacagtggctcacgcctgtaatcccaacactttggaaggctgagatgggaggatcgcttgagcccaagagttgaagatcagtccaagcaatgtagtgagaccccttctctacaaaaaatttaaaaacacaggcacagtggctcatacctgtaatcccagtattttgggaggctgaggcaggaggacttagtcagctcaggaattccagaccagcttgtacaacatagtgagaccctacctctacaaaaaattaaaaaattaaccgggcgtggtagagtgtgcccgtgatcacatcactgcactacaaccttggtgccagagcaagactgtctcaagaaaaaaaaaaaatttaaatttagctgggcatcatggcacacgcctgtagtcccagctactcaggggtggaatgaggcagggtggcagctgagatgggaggatcactggagcctgggaggtcgatgttgcagtgggccataattgtgtcactgtactgcagcctgggcaacagagcgagaccctgtctcaaaaacaaacaataaaaaatgggcgaaggatttgaacacttctccaaagatacacaaatggccaagcagcacatgaaatgctgctcaatatagtcattaaggaaatgcaaatcaaaatcacaatgagctattacttcacatccactaggttagttataagcaaaaacaatctcaagcgttgcagaggatgtgcagctatctgaaccctcaaatactgctggtgataatataaacttgtactttggaaaagtttggcaattgctcaaaatttaaatatggcgttaccatatgacccaacaatatcactcctaggtatatacccaagagaattgaaaatataacacatatataagctagctggaatatagccataatgctgctacaaagtgcaaacaaccgaatgtaaattaattgataaatgaataaacgaactgtggtatatccgtacaatgaaatactattcagccataaaaaaactaagtacaaacaagcatacaatacggtgtaccttgaaaatacactaagtgaataacaccagacacaaaaggccgcatattttattattttacttatacaaaatgtccagaataaggcaaattcatacagacagaaataaagtagcagctgccatgggctcgatgaagaagaatgaaaggaatatagcaggtttgaaaaatggcccccaaaatatcaggtcctaatcccttaagcctgtaaatgataccttatttggaaaaaggatctttgcagatgggaaaattatcctggactatacaggtgggccctaaatgccaccacaaatgtccttgtaagagaagcagagggagatttcacacatactctaggaaaaggtgatgtgaagacagaagcaaagattagagtgacatggtcacaagccaaagaacgtcacatccacaaactagaagatgcaaagaatggattctccgctagagtttcccaggggaggacagccctgccaacatcttgatttaggtcttgtgaaacttattttagacttctgacctcccgaactaagggagaataaatttttgttgttttatgccaccaagtttgtgataatttgttatagcagctatggaaaagtaatatagggagtgactgctaatggatacaaggtttctttagagttgatgaaatgtcttggaattagatattgctgatggttgtacaattttgtaagtatataatactaaaaaccattcaatttcacaccgcaaagggtgaattttatggcatatgaactatatttcaaagaaaaacaaatgcctagtaacaggctggtataacccgccatctcccaacaactgctgctaaattttcaaagcaccattaagcagactcaattcgtagcaaggataatggaacaatgcaagctcatctagcgaacaaaaagaattaagctagtatcaggtggtcaatttacaaactgtagtgggagtcatacattcccaaggatggaacagttatatctccttgcagagtgaactcttctccgataccaaggacttggaagaccaaataaattatacgtaggattaccaaatatgctggtatgaccaagacagttatagtttaaacttctatctctgtggaattatggatagtgccactcttcaatctttaataagtccttcagtttagatgataaattacatagtcaacctagttataaggaatctagaggttgtgaaaagctgtgagagcatattctatgcagaccacataggtcctatcatgactccctatgtaacttgggtctctgcgactgggaagctcccagggaaaaaaccccagttaagacttctgcagagcattcacattttgtttcaaacttatacaacactaatgctaaagctcaactctcagaattgtattattcagtattatccaaataactgattaatttacacactgaagggaaagaacaaggaatggacctatacacacttgtagtttacaagtataagaagctaacaaagaataagattaaaataacttgtgccaggccgggcatggtggctcacgcctgtaatcccagcactttgggaggctgaggcaggtggctcacgaggccaggagtttcagaccagcctgaacaacatggtgaaaccccatctctactaaaaatacaaaaacttagctgagcgtggtggcacacgcctgtaatcccagctactcaggaggcaggagaattgcttgaacccgggaggcagaggttgcagtgagctgagattgtgccactgcactccggcctggacaacacagcaagactccgtctgaaaaaaaaaaaaaaaaaaaaacaaacaacttgtgcccacattaactaggtgttaaaagccaaaaggtgaaagtcactattctcttttcacatatcaaattgaccctaaggtaatattgctgcattagaactgagctggtgggagggatgttaagaaattagggagaaattgttaatctacagaaagaccatcatataaggttctgtgtgtagccaaacatacacatttgatgttctgatgtttgctattttagtggaactatagctataaaatgtattcaatcagtagaattaaaacatatcccagtccacaaaaaactaagagagaaattatacaggaatgatcaagaatctgcacagttctcataatctcattactagagagaaaaggagaaagggaagcatcaaggtagtatttgagacgaatttaagaagaccactcattcaataaaagtttggtgggccaacaaggtgccatgtattggtctggtgatatagcagtgatccaaagtctttcacttcagggagctgacattccagaaggagtagtcagaaaataatttttttaacaaaagtaacatggttatataaacactagggagaaaaataaagtaggaaatggaggcaggttgatactcacataacatgaatatggctgtctggggaagaatactccaacaaagggaacagcaaacacaaagcctctgagactggagcacttaacacatgcaaggactgatcaataggctaacacaggtggaccaatgaaaagagtgacaagttagaaatgagataaaaaatgagctgtttgtggcaaaggaaagccaagatcatgtaggccattctaaattcttcagctttggccaggtgtggtggctcacatctgtaatcccaacactttgggaggccgaggcgggtggatcacctgaggtcagaagttcgagaccggcctggccaacatggtgaaaccccatctctactaaaaatacaaaacgtagccaagtgtgctggcatgtgcctgtagtcccagctactcgggaggctgaggcaggagaattgcttgaacccagaagacagaggctgcggtgtgctgagatcatgccactgcactccagcctgggtggcagagcaagactccatctcaaaaaaataaataaaaataaaaataaaaataaaataataataatacaaaaattagctgggtgtggtggcgggcacctgtaatcccagctacttgggaggctgaggaggagaatcacttgaacccaggaagcagaggttgcagtgagccgagactgcgccattgcactccagcctgggtgacagagcgaaactccatctcaaaaaataagtacataaatagacaaaaaataaaaacaaattcttcagcttttaccctgagtgtgatgagagattactggaaggctctgagtgagaagtaatatgatctcactcatttcattaggattgctgtggttactgtgtggagaatagactttagagagtaatagtggaagcagaagacaagaagctactgaaatattataaacaaaagatgatggtagtatcagacaggatggagaaatagagatactaagaagtcggactctagataaaaatctagaaggcccaattcattgatggattgggtttgggatgtgaaggagaggaggaggacacacaagaggtaatgctgagcaggtaaatctatgagatcagagcccaaggaaagttccgaggtaggtacttaaattttgaagtcttcagtatgtagcattatttaaaacacaagactggatgagatcactcagggaaaagaggtctgagatctaagctctggggcattccattgattagaggtcatggagatgagaaggagctggtaaaggaaattaaaaaaaaaacaattattcacagccattcaggtgggaggagaattgagaaagagaagcatcccagaatccaatggggaggagaaaaggaactgtaatatatgctgccaatagatcaaataaaatcacgaaaatcaactaaaactgaccaatggattaagcaaagtggaattcattggtgaccttgacagcagtgggtttaaggaagaacgagaacaggagatagcaaatacggacaactctggagaaattttcctgtaaggacaagcaaatacaaattaaaacaagcagatgggagatgtggcatcaaaaacgagatctttaaggtgaggtgatggtacaatcagtatgtttgctatattaatgatctggagagatagaaaacttaaccctagacaaagagaagtcttgctagaataatatccttaaataaacaagtgcacatgtagaggttctggccttagcaagaagtcaaattattcacccagagtaacaggacaatgctttgagatcctatggaaaagggttaaatggtggataaatggttgcggtggccatcctccaagatggccctaaatgaatcccacttcctggaattcacatagttgtagccctctcccactaacagggttggcctgtgggatcaagcacatacagcaggaagtgatggtatgccacttcagaaattaggtcataaagactctgcccttcatcttgggtacaaggtctcttgaatcatttgctctgaagtaagccagctgctgtgacatgaacagccccatggagaggcccacagagcaaggaactgaggcctcttgccaacagcccagtgagtgagcttagaggcagatgatccaaaccaagtcaattccgcagagactgacaatccagccaaaggtttcactgaaacctcatgagtgaccttgagccagaaacagccagctaagccactcttggattccagaccttcaaaaactatgaggtaataaatttttttttaaactactaagttttgagacaatttgttacacggcaatagataactaatacaatgggtctcactgagctgtaatcacaaattgctgggcacacaattcactataatctcacctactggcatgcaatgacttcagatgacctcccctgtcctgctgcatgcagttacctcatgaaatacagtcgctgagaaagagggtaggataaaaggagtcagctttatataacttaacatccctgatgctcttttttttttttcaagagatgtggtaaaagaatgccactaccaccctctcctttctcaacaaagcaatttagagggttcccgaatgacctacatcaacaattggcctgaactaatcaaacgcatcattcagattccctcagtaaaatattgaataccaaacagctatgcttcagcaaaggaaagggcaagggagcgaaactgaaggacgaaaatacaactttggtcctcatcagggagacttctcttttcttacctcaggtttattacaacgcaacttttaagaacttgagctattccaggcagaaggtcacatccttgaggtaaccagagagaagcattagttacttacatgtcacaagaatattttcgatcccactgcctgacattgccatttaggtgtttatcaatcatctcacacttaaccagataagtgaactgaactcctttcccccagatctgttcctccaatctaccctaccttagcaaaggaaaacgtcccacccgccaactgcccaaatcaaaagcctgcaaatcacccgaggtcctggctctcacgggagggactccattagggtcccaggggctgcattaagagtcccgacagcgacgcagtaaatgagacaagacgctgcggtaggggagagagacccatacattcaaatgccttaaggggtctgggcctacaggtctccagaactggggagggcctggggttacaaagcagttttcagatttttaaatacattgagcgccaaaagagaccccgcgggggcgatgggggaggggagcgcactgggagccaggaaaggccccttctccaggaggcccgggcccagcccgggggtgggggcgtctgcgtgagggagtggaggctgatgtaaaagtggcgcccgctgagattagggaagggggtgtgcgtgaggggatcgtgggacctggttctgccctgcactcccccacagaaagcggctgtattgcaaaggccgctccggcagcgcacggccaagcgcggtgtcgcgacccgcagggctgcggctcgccatgaaatccctcaagtctcccctcagggaacgctgaagccgcgccacgcccccgtccttaccagtccggatcagctgctgttcgcgagctgccggccacgcaccagccccggaggcgctcccggggcacagccggcggcgactacgcctcctcaggcccccggcgccgccgacgcgcacgcctccacacgcgcgcgtccagtggagacctgcgattggctgccaggtgccggcgcgagatcggcgcggctccgagctaggagcatgcgcgcgctctgacgcccctggtggcgacggctggacgcggggttaaattgagaaggaggagggcagcagcaatacccctgaggccttgaaaggatcttgggttccggatcacggttccaggcagtcagggttccagagctgagggggtatccaagcagtcagggttccagagctgaggagcatccaggcagtcagggttccagagctgaggggcacccaggcagtcagggttccagagctgtcgcagccagggcttggggtggggggtaggcttccagtccatcaggggatggtttgcccaccagaaggccagctgttataattctcaggtgtggtccctttgttgactatccatgcttaagggattgtgaggaaacaactgaacctaacatctgtcctcttctagttacatctggggccagttgaatccagcctgccacctgtttttgtacagctggcagcaagctaagaaccgatttcacgtttttttaatggctaaaaagagaatattttgtggcatgtgaaaattatatgaaattcaaaattcagtgtccataaataaagttttattggaacaacaaacatgcccattcctttcggtattatttatgcctgttttcctgcttcaacagcaaagttgattaattgccagagaccatgtatgaaaagcttaaaatatttactgtctggccctttacagaaagtttgcccactcagtttacttgcagctttgattttttttttgaattgaccaattctgccaaaagtctattttagcaatctttttggggggcgggtaaatcgcttttggtttaattaatctataatgttattttcttatctattttatctatttcttccattctgttattttcttccttcgtgacttcataggcttgttctgttacttctcattacaacttttggagaaaaatgcctacctcgtttgcttgtaaacttttttgtttctcttgtatttaatgctataaatttacctttaagtaccagtttaactgtgtctcaccagtccgcttggtaatatgttcattatccttcaattagatatgtcctaattttgctagttgttagaaatgcttgttccctggtgccgcaaagaaatagcacttgaacataaatttaattttctcagcaaggccattttcactttctgcagaaagggtacactcgccagcagttttgccacgagagtaccccaaacaaaggatacagggttatttataacctgacgcatccaccctactgctgtgtccggtttccattggctggaacaggacctcacattctgtgtttgtcccgattggctaacaacttagaactttctaaaagaggcaaaggcagaggagaacaaaggaaggaggatgtaacttgtagaatgctgagaaaggtaaaaacacctccaaataggaagaggaacaggctatgacctaatgcttgcttggaccagtataagcatgcaagggcaaatatttaggctaaattgtgggagctaagaacacaaagtatattaatttctttattacggctagcagatatctaagaatgttagcacaggtctttgaataaattttacttctaagagaagttactatttattcgtaattagacagggaggaaagtctttgaagaggaacctctactttattttttacatagtgattctttctaacacaagggttatatagtatatgttatttatttttgaaatctatgagatttttaaaagattttttaattgtattataatcaaatcacatggcctaaatattactcacccttgcatttgaagatttctgttcagtgaagtgtaccatagtcaaaatgaagagatcatagatgtaaagaagatatttgcagtatctaaaatgtatatatgaggctgatatgtaaagatatttgcattatctaaaatgtatatatgaggctgatatgtaaagaagatatttgcaatatctaaaatgtacgtaagaggcctggcacggtggctcacacctgtaatcccagcatttttggagaccaaggcaggcagatcacttgaggtcaggagttcaagaccagcctggccaacatggtgaaaccccatttttgtacaaaaaatacaaaaattagctgggtgtggtggcacgcgcctgtagtcctagctactcgggaggctgaggcatgagaactgtttgaacctgggaggcagaggttgcagtgagctgagattgcaccactgtactccagccttgggcaacagagcgagactccgtctcaaaaaataataacatgaaaaataaatctatgagaaatgatcttcttttggcttcataataattccaatgtccatcagtaaattagtatcaactaagctccaggctttattcaaatgtcactagtttttcccatcatcctttttgttccagattcccacccaggatactgaattgtacttggtcattttgtgttcttagccttctgtggtctgtgacagtttcttaaacttttcttgcttttcatgaccttgacaattttaagaagtaaaggtcaggtatttttcagagtgtctctcaatttaggtttgatgtttttctcatggttacactggggttatggtttttagaagactatcacagacatgatgtgtctttctcataatttctcatcagcgatccatgctatcaataagacttcctactggcttctccgctgtaaattacttcccccccctttcataccttattctaaatcttgcctacatgcaggaaggccgtgaggtctcattgaaggaaaattatctacacaagttactttgcaattcttctttaaggaagatttgtctcttcttcctttagttttaaattaatcaaaaatagctttttagttttaaattaatcaaaaataaaataaaaaatttagtacctcagtcatacttgccacatttcaacagatcaatagtcacctgtagcatattggacagagcagaagtagagcattttcatcattgcagaaagatctacggacagcactgacttagatcattagtcaacctttcttcttcccaaatatatgcatttagaaatataaattcccatgaaatgctttagttccatcccataaattttgtggctgttttcaatatctttcagttcaacattttccttttttcactgcaatttcttagaggagctatgggttattcagaatgaggaccaggactggggtgagataagcaaggaggctgaggcacattaaggagagacccacgcccagcttcaggtatggcatattgtcaccttaggttccctgcttgcctcaccctagtcccagccctgtttagaaatgtattgcctaatttaggaactttgggttttttttcagtgatctttctgttactgatttgtaagttgattcccgtgtactcagtgggtaactacaaagagccccacagctaacatcacaattaaagtaaactattctacctgagtttgagaccaagaaaagcacacccatgaaagccacttcaattcgcaaagcatttggaatagccaaggcaattttgaacaccaaagttggagaaatgaaactaccacatggaggattatgcaaagctacaataattaagatactgcagcattagcacaaggatagagaacaggacaaatgaaatgaaatagattccagaaacacatatatacaatcatacctgattcacacagtttccacggcaatacagtagggaaggagtggtctttttagtaagtggtgctgattgattttgggtatgtatatgaaaaaattagtcttcatgccttatcacaccattaacaaaaaatcagtttgagatgtctcatcaaaacagtaaagcttctagaacatagaaggaatatctttatgtcgtttgtagacaatttcttaaataagactcatgaaagataaaccataaaaccacgatttagatccaaatatgggacatttccagtgccccagcacccttcccagtcgacagcccagtttttaaaaaggtaggagggggcaaaacttgaatagacatttaataaaaagaaatactcacgtggccgataactatataatctcaaggtccattaatcctcagggaaatgcaaattaaagccacaataaggtaccactacaatttcaagagaagggcacttactaaaaggactgacagtaccaagtgctggatcagtagcagtggaattcgcagtatcggtggtgggaatgtaaatcgtttcaatcactctggaaatgtatttggcagtatctacactagacagctaaatatatgcagttccagcacttctcatagctatatacacccacgagaaatgattacatgcttaccaaaagacacgcacaagctcatagcagctttattcaaaattgccaaagaatcagcctcaaagtccatcaacagtgaaataaatttatacaaaactgccacagtcactcaacaaaattctacccagcaatgaaaaagaatgtgctactgctacacacagcgaaaatgcatctcacttattttatttcattttactttattttgagacagtcatgctctgtcacccaggctggagggcagtggcgcgatctcagctcagtgcaaactccccctcccaggttcaagcgattctcctgcctcagcctcccgagtagctgggactacaggcgcccaccaccacgcttggctaatttttctattttatgcagagaaggggtttcactatgttggccagcctggtctcaaacttctgacgccaagtgatccacccacctcagtctcccaaagtgctgggattacaggcatgagccatcacgcccagccatctcacttattttaaaaagccaaagacaagaatctttgtgtgattccatttatttaaagttcataaacaagaaaaacctctgaggtcagaataagggatgccttgttgggagcatttgactgggaaagggctcaaagactttggagctacttcttgacaatagggagctgatgagatgtcactgtgaaaaacaacctgacagttgatgacattgcttgctagcatctacagccacaatgcacatatggcctagcctcacttctgcctttcggaactcctggaagtcagtcgaacatattttcagctagaatccttgctgcaagggagtctggaatctctagtgttcatagccgtcttctttttagtttttacaggagaagactgagggtcagtgttgctaacaataacggaagccataccacttgatcctggctgaactgaagtttgaataataacttttgtttcacgagggaacccttgcagttgctccggctttttaaatgtttgatggtccttggttttgtgctctatttcctccttcaacgtcaaaaactgtagccggcacttggaacactgaaggaccctccttctgctgtgcctccaacaatgattcatgtatggtattgcagttttgaaaagtttgagacaaaacagacaaagcaaattctttgtgttttcatggcacgttctaaaatgtgtttccacatcagcaaagaccgacgatctgtaatggcaaacctggcacacgtagggcatttcgccaggcttatgatggtccttcatgtgttgtaagaggacctgatctgtttcaaatgacaattcacagattttacagacagcagagggccccatggcgatgtgtacactatcaatgtgacactgtagctggaagggagtgggaaactgccggtggcagtgctggcaggtggtgtggtcttcccagctgtcgttcctctgcttctcaaattccaaatgatgcttcatgtgattcataaacttaatattttttagaactttcacgcagctgaggcatttaaaggtggtgtgagtcttctgttccggctgcccatctcctttatgctgtccatagtaaaagttgctaagtaacacgatgggattttctttcttgggatcaaaggtcttgttttgacttgctagacttgaaatgtctgtcattgccaggccagactcatttgctctctctggatctgtaagattgaaatgtgcctttccattagcatcaggccaaggaaatgttactccattctgaacatggtttgatgagttgcagatcccctgtgagggtgtatttgtgcttattgtagaagacatatctgaagggaccacagctaaagaaggtacccctgggattccatccctgagtttaacccttttggaatctctgctgtttatatctgaagtggaaagtcgctttgaatcaggagaactctcatttctgcctcctccagagaccatagctccaactagacactgagtccctggggggagcgaatctgagtaattgggagaaacaacttgtggtgagctcattttataaccaggttcagatgaagacttcatagtgacaggactatctgtcgatcgcccctcagacagagaaacgggcatgatggcttttgccatagaggtcacatgatttgcaggctgcgacacgtgagcaggatattgacggaagtggcctttctttcttcttgactttgagcctggggtgactctgttcaaaatgtttgaaacgactggttttgaatttgaaatcatcccgacaaagagaacttcagcatctctatgtacatgctccaccccaacatagatcagatctggatcttcatcatcctcctccctttgtttggattctctcaaattcttctttggtgattccactttcttacacaaaaagatatctcccattttcaatttactttttgcttgaagccactggtctcttcaacttccagagctgtctttttacaaattgccacctaagtgcaaccatgtgacaatagtcaatatttatttcgaaagacaaaatcattactttattgtatcctcccttaaaacactgagataaccatcaacatctctattttacacgtcagaaatgaggcttgaaacattttaaatggcataataatttcaaatttacctgtctctcctcccctggtcttctgcagttgtgaggcaaaggaagcaagatttcaggaggtgcagatggaacatctcagagtgcttgcctctaaattttgcactctagatgcctcactcacctcctcctcatcccacaggtactctctcagatgtctaaggtttctaaccaacttgaacaaaacttctctcaaaaacattctgctcctagcctgggcaacatagcaagaccccatctctacaaaaaaatttaaaaattaaaaaaaattagcttggcatggtggtacacacctgtggtcccagctacttgggaggctgagccaagaggaacacttgagcccaggacttcaaagttatgttcatgccactgcactccagcctgggcaaccaaatgagaccccatcacacaaacacacacacacacaaatcacaacacacacacacacacacacacacacacacaccctttgctgttcctgtaatgttccttttctcagtaaactcagttgctcagtctacaaacttcagagtcatcctttgccagactttctctcatacactacagccaatcaattagcaaagctagtctgctctatcttttaaagatatccagaatctgactactctcttccacatctactgccacctccctgatggaaggtaccatgttctctccctggatcactgcagaagttgccagtcttaaaagttttgtcagatctccccatggtggccccaatgcccctgttaaaatatacaggggagcaagtatattttgctcttaagtcttcaatgactttccatttcattcataggaaataccagcaaactttaaatttctccatggaaccttaggtcatcatcgcccttgctaactcctctgttgctctgatgcagccatcctgagctccgtgaatctggaacacaccaggcctttttctttttcagaacttttgttgttcccggacattgcgtgcctctttccccagattaaccccatctgggctcctggtctgcctcagtcccatggttcctcttcagcaaggcttacctgaccacaatatcaaaaatcacaacctccttaactcatatgttcaaaccctcaatgttatttttcaacttagcatttatcactgcctaccacacaatatgtaaaatatatcttgcaagcccaggagtttgagattacagtgagctgtatcatgtcactgcatccagcctgggtgacagaggaaaggaagactctgtgtcttaaaacaacaacaaaaaatgggacaggtgcagtggctcgtacctgtaatcccaacactttgtaaggccaaggcgggaggattgcttgaggtcaggagctcgagaccagcctgggcaacatagcaagacccatctctacaaaaaatttaaaaatataacttgtttcttttctgtgtttacccactaaactgtatgccacatgagggcagggagttgtgtttcatttactcctcagcttatagagcaatgtctgtcatactgtgcatgctaaatctttgttaaataaatagtagctgttattaatatgatcatttaggtgtaccagaggctctaatccattattccagattctctaagcatttaatgaaatccaaatccaaatgatttaatactgttgtacaagggagaaggtaaacctgtgtgtatgtgtgtgtaaattgaaacaaaagttttgtcaaatactctaataccttcaccttaccgcaagggataggctctgataccttctatgccatattttattgattctaaggtataggcttagatttccattttaacatctctaaatcagattgcatctcatcatagcatctcatcaatataaaatacatttcacaatttgtttttgcagtatatatttttatttcatagtggaatcaaaaatgacatatctcagatccttttgtgaggataagcgtgatgcttgggttttcactcatgtgagatgtgcttccctcaaaccttgttatatcagcatgtttaacatctgatgtaaaaaaaaaaaaaaaaaaaggagagtaatgtatcttttataattgatggcatctttttttttttttttttgagatggagtctcgctctgtcgcccaggctggagtgcagtggcgcgatctcggctcactgcaggctccgccccgcggggttcacgccattctcctgcctcagtctcccgcgtagctgggactacaggcgcccgccacctcgcccggctaattttttgtatttttagtagagacggggtttcaccgtgttagccaggatggtctcgatctcctgacctcgtgatccgcccgcctcggcctcccaaagtgctgggattacaggcatgagccactgtgcccggccaattgatggcatcttatagtcagtgaaaaatcctatttctttttgtaagctgacagcccactaaacttgttttgtagttctctaatggatatcacctacattttggcaaacaatggtttaagacagaaattggaaaattggcccttcccctgtttttgtacagtcaggaagccaagaatgtttcttacatttttaaggtattgttttcttactttttttttattaagatttttttaaacttgtacatttttagatttgggggaataaacacgcaaaaggaagcggggcgcggtggctcacgcctgtaatcccagcacttttgggaggccgaggtgggcggatcacttgagctcaggagttcgagaccagcctggccaacatggtgaaaccccttctctactaaaaatacaaaaattagccaggcatggtagcagatgcctgtagtcccagctactagggaggctgaggcaggagaatctcttgaacctgggaggtggaggttgcagtgagcgaagatcgcaccactgtgctccagcctgggtgacagagtgagactgtctcaaaaaaaaaaaaaaaaagaaaaaaggaatattttgtgatgtgaaaattatataacattcaaaatgtcagtgttcactataaagtgttgtggaacacagccataatcatttttttagtgctgttgtccatggctgctttcacacttctatgacacagttgagtacagtagtacccccttatctttggggcatatgttccaagacccccgaagtggatgcttgaaactgcagatggaaccaaattcaatatatactatattttttcatatatgtacatacctatgatcaagcttaatttataaataggcacagtaagaggttaagcataacaaaataattataacaatatactgtaataaaagatatgtgagatagtgcgtggtggctcatgcctgtaacctcagcactttgggaggctgaggtgggtggatcacctgaggtcaggagtttgagaccagcctggccaacatggtgaaacccatctctactaaaaatacaaaaattatctgggcatagtggcgagcacctgtaatctcagccacttgggaggctgaggcaggagaatcacttgaacccgggaggcgtgggttgcagtgagccgagatcgcgccgtggcactccagcctgggcggccagagtgaaactccgtttcaaaaaaataaattaataaattaaattaaaggtatgtgaatgcaatctctcgctgacaaaatatctttatgtactgtagatcttggcaaccttagcatacgattttgttttctttccttattatgttaaaaactttcccattttcacttaaaggaagcaagcactttacagcttctttttggcatatttcaatcgccagcattgctacccttgtactttggggccattattaagtaccataagggttaattgaacacaagcactgagataccaccaggacagtcactctgataactgcgaccgctcctaagtgactaaggtacagagagcgcagccagccaacagcatggggactcaggacaaagggaggattaccatcccagggcagggctgactcaagagcttatcacactactcagaagggctggcgacttaaaatttatgtattgcctatttctggaattttccaattaatattttggaacctcaggtaactgaaagcacagaaaggaaaaccctggataagggaagactactgtagttggagcagagaattgcaatacctaaaatatttgccatctagtctttcacagaacaagtttgccagctctagttttagaggagcaaaatgaaagatagcaaatttctcagctcaccagttcctaaagttgcgagtgcatccagatgattcagtgcagctcagtatgttccactctgggccacaagggaaagcgaagctggagcttccttgtctccacctccgggagaaatttgtccagagaccggcagcactgcttccgcaggcgaacaacgccgcttgctcttcaaagtcctttctgaggccagatcagaaggtcccactccttttaagccccttattgcccaatcatttttccagtcacgtgtctgaagcagtttatcctgattggattttcagttgttgtccagcttgattgccaaaagttttcctccaattgctactcaaaggaaagaatgagggtggggcttcagggctgctttccaggttgattgagctgctgatgggcatcctccctcctctctctcttgttcagagtctaccactttctctgcagtgtgcctgggccctcagctattggggatgagaagggatgcggagtgggaggcagtccacatgtctgttccaacaaagctcagaggtgagcgagttaaaaagcagatgtctttccagtaggagccccaggggacagggtgggtctcacagcccttgaagaccgagctcccgtaggagtttccaggtgtccaaacagggtcctcactgtgagtcttcaacagctttctccaagcagcagcccactcccttcttaatccatttccaggggtcaaaggtctatcctggttccctcccatgccctctcacttccttccctctgtctctccctcctccctcctccttcactaccccctccctggaaccttctcagctgaatttcaggcccaccctttcactctctttacaggctttgcaacacagattagaaagcgggggagggggagcctcaagagtcccttgacaggtaagaaatatttatatttccacccccattccaacgcaatgcaatcaagtctcaaaattaaaacgaaaatcatttgcaaattaaaatgttctaaagtaccatctcctgataaaactttaaaaatacctttctgggccggatgtggtgactcacatctgtaatcccagcacttttgaaggccgaggcagcagatcacatgagcccattagtttgagaccagcctggccaacatgatgaaaacctgtctcttattctttataaagtaaaatacaaaaatttcctgggcgtggccgtgcgtgcctgtaatcccaggtactcgggaggctgaggcagaataatcacttgaacccagtaggcagagcccaaggtggtataaaagtgtgtgacccatggtctttattcttgtctagggactggggaaaggctgcttgagggcattgcaagtagccaagagcatgcccctggaaaggaaggtgaaatgaggcccgctactgaggtacacctgtagtcccagctatcaaaggctgaggtgaaagatctttgagcccaggaaatccagacaaacctcagcaaaatatcaagacctctgtttctacaaaagaaaaaaaaaatttttttaattagccaggcattgtagcacgtgcctgtagtcccagctacccgggaggctgaggtgggaggattgcttgaaccagggagatcgaggttgcagtgaactatgattgcatcacatactttagcctggatggaagagagagaccttgtctcattcattcattcataaataaataagcaagcaaagtgaaatgaagtgcaagacttagacagtaaagttctaacaggggccgggcgtggtggctcacgcctgtaatcccagcgcttaggcagaggcaggcaggtggcttgagcccaggagtttgagattagcctgggcaacctggcaaaaccgtgtctccacaagaaaatacaaaaaattagcctgggtgacagagtgaaaccctgtctcaaaaaaataaaaaaagaaaaaagaaaggaagacagagaaagaaagaagtaaagaaagagaaaaaaaggaaggaaagaaaggaaaggaaatgtgtattctgcagaactgatattcactccttcctcttttccagaagcagaatcctgctaggaagattccaggaagcctaggcagtggtcaggggctggctcaggtataaagcaggcccttcccctgagacagaaggttgtggcaacaatgcttgtgggaggtgagaaaattgagaggagtgtctagaaatagctcggagttgcatcttattttcttttgctcagttttaaaagtcccaaataagaccacatctagctgttctaaccaagctattctaacccactaatctagtaaaaataaaatcacatggtctgaatataaatttgcatcaggatacatgcctttcctatgaaacatttatgtttccttataaaatgtatcctccttttctgcagaaaactaactgtaatgcatccaaaggtcacagaatgtggtgaaacatcctcatcattgatttttaaaaaaatttttatttatttatttatttgttttttgagacatggtctcacattctgttgcccaggctggagtgcagtggaacgatcatgcagtcttgatgtcctggacccgagcgatcctcccacctcagtctcccaagtagccaggacaataggcagatgccaccatgtctaactgatttatttttatttttgagtagagatgaggtctcactatgttgcctgaactggtctcaagctcctgagctcaagcaaacttcccacctcggcctcccaaagttctgggattacaggcgtgaactacccgcaccctgccctccataactgattcttttttttcagacttcactctgttggccaggctggagtacagtggcgtgatctctgctcactgcaacctccgtctcccaggctcaagcagttctcgtgcctcagcctctcaagtagctgggattacaggcatgagccaacacgcccggctaatgtttgtatttttagtagagacagggtttcaccatgttggccaggctggtcttgaactcctgatctcaggtaatctgcccacctcggcctcccaaagtgctaggattaaaggcgtgagccaccacgcccagccatagctgattctttatcagtctgcctttgggaagtttccactgggaaacactctccaggactgtttcggaccagccccactttccaaacaaagaattccagtgatgagattaaagcttgtcacaatatgtttttcaaatgactggtagaagcagaccttaagattaaaaaagaagaagaaaaaatggctgaaatcttgaatcctttattgctttaaggcacagaataggaaatggatggcgcgtcgggaatggatgcaggtcagggacagaccatcactcatgccaccttgctgtgtttatgaaacagagtgctagaagttaaatttgggggatgcacaaagagatgcctaatcagatgaactcagagttggaattgctgtttgtgagacagttacatcaaaggaagaaaagaaggagagaagaaaggtgactatcaggagaattttccagccagaagaaagacacagaggcacaggcatttcatggcctgaaaaaggaagagcacagagacaagtgtggctccagttaaaggaccagcggagatgaaagatgaggtcagtgatttgggtaggggacatagcagttaagatattgttggtcaaggctgggcgtggtggctcacgcctgttaatcccagcactttggcaggccaaggcgggtgaatcacgaggttaggagatcaagagcatcctggctaacacagtgaaactccgtctctactaaaaatacaaaaaaattagccgggcgtggtggcgggcgcctgtagtcccagctacttgggaggctgaggcaggagaatggtgcaaacccaggaggcggagcttgcagtgagccaaggttgcaccatagcactccaacctgggtgacagagtgagacccagcctcaaaatactactactactaataataataataataaaaacaaaacaaactaaaacactcaggagagattagtggtctaaaagcatatttttacaatgtattcagggttattccattgtttcttaaaaactacctttgggagcatctccccaaacttagtttggaagtgttttttctgggttgcaataaacaagcaaacaaaaaactaccttttaattaaaagtaatccttaaatagagctaacaataaaatcaaacacacaaaaaaattatccattttaaaattttttttatatgaagtcttgctctgttgcccacccaggctggagtgcaatggtgccatctcggctcactgcaaccttcaccccccgggttcaagcaattctctcacctctgcctcccaagtagctgggactacagtcacgtgcgagcacacccagctcatttttgtatttttagtagagacagggtttcacaatgttggccaggttggtcttgaactcctgacttcaagtgatcccctgcctcagcctcccgaggtgctgtgattacaggcgtgagacaccgcacccggccaaaattcatccattaattgtaaagtaaatttcccttctgccccagatcacagttacctgtctctattcccaaaataaatggctgtgtagaatttctgatgtgtccttcaatatatattctctgcatctacatacacttaccttcccctacctttttatgtaaatgggtgtttattattcacatactccgtattaaaattgtgatttattaacataattttactgacattttaatttgaatggagataaatttataaaggggattgatgattaagattttatgtttaaatattcggaagcaaacagtaatgcatcttatcttctgagtaggatgtgggttgaaactgcaaaggcaagcatgagatgtttcattaacacaaagccttgagtgctccaaacccaaaagtcaaagcaacttatcaataaatgccaaaggatgctattctgacatatctgtgtgctgtggtttgaatgcagactccaaatctcatgtgtgggaaacttaatttccaatgtgggactattgaaaggtggggcctttaagaggtgattgaatcatgagggctctgccttcatgaatgaattaatccattcgtggattaatgggttgatgggttaatggcttatcatggaaggggagctggtggctttataagaagagaagagagacctgagccaacatgctcagcctccttcatgagatgccctctgcggcatcaggatgctgcagagacccccaaccaggtaagaaggcttttaccaggcatgccccctccactttgggcttcccagcctccataactgtgagaaattcattttctttataaactacccagtttcagatattttgttgtaagcaacagacaacggactaagacactgtgttatctaattatgtgattcttgttttactatttatttatttagccacttgtcagaaaaatttttttttttttgagataaagtctcactctgtcacccagactggagtgcagtgctgctctcatggctcactgctgcctcgaactccctggctcaaacgatcctcccaccttagtttttcaagtagctgggactactacaggtgtgcgccaccatgactggctactacttttttttttttaatattgcccaggctggtctcaaactcctggcctcaaaagatcctcttgcctcagcctcccaaagtgctggcattgtaggtgtgagccaccacacccagcccaccaaaagttttttcagacatgtacctgagtgattaagagtttaggattggctgggcacggtggctcacgcctataatcccagcagtttgggaggccaagacgggcagatcctgaggtcaggagttcaagaccagcctgaacaacatggagaaaccccatctctactaaaaatacaaaatttgccaggtgtggtggcacatgcctgtaatcccagctacttgggaagtctgaggcaggagaatcgcttgaacccgcaagggagaggttgcggtgagccgagatcgtgccattgcactccagcctgggcaacaggcaacaagagtaaaactctgtctcaaaaaaaaaaaaaaaaaaagagtttaggatctatattcgctctgcctgggtccaaatcctggatgttattaactgtatgactttgggcaagtttattaacacctccattttaaaaaaatctgtactaggaatataataataaatgcataccctctcaggatttgattaaatggaataaaatatatagaattcctagaacagtgccaggagtttgaggccagcctgggcaacatagtgagaccccatctgtacaaaaaatacataaaaaatgaggggggaatagcggtgcacacctgtggactcagctacttgataggctgagatgggaggattgcttgagcccgggggccaaagctgcagcagtgcagtgactgcgtcccagtaatcccagcactttgggagggcaaggcaggaggatcccttgaggccaggagttcaagaccagcctgtgcaacataaagagactccatctgtacaacaacaacaaaaattcttacgcacttagtatttgccagatataatgccaatttctagggcacaaaggcaaatggtaactacctccctggattgttgtaaaaataaagcatgcaaaacattttgtgcccccaatgatcccttcctcatggtgtccccacacttttattttgtgctgtcacaatgagcagggcaccaccaggatactgggaaataatgacgtgtgatttccaagaccaggtcacaaaaaacattttgccttgccctcttgaatcacctgctctggtggaaaccagacaactgttatttatgtcatagcattcaagcggccctatggagaggtccatgtggtaaggaactgaggcttcctgccaacagccaagtgaaagagccatcttggaagaggatccgcctcccaagttggccaagccaacattttgagtataacctcataagagtctctgagccagaaccacacagctaagctgcagtaactttgaagtaataatgatttattgttgttaagccactaagttttgggataatttgttatgtagtaatagatagctaatacagttgtgcttattacgtttggtactcgttactatcaccaccacatcagtgcattgtagaaaacaaattctatgtattaaactgttttgtttcccctctggattaagctgggctcacaaggggaaaggtgcccaccagagtttttttcttttttatgtaatcaagtttttaaaattttattctattctactttatttttttaagttccagggtacatgttcaggatatgcaggtttgttatgtaagtaaacatgtgccatgatggtttgctgcaactatcaactcatcacctaagtattaagcccaatatgcattagctctttttcataacgctctacctccctcctaccctcccgtaaaaggccccagtgtgtgttgttcccctccctgtatccatgtgttctcattgttaagctctccacttataagtgagaacatctggtgtctggttttctgttcctgcattagtttgctgaggataatggcttccagcttatggatgtatagtattccatggtgtgtatgtaccagattttcttttttcttttctttttttttttttttttttgagacggagtctcactctgtcgcccagctggagtacagtggcatgatctctgctcactgcaacctccgcctcccgggttcaagcgattctcctgcctcagcctcccgagtagctgggattacaggcgcataccaccacgcctggctagttttttgtgtttttagtagagacggggtttcaccgtattagccaggatggtctcaatctccttacctcaggtgatctgcccgcctcggcctcccaaagtgttgggattacaggcgtgagtcactgcgcctggtcagtaccacattttctttaaccagcctgtcgatggaaatttgggttgattccatgtctttgctactgtgactagtgctgcaatgaacatacacaaaattatctgaatgattgcagtaaacatcatatatttgtttgccagctaccataataaaataccatagattgggtggcttaaccaacagaaatttattttcccacaattctggaggctggaagtccaagatcaaggtgttggcagggttggtttcttctgaggccttggcttgcaagatggccaccttcttgctatatctttacatgatcattcctctgtgcgtgttcgtgtcctaattttttcttcttataaggacaccagtcattttggattagggctctttcatatgacttcattttaatcttaactgcttctttaaaagccctatctggaaataaagtcacattctgaggttactgggggatagaattacaacaaatgaattttgggaggacacaaatcagcccataacacatcattgccagcatcacatgtggagcattcaactggagaaactgccctaatttctcatttgaaggtctaaacatctcttttatcaaaataagccaggttctattaagaaggctgaatgtgcatctggctcgatcaacaggcgtctggctgcttcaaatgcttgatttttttcattctcagagaatgaaatcaatgttgaaatattgagtatattctatacaaaatcttcatgtcacaatgaataagaaaagtagttttttttgagacaggatcttgctctgtagctcaggctgcagtttttggagtgcactggtatgacataactcgctgtagcttccatttcttgggttcaagtaatcctcccacctcagcctcctgagtagctgggactataggcatgtgctaccactccaggttaattattattattattatttttgagacggagtctcgctctgttgcccagcctggagtgcagtggcgccatctctgctcactgcaagctccgtctcccgtgttcacgccattctcctgcctcagcctcccaagtagctgggactatagacgcccaccaccacacctggctaatttttcgtatttttttagtatttttttgtatttttttaatagagatggggtttcaccatgttagccaggatggtctcagtctcctgacctcgtgatccacccgcctcagcctcccaaagtgctgggattacaggcgtgagccaccgaatccagccactccaggctaattattttattgtatttttagtagagatggggtcttgctatgttgcccaggctggaatcaaactcctgggcttaagcaatcctcctgccccagcctcccaaagtgttgggattataggcaccagccactgcacccagtcaagaaaatattttctaatactgaatacagctaaagaatggatggtaaaccattattgtccagtcaggatcactgtcatccaagtgggacactcagtatttgagattctgggtggtgctataatacttgttgccttggtatctgagtgagcacttagtctaagtataataattttctggaggagtatattagggttctccagaaagacagaaccaatagaatggatgaatagatagatggatagatagatagaaagatagattgatagggccgggcgcggtggctcacacgtgtaatcccaccactttgggaggccaaggcaggcagatcacgaggtcaggagatccagaccatcctggctaatgtggtgaaaccccatctctactaaaaatacaaaaaactaaccagacgtggtggcaggcacctgtagtcccagctactcgggagctgaagcaggagaatggcgtgaacccgggaagcagaacttgcagtgagccgagatcacgccactgcactccagcctgcgacagaacgagactccgtctcaaaaaaaaaaaaaaaagaaagatagattgatagatagatatgtgagtatgtgaggggatttgttaggggaactgtctcatgcaattatgaaggctaagaagttccacagcaggccatctgcaagctggagatcctgggatgctgacagcatggctcactctgagtccaaaagcctcagaactagcggtgtaattctcagtccagtgctgaaggcctgagaagctagggagtgagggtgcactgctagtgcaagttgtggagtccaaagaccagagagccttgagttgtgacatctaagtacaggagaggaagagtgtatctcagctccaaaaggtagatcaacacattcacctttcctctgtttttgttattttcagtactggcctttggatggcacccacctacatggagggcagatcttccccacctagtccactcacactcatgcgttaatctcttctggaaacacagacacacccaaagatagtactttaccaggtttttaggtattctttaatccagtcaagatgacacctaaaattaaccatcgcaagggtatattcaatctgaatggccaaaattatctgatagagccttcagatacttgtacttaacagatgtactcttgggattaaatgagtttatgctcaagaaatgatattagccaggcataggggtgcatgccgttgtcctagctaccgtggaggctaggacaggaggagcattgcttgagactgggagcttgaggctgcagtgagctgcgatggttccactgcactccagcctgggtgactgggcaagaccccactgcaaagagagagaggcagagagagagagtagaaatggtatctgttattttacattaaaagttctggaataggggagtgctatggtctgaacgtatccctccaaagttcatgttggaacttatgacccaatgtgatagtattaagaggtggggcttttacgagatgactaggctattagaggcctacccttatgatgaatgaattaatgtccttatcaaaaagattccatttccactatgctgagagcggaaaacaaacaaacaaacaaacacaaatgaggttccacacagcactcatcctttttgcccttccacccttctgccatgtgaggacaaagcagcaagtctccattttggaagcagagagcagccctcaccaaatctgaatctgttggtgccttgatattgaacttcctagcctctagaactgtaagaaatgtttctgttttgttgttgttttttccgagacgaagtctcgctcttgttgcccaggctggagtgcaatggtgtgatcttggctcactgcaacctccgcctcccaggttcaagggactctcctgcctcagcctcctgagtagctgggattacaggcacgtgccaccacgcctggccaatttttgtacttttagcaaaagtggggcctcaccatgttggccaggctggtctcaaactcctgacctcaggcgatctgcccacctcggcctcccaaagcactggaattgcaggcacgaaccaccgctcccagctgagattttctgttctttgtaaattacccagtctcaagttattttgttatagcagcaaaagcaaattaaagaaggtataatatcaggctctcttctgattccctaggctctgctgcacgaattgttatttccagaagttcccataggaagttctcaggaaatgaaatggatatgaggtaacctcatgtcggggagtcagtctatggaggatcataatcatacaacaacatggtccacccttgctataatctattttttttttttttttttgagacggagttgctctgtcacccacgctggaattcaatggcgtgatctacgctcactgcaacctctgcctcccaggttcaagagagtctcctgtctcagcctcctgagtagctgggaccacaggcacacaacaccacacctggctaattttttggatttttggtagagactgggtttcgccatgttgcccaggctggtcttgaactcctgagctcaggcaatttacctaccttgccctcccaaagtgttgggattacagtcgtgagccactgcacccagctgttttctgttttctgacttttatttttgagacagggtctcgctctgttgcccaggctggagtgcaatggtacaatctcggctcactgcaacatctgcctcccgggttcaagtgattctcctgtctcagcctccacagtagctaggattacaggcgcctgccaccacacccagctaatttttgtatttttagtgaagacatggttttgccatgttggccaagctgttctcaaactcttgacttcaggtgatccgcccaccttagcctaccaaagtgctgggattacaggcacgagccactgcgcccggccttgttttctgttttgtttgtttgttttttaagagatagggtcttgctctgtcagctaggctggagtgcagtggcacaatcagctcactgcagccttgaactcctgggcccaagaaatcctcccaccacagccttctgagtagccaggactataggtgagcactggttaaatttttaatttttttttgtagagacagagtcttgctatgtagtataggctggtctcaaattcctagcctcaagtggtcctccagcttcagcctcccaaaatttgggaatttcaggcatgagccactgcatctgaccgtacaaaatgttaataaactggccaggtgtggtggctcatgcctgtaatcccagtactttgggaggctgaggcagggagatcacctgaggtcaggagtttgagaccagcctggccaatgtggtgaaacccccatctctacagaaaatacaaaaattagccaggcgtggtggcccatgcgtgtaatccgagctacttgggaggctgaggcaggagaatcgcttgaacctgggaggcggaggttgcagtgagccgagatcagagcactgcactccagcctgggtgacagagtgagactccgtctcaaaaaaaaaaaaagttaataaaccttttactcctggcctcaagtgttccggctgcctcagcctcccaaaatgctgggattacaagcatgagccatttatttttctttttttgagacgggagctcactctgttacccaggctggagtgtagtagcatgatcacaactcactgcaaccttgaactcttggattcaagtgatcctcatgcctcagcctcctgagtagctgggactataggtgcacactgacatgctcagctcattcaaaaattttttcataagagatggagggggggtcttgctatgctgcccagcctggtcttgaactcctggactcaagcgatcctcttgccttggcttcccagaatgctaggattacaggtgtgagctactgtgcctggcttttgatttttagacagggtcttgctctgttgccgaggctggagtgcattggtgtgatcatagctcactgcagccttgaattcctgagtttaagtgatcctcctgcttcagtctcccaagttgctaggactacaggtgtgtgccaccacgcccagctactttatgaacgttttgattccaaagtctgaaaaaagttttccagattcatctccaggtcaaataatgtccctgctgtcaggcatcctgctttagaagcaagatgtagcatttttcttcctttacttgcagcaggcagctaataactgttatcctgtgctggaccatccatgttctacgcattctaacatgtgctttacataaaaaattagcccaagtgaccctcactgtgacattacacggtacgtattattaatctttttttttttttttttttttttgaggtggggtctcactttgttgccaaggctggagtacaatggctcatgcctgtaatcccagcactttgggaggttgagttgggaagatcccttgaacccaggacttcgagactagcctgggcaacataggaagacccccatctctagaaaaaataaaaacatagccatgcatggtggcatgtgcctgtggtcccagctacttgggaggctgagaaaggaggatcacttgagcctgggaggttgaggctgcagtgagccatgatcatgctactacactccagcctgggtgacagagtgggaccctatctctaaaaagagagagagagagaaagagggagagcttttaaaaaatggcaaaatgtgcccacagctgatgggcctatttttcttttttttttttttattgagacggagtcttgctctgtcacccaggctggagtagtggtgtgatctcggctcactgcaacttctgcttcccgggcttaagcgattcccctgcctcagtctcctgagtagctggaaatacaggcacccgccaccatgcctggctaatttttgtatttttagtagagacagggtttcaccacattggccaggctggtctcgaactcctgacctcaggtgatccgcctgcctcggcgtcccaaagtgctgggattacaggcgtgagccactgcacccagccaatttctatttcttatagagcttacggtaggaggcttgaagatgggaacagaagaaaaaaggttgaagggcccagctgctgtgtgttgcaagacaggaaattgctgacagtctgcaatgccagcagcctcatgggtggttatcaccaggacagaggcctcagaacaggcaggactgggtgtgctggcactcacggctacgtgcagatagagcccgcccctgggccttggtgtgtgaccttcttcccaggtgcttctttgggaagctgtacagtgagggagatgaggcagactaagggcaggacacactagcataggagcggtggcagctaagtaggctgactgcccagggattgcagagttcacctgcacagtatgacatctctcatccttttggatagattgttctataaggtggcctccacctacccccaactcccaaatctgacattcattcatctacttcccctgaagtgctccctagcacttgccatgagtttgttcactcttgggaccccaaatccaaggcatctcactggctgagattcagtttaccacctcattgatggggggactcttatgtcacagaagtaattttctcactgataggacccaagatgtcgtcctatttttaatgtgggtacaaatactaagtaaatatgatcttagtgttttgccaaaaggaattaagatgtttttaatgggtcacaaattcagaaaggggttggacctggtgggacaggttggtgaggcccagaagctccacttcaagtgcagtactggacatccccttccagtacgggaggtctgacttgtgcagtcaagcccaatactggcacagccacaggccagggatggaggcttatgagtccactggaaaacagggaggactgagtccagggtctcaagggtttagtagtgagggctcctgtgaagaacccttcactcagtggtgttcattaccggccccttccttagtatgttccaggccctgaggatgtaccttgcatgctctgaccctttgaacaccaaagaaataagcaaggagataacagatgccccaaagagatgaatggtgtcatgagatctgggggctgggaccttgtccagcctaaaggtgtaagtaccatggatgagcagtgtcttatttaatcagcaactagagatttcctgaggtttaactgggaaagcaggttcatatactacaagacaccaggtgcttcacattgcttctctttattttcaacagtttctttacaacagtctacacagggattaactcctacatgtacttcccaagccagaatctccctttagaaattcagattctatttctaactctataagatgtatctccccaaagatcacattaactcctcaagtcaacatctgcctatccccaacttcccctttttttcctcactgaacatttgtctgaatgttttttcctcactgaacatgttttcctcactcacactgaacatttgtctgaaactgtggctgctttgttgcttcaagatgcatgcacatcctggctttagtgtccaagtatgcagaatgaagcatttgatatgtgcacccagctagttaggcatgaaacaggggcacaggatgggctccgggtcatagaaggttctgtccccacagtgaggacaggggttggcactaagccagaccatgctgggccgccccaactcacacagcaactccctgagcctggcatgcagataggcaagcctctccaggtggagggtaccatggatgtcctcataactctccagggggacaggatacagcacgtgggtcagattgctcagcccgatgaggtgctgcaggagactctgcaaggcagatatggagatggaattcccgtagaagcttaaggttgtaagctgggagcagtggctcagggaaggcaggagggcaaggagctgatcatccgtgatcccacactcatcaaagaccaggtcctggagggtggcagaggctctctccagcagagcttggaggggctcgggacttacatcggtcagcatgaccccacttagactcaggacacttagctgactgacgctgggactctgggacagatgcatcacatccccttccgaaagccggcagttagttattgagagggtttccaaggggttcatcacgtgcctgcaaatagacaaagcagttagtgctggggaatggtggtagtggggtggggagactggagagaggcccatttcaccaaaacccaaagtcttcctgatgatggttaaccgccaggatgccatgctgtaaaggagcattcaaggagtacaagttcaggtttagtcctttctccatcatttgctgtgtaagtgggtcaagtaaacaaagatctcaaacactcccttggctgatctgtgaggcagggtccaacacagacctcttaggtggtgtgagcatgaattgaattgagagcctgatttgatgtctcaagcaaggaaaggcatcagtgaattttagtatttgaagatacaactgaaaatactttctttcaactcgggcttccttctgccactgcctgggccccagtcacctctatctctgtgcctgatgaagctactagggagtattcacagtggacaaactggggcaaggtcagcaacatccaaagggggttcccaggctgcagggctaccttaggtcactgtatcatcagcaaaccacctatcaatttttgcaatttctctgttgttccttctcccacatctccagaatcctgcatttcccacctattaccctaactggaattctaaatcaccctttacagacaggaaatttgaggcaggtttagagggagcagctcatgttgagaagctggtgagcgcacagcttacaatttcaaatctcacctttgatgggctttcccttcttcaatgccctccttgcttacttttgatcatcttaggcatcacttcctaaggaagaatgcctaaagccacccttgccaggccccaacctcccattacagagttttctaacaaggagtcactgttaatagcatctatcctaatgtatacctctaacccttatgagtagtagttatgtgataccatgcttggggacagtggtgaacaagacgtgttaactggtagtgacttgctcactcttgcattattggtggctggcacatacaagatatcctttattgtttactgcaataaggaagggcttgctctggtctgcagagaaatctcaccatccctcacctgagcaactgatccaggcggcctctaaggaaaaataaagagtccacatagagagcctgcaggcactgcagactgaggaactgagaggtgaactgggcgatatactgctcttccttctccggggaaatgtaggaagatgcatggatgtgggagaggaggagtctacgcagattaatcatctggcccaggtaaggagaaaatttcgccaaggtgggtagcttccaggtacaagtcacttccaaatcttcaatagagtccagctgcaccattttcaggatcatcttgatatcctgcatgggcattgcaaaaatcttcagcttcttacagcacaggcgtagtacatttttctttcgcttcactttctcaatgaggtaggagaacaattcatcacaggcaccttccttgaggaacaggtctacgagcacctctactggaatgaagggctgctctgcctctgtgctcaaaccatctacttttcgcttctttgtcatgggctgagctgcttctggctctggaaatgagtacagactggccctgtttccagaccatacagtccagaagtcctgatgagagttcttccgtaaatccagcacttgaagtttccacctcctgtggggaaaaacaggtaattagctgagatgatgctttaagatcaactcaaaataagaccatgagtctcataatgtaggtaagaaccaaacagacatccaccttagatctgcacttttacttcgtacttcaggcatcagctgctccctttcccactaggatcctgggatccttcctggtccccaattcccaccccaccaggaggaagcaggtgcatgttccttcagacacctctgcattttaatcagtgccccatgtccagaagcccattccaagagtgacccctgcagtagccccaaggcctccctgaacttccttgctggcaaccatcagagcctctggcccagccttaggcgctccatgctccctgaccccagctgcatcctgctcaggttcccagggccccacaccaagctgctaggtcacccttacctggggcgaacctcctgggcaaggagcacatcaagtccatcaagcacagctttgaaggtctccaggtgaagatgttgtcccttcatcagcactcccagagggaggcaggtgaagggccaggcctgcaccattgccttcagggtctggctgtgtctcccgtcaaaggctgccatgaagagtggcgggaagagctccctgggcagcaactccagggcggcaatggccagggcctcatccttcagcaggctctgccctgccagctccacaagtctccgtgggcttgtccacacactcatgctgatgtatcggctctgaatggaaccctgaggaaacatacagggaacaaggcatccctttcagcccaagcataagcaactctatcttttcctcacccttctgagggaccaacttagggccaaagtcactgtgctagcaacagcaggggagttctcagtttaccccgattccactctgcactcggtggccacaaagccacagctctgctggcaccaggatgaacatctcatcaagtgtagaggaggggacaggacggccactggcaccatcttgtatctacccactactctatttaattctagtccccctgggaagtgagaactaaggagcctgagggctgaccctgctcattttgggaaaaagtttctgatgatcactcaaaggcaattcaaatgggagtgtcacatagcccaggacagcatccttctctgctccaacaaataagccagatgggaaagatgaggaacacacacacaatgcacaatggatgccattatgtttcactaaaaaattttaaatgagaaactacagaagcagcacaacagtattacatagcaattggaagtacaataaaaaaaaaacattctgagacatgtattttaagtgcgtctcttttacgtatattaagagttactactttgacatggaaatcagcggagcaaacacttcacagtaaaacaaagcctggttcttttctcccaaaacattagttttaaaatggagaaataaaaattgtgtatatttatggtgtacaatatgatgctctgaaatatgtatacattgtagaataggtaccttaagctaattaacatacatatgatctcacatatgtgtggtgagaacacttgaaatatactcttagcaattttcatgtatacaatacattattaactacagttaccatcttgtatactagatatcttgaaaaagcctccaccctccagcacagtggctcatgtctgtaatcccagcattttgggaggccagggtgggagaatggtttgagcccaggagttcaagaccagcctgggcaacacaaggagacctcatctctattaaaaaaaaaaaaaagaaaaaaaagaaagaaaatgtctttaattccaaagcatctgaaaagaaaaagaaaaaaatctatggaatattttttaaccttttagttaaaatggaatattttttaaccttgtagttaaaatggaatattttttaaccttgtagttaaaaaaaagcctaactagtaaatcactgatttaaaaaatcataaatgatgcaaattataattgcttgccacatactatttaaattgtaataaagtaaaattcaaagtagatgtcttttattttccaaaaaaaaaaaaaaagccgtttaagaaattatttttaacatatacaaaatggcagaaatcaaaatgtttgggattcaatataaataataaatgttccaggtaatggttatactaattaccataatttgatcattacatactatatatgcataaactgaaatttcacatgtaccctataaatatgtacaattattgtgtatcaattaagaaatcaatccaataaccaaataaaaatgtttgggattaaggcaaaactacatttagagacaagaacaaagcctgttcctttgtaaggaaagaaaaaggaaaaccatctaagcagcattggccctcatggcccgtggagaccctgaggtgacagtagaaggaggcagtggccatagcctgaggctcccgactcaccagacccagctgtggtgcagaagccatctgcccagacctctgggaagaccacaacattgactccatggcctctgggtccctcctctggcccctctgaagctattacaggcctttctgggcatacctcccctttcaactccacgctgccaacggaagagccaaatctaattacattcctggatctccagccagtgaatcctgatggggttttttacttacttcaggttcaactgattgaatgggatgtctatttacaaaaaggaaagaaaaagtgaacaaaaccacccagagagtataactgttaggggaatttttggccacatcaaaattacccaaatagtccagttaagatagctttatgaagagcatcatgacatcaccccttcccactcccaaacaatccccaagtatcaaattgtcacttataccccatgttccctaacacagcaaatcacatgcctatccaaggaaaaagggaggaacaacagaggggtggctggtcttccagactttgaaagtcaaggctgtcctgaaggaaggtgggtcaaaattacactacaattaggagttagtcagaagtaaggctgggcatttgtaatgggactgagtggattaccacaaagacagataggtttttttgggggcggaattgaaagactttggcctggatggagtagagaaattaaaaaggggaatggctaaggaagatgaaagatagttccagtaaagccaaggtaatcactgaggcagggagggagttcaatcttcctccctccctagagggaaagggtgttttctcccagaaagtcaggatcctcttggcaaacagccttgacaagattaaatctaggaatgtgggctggagaggtgggatagagagtaatattggtgaccaaacctaggacagcaacattttcaagtctgaaagaccttgtggtttcttaggaatcttggagccaggaaagaaataaacaagggctgaaagcacacatccctgcaattaaagaagttgtcagaagaccttctctttatggttaggtgtcctcttccacactggggctgttcacaagcagcaggtcaggcctttaccacaaacataatctccaatggccagccccttcctaagtattactaatgtttccacacttcaagaaaacagctgttctttcttgcccctaagctgctcaggtacagagattctggtcagcgagatgcaatcaggcctatcaattagactcagtttttctctatttccatgctaggcacagtgcacaaatacattttccgtcacaaaaaattgaagttatatttggcatttaaggatctgcttagggatgattcctatcctgggcctgatcacccactggtgcttttgaagttttggaacctctccacccaaagaattctccaggccattctctgcctcatgcactgtgaagtccctacaattcttatattctactggcaagtgtccagctggaatgtcttgcggcctgactttgtttactgtggcctgcgtaaggaggctgtaattcgttgaaggatgttttccattttggttctctctctggagactttctcctacttttcaccctcaacacctaatggcctttgtgaaaaccgggttaaactacaatttgttctacatttcctttaattcccaggcaatcatcttcactcatcagctgcgggagactgagattagtaataaaggtcattgtcaatgtccctaattatcaagcagctactgggcacagcaaaggccgcagcagctctcattcattacctcaaatagccttcacagagaatctaaagttcactgtcattttcatttttagtcttgtaagtccctgactctgtctggggaagaacctgctcagctccaagcaagcaggaattggtagcccttatgtgaggagtttagaaagagtttcatttccctccctatcaaacaatctaagtgttagaaagggctgataagcttcacataaaccatggaaaaacaggaaaactgagtaagtccaacagttaaggaagcttccatgggatccccgcttccaggagatccaagggaggaggaggaaccgcgatcaagtgtgagttgtgtaatctctgagctgtgcaatctccctgtgaggcagtgacactcctctgtccagcttcacactgccagtttgtccagtggcactggaggaagcagcaccaggggcacatttgcacaaaggtgctgtccttcctcccagtataagggagaagtgaaaagactggggcccagcatgactcctagggtccagacatgaattggggagatatttctgcatgtcctgtctactggttcttatggtccttgtgggctgcacaggccagagtggcctctgagctcatcaggtgggtggtctgcaccctcctctctagtcatagaatcccagtggggacccccgaagtatctgcaccaggtccttcaggtgttttttttggagtgcagtggcgcaatcttggctcactgcaacctctgcctcctgggttcaaacgattctcctgcctcagcctcccaagtagctaggattacaagcacacgcccccacacacggctatatttttgtatttttagtagagatggggtttcaccatgttggccaggctggtctcaaactcctgacctcaagtgatctgcctgtctaggcctcccaaagtgttgagattacaagagtgagccaccatgcccagcctctttttcttttttagagacagggtcttactatgtttcccagactggtcttgaactcctgggctcaagtgatccacccatttcagcctcccaaagtgctgggattacaggcttgtggataccaacagcacccgagcacggtcccacagtccaacgcactgtgccgtccttgagcctttagttccagcacaagtctcccggcttcaacccaggttgcatgttctccctgatctccccaggtggcacccaaggatgaggcagtgcaatcttgttgctcacttcccaggaccgacacttacccctaatggcccaagcccatggggcagtgagatcaaagcctcctggagctcatactctctgacaccactggaagtgtgggcttttgcgtctgattaccccggggaaaggttctgaatgtaatcgtggctttggcaataaggtccacaatgcattaagatttttttttttttttggaggaggagtttcactcttgttgcccaggctagagtgcactggcaccatcttggctcactgcaacctccacctcctgggttcaagcgattctcctgctcctgtctcagcctcccaagtagctgggactacagatgtgggccaccacgcccagctaattttttttctatttttagtaaagacaggatttcaccattttggccaggctagtctcgaactcctgacctcaggtgatctgcccacctcggcctcccatggtactgggattgggattacatgcatgagccaccatgcctggcctagggttaatttttatttttggagacggagtctcgctctgtcgccaggctggagtgcagtggcatgatcttggcttactgcaaccttcgcctcctgggttcaagcgattctcctgcctcagccacttgagtagctgggactacaggtgcatgccaccacgcccagctaactttctgtacttttagtagacgcggggtttcacagtgttagccaggaatggtctcaatctcctgacctggtgatccgcccgcctcagcctcccaaagtgctgggattacaggcatgagccaccgtgcccgaccctagggttgactctcatacaaagacagcacgggaagtgaaatgctcttttgtggaaatgaccagaaacaataaaagcggctcctgcctcttcgtctactgtgagggacctcaggatgcagctcccatctggctcgagtgacaaggacagaggggaacagggcttctctgagcacctcagacagctcaggggaccttcttacccacaaacgccttcgttccattttgaagcgacttaggctggcctcaggacctccaacgcttggatttctaggtctcagtcacttgttgccacgcacgtctgagagtaataatcaaaatgctccaaaaagaagaatacatgtataatatttacgaagcaacggcctcctgtgaaaacctccgcaaatactgctgaggaaactgacaactggcgactcaatcccgccctttcagtgcaaatctctggctccaaacctgagcaccagtgtttcctgggctgaaccagggggcaggaggaacaacagaccatgtggttggtcacaagtgacccctgtggtcaaggaccctgactacggtcttgcagcgacatttctgcctctgctcccgccttcctaggacgcctacgccactgcctgggccgtccccaacccccagcaccttcagaggggccgagtcccagagcatccaccgcattacaaatgcgcacccaccctggagagctccaaccacgagcaccgccgcctcggttcaaggcatccttacagccacaactcctcaactggggccaattttccggggcaggcggcccggggtgacccaagtggcgcacattattttctttggtcttcaacccatttccagagagaaaacagggacccgggacaggggtggtgccgggggcacaagcccaaggtcaccctgcggggaagcggaggaatcagggctcgaacttacgtttttcctcagagagttcaccacaccgcgaagttgctggaaggaaagaacgagacaatggctcagctaagcgccctagccgctgcgtggggcggggggggcggcggtgggggccggggggctgggcagcctggtctgaccaatccccgtttctcagtccttccagggcaaaatctcacgagatccagtgaggtcgcccagagagtcgagaggggcttgttttcaaagactgggaggaggaggggcagtgggggaggggcagtggggggaggagcagaggagaagggagcaggaggaggggaaaaggggagaggaagttggagagcagaggaggctgggggtggggagcagatgggggtggggaaggaggggagatgggggtggggaaggggggcgggaggagggttaggaatgggggaaggaagacagggtgggggaggggtgggcatgggggaaggaagacagggtgggggaggggtgggcatggggaaagggagacagggtgggggaggggtgggcatgggggaagggagacagggtgggggaggggtgggcatgcgggaagggagacagggtggggaaccgagaagaaagacagtggggggggatggaggaaggaacacagggtggggtggggggtcgggatgggggaagggaaacaaagagtggtggaggcgtggggattaggaacggagacagagggtgggggaggggtggggtgggggaagggagacagggtgggggaggggtgaggatggcggaaggtagacaaggcgggggaggggtggggatgggggaagggagacagaagggggggaggggtggggatgggggaagggagacagaaggcgggccagggcgggaatgggggaagggaaacagggtgggggtggggatgagagaagacagaggttgggggaggggtggggatgtgtaagaaaaacaaagggttggggagggggagggaaaagaggcagagagtgggggagggggtggggatgtggaaagaaagtcagaaggtggggggtgaggggtggggatgggtgaatacgtgatggctgcggcctttcccaccagacagtagggtgggggcagggtggaaaaagggggtgcggtgggcgaatggggaggcggggggctgactgggagtgtgggacggggtgttctgggatcacggagacgtccaagtctggactctgtcctgggtctgtgcttctggcgacctcccttttcttcagtgggatgcggggtgcaggggccggttccaggtcccctgagctcaagtctcgccccaccccgccccgcaagtctagaaaagatgcccctgcccttggctgggtaatctctggatttacctactgtctgtaaccccccgggctgaagagaccaccccccgggagtcaattaacttactctctggagcgcgcgttcctccctgctcccaggagtcggtttcccaaaactttctgaggcccgcgcatgctcccctcgactccccgtgtttccactctccacagaaatccacgcattcacgcccctcccctcccccgagcctgcagaggactccgccctgctttccctacattcagggctgctccttttgtcgccaatacaaacctgttgacaggtcacgcctgggaagcgggtggggtgtcccggagcggtgctgaggcgctgcaggcccggcttctggctgcgggggagctgtaccctgaagcctcgccggaactcgcgtctggggccagcagggggcactagagtcaacagggactgtatgcaaaacccacttcctcccaggccctctagggggatggtcaggcttctgcagagatggggaggatcctttcctggtaaggggagagggacgggctaggagccaagcggaaggaccccgtgttcaaggcccttcaagggacgggacaggcgaggaatctctttgagtcttttgaattgttttatcagtcaggcctgggaagtactccgcctccacaaactctgttttcctgaaaggggtcgggggggggaccccaacatctcctgccacaggctatgatgggcatggtggctaagagcaacaggccgcgtggtgaggctggctttttgtggctctgccctgccattccccgaggcatccccatgccagtgaacagagctgcgggttcccagctgcacagatgaatgcacgaacaaaacataggtccatacaaaggaagtcattgcattgatccagattcgacctgggattgtcgcataaaacagggctgataaaaaccgtcgtgttttcaccctggaaacagagactcagcctccccctctttgcttgaggcattcagcaaaggtttgtccttgagtggctgtggatgctcaaggacttacgatttctgactttataaagtttagggtgaaaacaaaaaacaaaataaggagaccattgttttaaagtggccgttgtagctaattatctcaagaaagcaaacaggctggtactgaaagttacacaggcgggcggctccctgggagggttgcccagctctccttttctgagacctgagcagggagcagccagaggagcttgaagggatggtgttcagggcatgggaacaggctgcacacatcttcacggagtacggtgcttgtccagtttgagaagggaaagaaacgggagcagagggctgatgagaaggcagcagatggatagtgcgggattgaaaaggggatccatttgaagactggccaccattatttattttcatcatctgattgctgttgctccattgagatcgatgcgtggagaacaagttggggagtggaacaaatggcagggaggggagagaagtgagtgaacatgaccctggtccagcctcataggacagagcgtggtcatgaagtccacagaggaggacaggtagggaggaatcatggcatggccaggttgtagggcaagaggcagagaggagagaggattgtggaggatgcctgcggagtgccgactgtcagtcgaggctggtcctttatttatttattttttttttttgagacggagtctcgctcttgcccaggctggagtgcagtggcgcgatctcggctcactgcaagctccgcctcccgggttcatgccattctctcgcctcagcctcccaagtactgggactacaggtgcccgctaccatgcctggctaatttttttgtttttaatagagacagggtttcacgtgttagccaggatggtcttgatctcctgaactcatgatccgcccacctcggcctcccaaagtgctgggattgcaggcatcagccactgtgcctggccaaggctggtcctttcttttatggcgatgggtgtttgaaagttgcacataccaaaataaactcactatttgttgacccaaagtaaaaccctgagggtatgaaagggaagggctcatgcttacatggctgagataaaagctgtctcaggaagctgggtgtggtggctcacccctgtaatcccagcactttgggaggccaaggttggaggatcccctgaggccaggaattgaagactagcctgagtgatatagcaagaccccatctatatttttaaaaagggttggctgtctcgggacttttcgaaatagccctgcaagacattcctgttttggaatcacaacaatttagataagatgcttttgaaagaacacctgcctaggcacagcgtctccaccaatgaactgatgccaactgtggttttgagtcttcataaccggtgaactgtttgcaagcagcttatttaaatctctttttttgccaatacaaccttccctttgccctcccctcttgagatgcatatatggcttgccatagctgagcatcttaggttataatgctttttctcttttttaatttttttttgtaaatttatatttatttttatatttatttattttttgagacagggtcttgctttgtcacccaggctggagtgtagtgcataatcgtagttcaccactgcctccaactctcgggctcaagcagtcctcccacctcagcctcctgagtagctaagacaacaggcatgcaccaccatgcccagctaatttatgtatttactttattaaaaattttttttttttggtagagagagtctcactgtgtttcccaggctgggcttgaactccaggcctcaagtgttgctcccaactcgacttcccaaagtgctgggattacaggcatgagccaccatgcccagcgtataattttgtattctaattcctgaataaattcaacaaatttggaggtgttttttgtctgatggttccttttggtcgacaactggaatgggagaggaacagtgtgagggcaaacatcaagtgctttgctgagctccgggtgctttttttggataagacacagaaaatacaataagatgtctgtaatgtttgatttttttccaggtttcttgaggtataattgacaaataaaaattgtatggattcaaggtgtacaattcatatacattgatccacatataccttgtttgatgattaatcaaattagttaacacatctttcaccccagcagtcaatgtgtgtgtgctctgttagcaaatttcaattaataatatagcattattaactatagttactatgctgtatattagagtctcaggatttaccatcttataactaaaattttgtagcctttgaccaacatctctcattcctcccacccacagcccctgggaactaccattctactctgcctctatgagttccactttttgtgtttcttttttccctttcctttaattttttttgtatttgttatattaccaaaccatgtcaaaagagttccactttttagattccacatattattagctcgtacagtatttgtctttctgcatctggcttatttcacttaacataatttcctccaggttcattcgtattgttgcaaatggcaagattcccttcttttttatgactgatgatgtctgtctgcaatatttgaaaaaaaaatgcagatcacgtgaatgattgtctaatgtaattctattcatgtaaaattgtgtatgaccataacagtcactcattcattgcttcgagttctttacaatcggatgccatattcctggggctctgctaggcctgaaatggggagtaggagttacaaggttcctgggatatcagtaattcatatttgtgaatgtcttagataagtgggctaacatgtacagaaaatggtcactaaaatgataacactgtttgttataaaatacttttctgtattctcttgaactttttttttttatcatttattagactgcttcagctgccataacaaaatatcacagactggatggattaaacaacaaaaatttatttctcacagttctggaggctgggaagtccaagatcaaggtgtcagcaaggtgggtgtcattctgaggcatcttctcttagcttataggctgaggccattttgcgttgtgctcacgtgacccctttgtgcgcatgtgtggagagagagcatgggtgcttcttcttataaggatgctgaaagttatgagaacccgacccttgtgacttcacttaatcttaattacttccttagaggccccatctccatatacagccacaatggggattagggcttcaacatatgaatttgtggtggggggacgcaaacactcagttcataaacatatgatttttttttccttgatcggcaatgaaaatagaggtatcttcattttggaaagtgagagtcaacctgtgctgaattagagtgatgacaagagatactttaagactgcaatgagggaagcaagggatggggacgcatttgacagtctgttctgctgtgctcctggaagtgagagaggctgagtcgggactaacctttgcacggatgagatagagaactgagagagaaaagtatgtatttttctatgaccacctaaaataaacctggagttgaagggaccagcactctcaacctaaccattctgggaataaaaatcatagagacctcgctgattaatggaaacaatttgcctttcgattttctaagcaggtgaatgcaaggagtttgtgaactttactgctgttttcgtgtttttttaggtgaagacactgacagtaagaaaaggcaaaccacaggtccaagacaaagtggtcaagtcaagaaggaactcaggctgtgtagtcctggtgcaaggctccttgcccccagcgtggggtcacactggctggctgtgctcccacgacacttagtgcatactgggctcctgacttaataacacgtgtttgaaatggcccctgattcccaatctgctgcaggattctgcagatgcgcaacaggccacagtggaaggtcttggagagaattcagagtggcttgcctacgttcccatgaccgtttgtcctaatgggagaatcaccattttggaaaattcttttggaggccaggcgcggtggctcatgcctgtaatttcagcactttgggaggctgaggcaggcagatcacctgaggtcagaagttcgagaccagcctgggcaacatagtgaaaccccatctctactaaaaatacaaaacttagcctggcatggtggtgcacacctgtagtcccagctacccgggaggctgaggcaagagaatcgcttgaacctgggaggcagagattgcagtgagccaagattgcaccactgcactccagtctgggcaacagagtgagactctgtcttaaaaaaaaattcttttggggctagctgtgaatgagctcagagggaaaggcaggagccttcaggtagggagcagcatgattccaccccagattcaggcctcctgggtgtacagagggcaggaggatcctccccaggtatgtgagaggaagggaagatgaggtgtttgggtcagtgaacacactagaaatccaggtgctcactgatggattgtgcttggcatctctgttctgccaatccagcctcaaagcaactttggaagaggatttatgcgcttcacacgcttccagcttgggccagagcatctgcacactcccctgggtataggcctccagggcttggagcaacggaagagctaagaattgtcagtgctcaggaggcagattttcagggaggatcctcttgcatctcaggacatggaaagggctaacagagccttaagtgtcctgtcccagtgctggggtctcagaaggcagctctggggcatctccaccatggtctgacttctgctgcttgaaaccattctccctcacggcacaggcaagagtcctcaaggaagagcacctgggcacctgggttgactcttcctctctccaggtggagagaaccagtagagtttacctggggtcatgctctgagttaatccccctctgcatttctttctcttctcaggggcctgggctcagccttgactcagccttcctcagtgtctgggacttggggtaaacagtcaccatcttctgcactggaagcagcagtgacattgagggttctaaccatatctcttcgtacctacagtgcccaggaactggccccacactcctcatttattatgtccattctcaacccttagggggtcccagcttgattttcagtctctaggtctggcaacacggccttcctggccgtctttggcctctagcctgaagatgggcctgacagtcactgtttgttctgggacaaccatagcatttttacccacatgtgctccaagtccacggggaacagagaccaaatctgccatgagtgaccagtgtcacagggcttcacaccagtcaggcagtcagatggtggtgtttgctttcatttctgctcatcatcccaagggggtggacgcttcaggaatgggaccctatgcaactctcattgctctttataatgatgtgggaaagagaaaccatctcccaggggacttggctttgcaaaaatgaaaataaaagctccctcctccctctgtgcagtgaatggcctctgaatgcagacttggtctccctcttcagtggcaaggttggaggaagaacaacagcttcttattgcactgagacaactcaggggccacctcatttgaagatgtgcatcagtgtgagcccaggtattcctgtactcaatgatcgaggtctctctccttaccttgtctccacctggatctgaccaaagtgactgagatgatccaggttctagttttctcttgctgtgtaacaaatttctgcaaacctagcaccttaaaataacacccatttatgatctcccagttttcctggatcaggagtctgggatcagcttagctgagtcatctgttcagggtcttcccaacctgaaatcagggcattagcttggctgtgttttcatctggaggctcaactgaggaagattctgtttccaaacttactggcagaactcacttccttgctgctatatgactgaagccaaggttttggggggctatttgccgtcagtgcccgaagctcctagagttcctagaggtcacccatagctcttttgccatttaatgtaacctaatgaaaagagagatattccatcacctttgccatatttattggttagaagcaaatcacaggttcttcttgaattcaagtgaagagattgtgcaagggtatgactcatttggggtcaccatagggtacatcctcagtaattgtgtgcagtcaggactaggggaggagattctaattatacagagaagacttgtgccttctattcagaagttaagaagacatcctttactttttaagacactctgtcattttattcattgatttttagtggtgttctagaaagcagattttccaagcgtaaagcacaataatgaaatggcagagctgatgacagttcagatgctattagatgggtgtgcagatctaggtttagagccaagggatggagtagtgtctcttggtctccactgtggagaggccccttgggaaaacccaccacccccatttctcctcactccctgcctggacccatggtctctgcttggtctggcctatgctattaaaaatatacttcaatgatgatacttatgtcttgtgtttctctacactctttgtctatttgcagtggacagcacactgcatgctgatatcaaaaattattccagcaaattcaaaaataagacagtaaaaagaaataaaagacagttttacaatggaagagacagaaatgaatagttgcacttatgtttgatttagctgttaaatctaagagaaccaactgcgaatgagtagagaaagcggtcgttgctgcatactgaccattactagtgtgagatactgggggagctaggatggcctcctcttcctcttccttctcttgcctctcctcttctttcttttttggtaaatatctttcctagatcagcggttctcaaaactttcggtctcatgacctaatcacctcccagaggccctacctccaaataccatcacattaggggttaggtttcaacatatgaattttggggggacacgaatatttagtctagaatgctttttcaagaaaaggaggacagaaagatcatactacagtggcttttaaaaattagatatggacagcttttgtttctggaatatgtcagtgtgctgttgtgcaaagcatcccgggaacaacacctcagaatgtttcctttctgtgcctcagtaagacttgaaggctggtagggtagcctgagtcgtggctttcaatgatattcaggtcctaattcctgggacttgtgaatactgcctgtctttgtccgttttgcattgctgtaaaggaataaccgagtctgggttatttataaagaaaagagttttatttggctcagggttctgcagactgtacaagaagcatggtgcccacatctgtttctggtaaggacctcagaaagctttcaatcttggtggaagggggaggaggcatcacatggcaaaaggcagaacaagagggagaggagaggtgccacattcttttaaacaaccagctctctcatgaatgaactcactgatctccacagggagggcaccaagctattcacgagggatttgcccccatgaccccaaaacttcccaccttctttttctttttcttttttttcttttctttttttttttggagtctcgctctgtcacccaggctggagtgcagtggcgtgatctcagctcactgcaagctccaccttcccggttcacgccattctcccacctccctagtagctgggactacaggcacccgccaccacacccggctaattttgtttttgtatttttagtagagacggggtttcaccgtgttagccaggatcattctttttctttttcttaacctctgggagcacagaacataacataggatttggaggggacaaatatccaagctatatcattactttatatgagaaaaggggttttgcagatgtaattaaggatcttgagggagacattatactggattatgcaatgggccctaaatgtagtcacagatgtcctttcgagagggaggcagggggagatttgaggacagaaaaggagacatgaacagcggtgggatgatgcagctacaagccaagcaatgccagcagtatctagcagctggaagagtcaaggaaacagattctcccctgggacctccagaaggaaccagtcctgctgataattttatttcagttctgtaagccttcttttggattttagattctcagaactgcaagaaaataaattgctgttattctaagcccctaagtttttgacaacttgttgtagcaacaatgggaatctgatatagctaaggtaccatacattttgacatcttctctatatatggtaccattctgatttgtactgtgcaaggcttccttgccctctcactggtaaaccttggtatgcaggaaattatttttgtacattctccagtatattaactttggttataggtgatacattatatctattgcaaattatcattttgtctcctaatttgcatcaaccatgctgcttgtgtctatttatgactgattgtgtaggaaaattcttcaagaaaaaatcaaataggatggtaattcctgcatcttggaatgcctaaaaatcttctggcaataactgattacatagagaaaccatctgtttacttccttcaggaactacctggcaccttctagtgctttcccttgtggaccacaggtgatggaggctgggccctaatccagcacacacctccagtctagcgggcttctggtccagttatttacctacaggtattttattgatgttattcttcctctgatgacacgctgatttcaaaacatgcctaaaaccaaagacacaggatctttgaagtcccttccctcaaatatctgaggcttttccccaattgagcagcagttcacatgcttgtaagttttaaatgtgttaggcattttactggaaatgctttatatgcttcacactccacaggacttcttattcccagctcattgattgaggaaagtgaaatctgccatttgctgatgggccaatgtcaaggccaatgtcccagatcccctgtcaggacaaaagtgtgatgcagccagaagtcagccctcacctgcaaatgctctcctgaacttgcctaccctggagggatctgctcaccaggcagattccaggcgatgcccaaagcactccctaataaaactctgtgtgctcatctccgccttaacttctgtttccaggagacccagcttgtgaccattgtttccaggaagattaccaattgtctctgtttgccctggaccgaaggttttcccaggacatagatctttcagtgctaaaacaggacagtcctgagttatcttaggaccaggaatgtctatgaaaggagacacttgagagatgggattctggagccatggagaccccaatatgggggagttggaggtaggggcgcgagggtagatgcgcatatagcccctaccatggtggagcaatgcagtgtgtaaactttttaccagtggtgaatagggatgatttacctataggaggaaatgaaaaagcaggaccatgagtcagacatttgagagacgtgaagaaaacagaacattaaaggaaccaattccacagctttctctgttggaacagtgtggtagtactgatactaagtgtgattgatgatttgcaacagataaaatgctggaatgattaattagcaatgaaaaactagaagatgtggggcaacaaggctccagctccatcctcttagggtaccagctgggctcaagaattgacataaaacagattcgcaggagacaaaacatacaaatttacttaatacaagtttcacatggcacaggagccctcacaaggaaatgaagacccaaagaagcagttagagtcagttacttatataaggaattggtcaaagaatagtcagttgtgaagaaacgactaaaatatgtggggaaaaaagccccagaatctggtgtatccaaataggactccactctgatgacaggtttcttgggctgagattcctttgagccccatccaacttcttcccagctgctgagaagagaaaatcttttagaggcttcctggaattttcccagtccacactgattttgcttaaaagataaaagttattataataaggtctgttcagcagtatctcagttttgacttctcatccctgaggataagaatgttgcttttccttctagcatagggagggacagggtttttcacatgggacttttgtcttctgcttttaagaaacagaaaacagcagaatgatctttttgcaactggtgttttcaagtgccttttacttaaatagtcaatttgctagaccggtacttttttatttcttttcttttttttttattatactttaagttttagggtacatgtgcacaacatgcaggttagttacatatgtatacatgtgccatgttggtgtgctgcacccatcaactcgtcatttaacaccaggtatatctcctaatgctatccctcccccctccccccacaacaggccccagtgtgtgatgttcccccactgtgtccatgtgttctcattgttcaattcccacctatgagtgagaacatgcggtgtttggtttttcgtccttgtgacagtttgctgagaatgatggtttccagcttcatccatgtccctacaaaggacatgaactcatcaatttttatggctgcatagtgttccatggtgtatatgtgccacattttgttaatccatagactggtacatttttaactccatcagagcgcaagccaaaaagcttcctcctgggctgaaaaaaaaagcttccccctgggctgaaaaaaagcttcatcttgggctggaaaagctttttggcttgcactcttcctctgggcctgagccttccctgccctctcatctgcttggacagagggcagggaagactgaagcccagaacttaatcctaagtgtagcagaccatcgggaccctgacagggtaacagtggggtactgagtcacgggacgaggccatctggattcacgcacctgaaaatcttgatgtccttgaattttccaaacctgcagaagtggccctcccttactcattgaaacccatgtctcccttccttttgcctgaagatgatgcagagacctctgacctgtgagattgtatccaccaccacaagtgtccccagaaatctgccaccacctcctattaagaccaaaggaccaataactagaattgagtcccaaagaaacctggcaaggaatgtgatagacctgctgcagaactaaggagctgcagaactaaggagctccagaaccagccaacacgtgcagtgggccccaggcgagtgtgtatggggctggattctgagggtgtaagatcaaagtgcaaaacctaagattggattggggagggtttatctgctggaagcactctcctgggacgcaggctttaaccccctagcaaagacattgaggcattctgcaagcccgccgcaaggattgcccttaggaggacagagaaagcaatggtccgtaccaagcaaggtcataatgccagatgtgctgtggcagatggtgggagaggaatcaaaaggtcctgggaggccaggtgtggtggcttatgcctgtaatcccggcaccttgggaggccactgtgggagaatggcttgaggctaggagatcaagaccagcctgggcaatatagtgagaccctttctgtacaaaagattaaaaaaaattagtcaggcatggtggcacactcctgtagtcccagctactagggagtctgaggtaggaggattgcttcagcctggggagtttaagactgtagccagctgttccagcctgggcgacagagtgagaccctgaaaaaaagaaagaaagagagagaaagagagagagagagaaagaaagagagagatggagagaaagaaaggaaggaaggaaggggaagggaagggaggaagggaaggaaggagagaaagaaaaaagaaaagaaagaaagagagagggagaaagagagaaaggaaggaagggagagagagagggaaagaaggaaagaaaagaaaagaaagaaagagagagagagagagaagggttctgagagtgcttagctggaaaggcaataccaggtactcatggacatctccccaagtgagagaattctcaggagggcctggggactgcagtctgtaattgattgataagcggtgcactggtgagagaaatccagcatccttgagaaactcagtgggtagttctctagaccaggccagcaggggaagctggtaaggaagttgatagcaatacggatggaaggaccatgcagtgatagtgtcacattgtcagggcttaagcataggagccaggtgtgtggcaaaagatgaagtggcagcaaggcacctgacattgaatgatggagtcagtcagtatagcatggcacctctcggggcaagatgcataagccaccaagaaagggacagcttctaatctttttagcttattttttatttttttgttgagatgggggggtctcactaggttatccagagtagtctcgaactcctggcctcaagtgatcctcctgcctcagcctcccaaattgctgggattacaggtatgagccatagcttccggcctagcttttaatctatattttcagagggaagtaaggaagaagggtcaaaccccattaacaagtttctgaaagagcctaacttgcaatgtctagtcattccagagtaggatatttaccccaaggattaattcactgtagttgctgtgataaatgaccaaaccataaactgagtgactaaaaacaaagacctctaaatgattacacctggtatctttggaggagccattcaatctactatacgctgcttccaagtccttgtagaaaaacatacggaaatcatgcatcatcccatgggtggaagacctcgctccaggttagtgaactgctctgatttgtgactccaaagatggacattggtgacagcaaaaggaggacccagaatctcgtgtattcaaacagaactccactctcatgagaggtccttggatctagacccttgggtcaagcttcctctgagcattgtccaacatcttcccacttgctgagaaggaagattctttatgtgggccctggaatagcctcagtccagcctgatctctctctcttccctcctgaagttttatttcaaacattttgagactctaaaagggtttctttgtctcatttctctcctccagtcctactaccagggttgtcttcaatttatatccaatgtttctctggcctggaactgagacctacctcccaagcagcgacccgacccgtggagtggggtccctggggcaagcgaatggtcctttgcctggagaacctgggccagcagtcatggcaggtgacacattccattctggggcgaggaaccagggagggagcactgcatagatcagaagggtaaacaaggggagggagaaggagcaaacttagatttgggagggaaagagggaagggtgcagaggaagcagaacacggatgactgggcctccttcagttgttcttgtgactagaccctcccatctaagccaccaggggacaggaagggtatgagtttgaggactctaatggccccaaggtactactgtggtttatcctacttgtaggcggtcccaagagctttgttctctccagggactcaaaggggatgaacttgcaagtcttttgtctccactcagtgccttctctgattaggccaataaacatccccaggcctcagtctcaggccactgtaggggctgaggacagtgagaaagatgtgtgagcatccaccctttggagaggttgagtaggaatgagaggtcccctgccttgcctttggtccttgtgaaggaagatgttggatatttcccagcttggctggaatccgttcctcaccctccccattcagagcagggatgagtaagtcctccgctttctccgcaaccacaattgtgtttttcaggaaaggataaagtgggaaagatcagatcccatgcctcttcctcctctaagtcatgggatgactgcagagagtgagcaagagggtaaaaacagtgcactgagtgtgatgtttgctaaaggaacagataattgcatcaaaacctatttctagcagagttgtggtgcttgcctataatcccagctactaaggaggctgaggctggaggattgtgaggccgggagctcaagaccagcatgggtagcatagtgagagctcatctctaaaaaacaaaacaaaaaaccacacttatttctaattgtctaattggtatccactatcagacctttctgggaagttttttttctaacatgcctaaatgtggcttggagactgtttgggtgaggccaatagcttagccttcctacttaagttgtctccttcattcattcaacaagcaggtattattgagtggattgttgggtgcatttgtgtgtcctcagtaggatgcaggcatgcaatacatgaagatatgataattccagtcagaggaatggcctgtgcaaaggccctgaggtagagagaaccttgataattgaaagaacagaaagaaatccagtgggactggggaaagagaggaaggagatgagaggggagttacaggcagccaacagatcatgtgcagacagatcacttgaaagcagaggcaaatggctggatgtttttgttaatgaaaagagaatttatttgaagatcttccatcatttttacatgaagtgattgatgtgttaaatgaatgaaatttaacattcatggtgtatgaaatttatggaagaaaaactgaagcaggcagagcattttatggcctttgggcacaagagagtgaagcttgtcccatgtagagtcatggagagtgactgggagattcaccattagagttggcagattggctcttggattgaatatggggcatgaagcaaagagttgttgactcctggaagtttgactttgtcaatggcgtggctactactttcttttattaagagagagacagatgggagagcaacaggtttgagggaaacacataaagtgctttgtttggactcatggggattttttggagaagacagacaagatacaagtaacaagatgatgatgtctgtaatatttgggtacaaaatgcaattcataaacctgattgtataatatgatcctatttatgtaaaatcatatatatttagttaccttgattcaatttatacatcactaattgtttccagtaatattaaccaaaggtctactatatgccaaataaccttttatggctagagatagaaaaatgaacaaaacttactatgttcatccttatggaagatacataattcatatttgtaaacatcacatttaagtatggcaagaaatctggtgggatggttcctaaaatgaaacaatagtttcataggtttgtgagaatttaggtgatatttctacttaactttcatgtacactaaaaatttttcctataactcaaaaaaattttttggaggcagattagcaagatatttattttggaaaagcaagagtcaatctgaattgaactggagggatgctgagagttctagaacttcatagagagaaagaaaactgagttattgggtgggggttacacctatctttttgtcttttcttttctttctttcttttttttgagacagggtctccctctctcactcaggctgaagtgcagtggtatgatcttggctcactgcaacctctgcctccctagtagctgggaccaccacaggcatgcaccaccatgtccggctaatttttaaaatttttttggtagagacagagttttgccatgttgcccaggctggtctcagactcctggactcaagagatccgcccaccttggcctcccaaagtgctgggattacaggcgtgaaccactgcgttgggccgcttatcactttaatgtctaatgagaggcccctggagctggaacccttagccccagcctgacccctgacccttctcccatgtcctcaaattcaaaaactcacctctggctgtccattcagttgttctcaagtctgactgtgctctttgtccttcatgaactagaactagtctttctttcaaaccattttgatgagctgatcaatgtctcctcataccatttttctcattcagccttcctcctggggttggttttatttaccatctaacaatatttctgtaaccctgagcctctagagctgcctcaggtgcactaacgctgtgactaggctgccctgggacaagctaagaggttctgcgggggagggtctgggcccctggtgtggcagaaggtgcatccatcctggaggaagccagaggaccaagggccaggagcctgggggggattagaagggaccaggaggcctggtcctgagctgggatgggaaggaacgggaaggggcaggagcaggacagggatttccagatccactcagccgcctccctggggcttgggctcctccatctgaggccaccagggggcggcaagggcttggatttggggaagggaattgctgtggtttaaccagggagtgtatgaagctccatgggctgcttcctcctgagacccttctaagggagaagtggggagtggaatgtccaaaatatgttgtgtcccaatatgttcgtttctagaaaggctaataaatagcctcagcccccagcctcagagcactgcatagaaagaggacagaggtatttgagggtcattctgagagaacctagaaggtattgagtgggaataaacagtccccagctctgcctttggtccctgggaaacagagtgcctggatcactccacagtggtcatctgggatctggtccgaggtctcttccttgattctgttccctgagccttttttattctattttggatcagatccatgcacacgtagctcagagttgtgcccaagatttcataaggaatttacagggttttttccccctcaaacttatttctctccacagtctgcccattatttatggttccccagactttcccttttggtcttctggtgaaaaaactgtgactttaataagcctgcggtgctgtgcacttcctgcaactgagtccgtgtccacaccaaacaccaagaggacaaagagtaacaaaggtaaggggattaagtgccactgtcttggaaatcagctccaaagatgagaaaagaaagtccgcacagtctctactgtccctgctgtcaccacgaagaatttcctggaggctggatcatgtagaatggagagaagaacaaacataagaaaaggaaaacgtggacatttcaaatttgccctgagcactaggggtttcctttctcatcttcaagccagaacagtggagcttcttctggaacttttgtggctgcacactggtaccccttccaggtattggtctgccctgagtgcaggccacaggacactgggggaaaatgggaagctctctgctggtttgattttactaaaagtgctagtatctcccctagtctgcctccagtgatttgcttttccaagtaatcaaattgatgctccatggattctgtcccaggttttacagctgggcttggagaaaatgtggtatatgccactgcatccgaaatggaacctgaaaacagtaataatattctaaacgtgaaaattaaatcaatctgaatcacaggcagtggaaaacatcaaaagatgaaagagttttaaaagtgatttgaggaaagaaacagggagaaatattttcacattggttctatgtttactctatttatcttttttaatttaattttaaaaatagagatgaggaggtctcactatgttgcccagccaggctggtctcgaactcctgggctcaagcaattcacccgcctcagcctcccaaggtgatggattacaggcatgagccaccacacccggcccctgtgtttcttatgtgctccttgattaagaagagttgttttttgtttttgtttttgttttttgttttcttgagatggagtttcacttttgttgcccaggctggagtgcaatggtgcaatctcggctcactacaacctctgcctcccaggttcaagcgattctcctgcctcagcctcccaagtagctggattacaggcgtgcaccactacaccagctaattttttgtattcagtagagacggggtttcaccatcttggtcaggctggtctgaaactcttgacttcaggtgatccacctacctcggcctcccaaagtgctgtgattacaggggtgagccaccatgcccggccaaaaagttggtttattgtagcttgtggatacagtgagatggaagaaaacccagaaagcagaaataacacttctttgtaatatgaggaaaaaaataaaagataaagttgaatgaaatatttcatatatatatgtttcatatacatgtttcttatatatgtttcatatacatgtttcatatatatgtttcatatacatttcatatatatgtttcatatacatttcatatatatgtttcatatacatttcatatatatgtttcatatacatttcatatatatgtttcatatatatattgcaacatatatatgcaatattcatatatatagccatatatatgtttcatatatatattgcatatatatgtttcatatatgtttcatacatatgtttcatatatatatagttttttacagagtcttgctctcttgctctgtcacccaggctggagtgcagtggcctaatcttggctcactgcaacctctgcctcccgggttccagtgattctcctgcctcagtctcccgagtagctgggattacaggaacgcaccaccatgcctggctaatttttgtatttttagtaaaagtggagttttgccatgttggccagtctggtcttgaactcctgccctcaagcgatcctcctgcctcagtgtcccaaactgctgggataacaggcgtgagctatcacgctcggtctgaaatctttagataagtatgaagtctatataaaaaaaaaaggctcttactaggctagaaatggcccattttagaagctttcattttccacctcacactcatctctctatagatcctctgcttgggcagtgggtggaccttgtggtcctcagttctcaggctgagaaccagaggctgaaaaggacaagtcacctgctcatgagtgggaagggcaggattgggagcagcggactgtggctccattgctccttgtttcctccacaggcccctcccacgtgtgcccctgaatgacctagaatgactaatgtgctcaagggatttgatgctgcagatgcttcggcatgaagggtgggggtggggatgggacaaggctgcagctgaagagatgggagaccaacaacacacagcaggggtttccatggggtgggcacccccatttcctcacagtttagagagcctggaggtgggtgccaagcagagggcaccatggcgtggcccaggcctggaggttcacagagacacaggcacaacacagcagagacactgagggccaggagctcactcagatgagggacttcagcagatctttctctcttgaggaaattaggtacaaaggaatcaagttcctaccatcagaatagacaacaagttttaatctcctcagctgagccccgctgtcgagggaagcagaagtctctgagcccggcccaggtgagagtggggtgaggagaggagctcagggtgcagatttgcatgaaggccccaccctcctctgaggcagaggggataagacaagtctgggggtaggcccagcgctggggtctcaggaggcagcgctctctcgggacgtctccaccatggcctgggctctgctccttctcaccctcctcactcagggcacaggtgacgcctccagggaaggggccttggggacctctgggctgatctttggtctcctgctcctcagactcacctgggcccagcactgactcaccagagtgtatttctccctctttccagggtcctgggcccagtctgttctgactcagcctcgctcagtgtccaggtctcctggacagtaggttactatcttctgcactggaaccagcagtgacattgggggttatgaccttgtctcctggtgccagtagcacccaggcaaagcccccaaactcatgatttatgatgtcgctaattggccctcaggggcccctggttgcttctctggctccaagtctggcaacacggcctccctgaccatctctgggctccaggctgaggacgaggctgattattactgcagctcatatgcaggcagctacaatttccacagtggtccaagttcatgcgtaatgagaccaaaacctgccctggtctctcaggctctctctcgctatgaaggtgcttccttaccctgtgcagaagagggtttcatgcaacatggccttgagaatttcatccactctcagcccctctcccctccaacaatgaaatgcaaaagaaacatgctctctggttaattgtctagggacaatggcagcttcttcttttcctgtgtgatatggtcctgcatggtgactctttccaacttttcaatggcagggacagagcaataggatccatctgctcagtaccatttctgcagttttctatgaaaccctcacattaaatgcctccatctcccacactgtgctgactggcctgggtctgtgctccagaaataacgtcttactcaactccatatccaccacgctgtagtaaggatggctgtctttgctgggttatttgttcctctgcaggtctcttcccaaagcaacaccaactgagagaagatctgaagatgttgagagagtgagcataaaagtaaagggttttatttatttgctttcttttttttttaactttgtttttatttatttttttgatacagagttttgctcttgttgcccaggctggagtgcaatggtgcaatctcagctcactgcaccctctgcctcccgggttcaagcgattctcctgcctcagcctcctgagtagctgggactacaggcacgcgccaccatgcccagctaatgtagagatggggtttcaccatgttggcctggctggtcttgaactcctggcctcaggtgatctgcccacctcagcctcccgaagtgctggcattacagacatgagctaccatgcctggccttgtttttattttttagagttcctttgtctttgacccgatgtctatctatgggggcttagccagggcacatttgagtgattgttctttgcgagaacattgttctttgcagatcattaaacccctgtcctggaaacagtcctgtacttagactgtctccctgttagcatgggctctttcctaaatgatccacaggaaagcttatttggtggatgggtcttctgttcctcaaggactctatgggtagtttattttcaaggtgagccaatactgtttctagctggaatctcatttaatctcataaccatgagaattaattttttaaacctgcagggtgttctctagccattttttaattttctttgattttgtgagccacttttaaattataatcatcattaaaccttaaaacatataaacttcaattaagcagattatatattttattttattttttgagacagagtctcggtctgttgcccaggctggagtgcagtggcacaatcttggctcgctgcaaactctgactcccgggttcaagtgattttcgtgcctcagcctcccgagtagctggaattacaggcatgtgccatcacgcctagctaatttttgcatttttagtagagacggggtttcaccgtgttggccaggctggtctcgaacttctgacctcgtgatccacccgcctcggtctcccgaagtgctgggattacaggcatgagccatcaagaccagccacatatttttaaaaagtacattggttattatccacatacctttggactgctataacacaataccttaaactggtggcttataaaaacagaaatgtatttcttacactcgtggaggctgggaagtcttaagatcaatgtgctggcagatttggtgtctaatgactgtctgcttcctcatagaggccattttctcactgtgtccttggaactgaggacaaagcagctcctggtaaagttcagatgtctgtttcttgcaggaaaatttctctttacagtgatctgggctactggctccaacacacgcacccagatggatttctgagccggtcattgaccattaccattttaatattatctcaaattataaacattatctcaactattgtttaatataatatagcacataaatgtttaaagcatacatagcgaaacaagggtcttacattcaaaactgtcatttccccaatcacccatctccttgtccaccaagccccagtgccaccacttagctcattgctcctttggcttcactttctggtgctcttgcaagtgtctgtcatgtgttacaaacaacaacaaatagtcctccaagaacgtttacctccatagaatccctatcctgtttcctgagtggacatttccatttttaatctggcaaagatcagtcagccctgattagtgttttaaactcatatccatctctttctagaaaaacacactaggttaagcatctctctgtggatgggggaccctcatgaaggcacacagctctgagctgaggtggcctcaatgtgtacaatggagcaagacaaagaaaagtcccatgttctgtgtgatagacagacaggcactgatgagaggtctccagagctggcgcccttagtctaatcttgactctagtcctcgtctttccgacccttaaacactagaattcctggtctgcattccattaggtcattcttaaatctagtgagctgtatctccttcatgcaatgtttttctttcactattattttcagctttattgacatataattgacaaataaaaattctatatatttatggtatacaacttgatatattaatacatttgttgtacattgatatatttgttgtgaaattactgcaataattgtgtgaaatcacaatcaatctaattcacataaaataaccttacataattatcatcttctttcttttttttttttttttggtgagaacacttacaatctaccaaattagcaaatttaaagtaaataatgcaatattgttaaccatagtcacattgcggtacattagctatctagaacttattcatcttgtatcactgtactcttttataccctttgataaacatctccccatttcccttttccctccccagtcctgacacccaccattttactctctggttctatgagtttgaatattttagattctacatgcaaataagatcatgcagtatttgcctttctgtttctggcttatatcagttaacataatgtcctccagctttatccatgttgttgcaaatgatgggatttcctttattttttaaaacttggcaatatttgtgtgtgtgtatgtgtgtgtatgtatgtatgtatgtgtgtgcatgcaccacattttctttatccattcatttgtcatcagaaatttaggttgtttccatgtgttggctattgtgaataatgttgcaaaagacatgggagaacagatatctattcaagattctgatttcattttgttttgagatatgcccagaattggtattgctggattatatggtagttctatttttaattttttaaggaatccccatacattttctacaatggctgtttagtttacattcctttcaacagtgtacaagagtttcttttgtccacatccttgccaacatttgttatcgtttatctttttgataaattacaggcacgtgccaacacacctggctaattttttatatttttggtagagacggggtttcaccatgttggccaggctggtttagaactcctgacctcaagtgatccactgcctcggcctctcaaagtgccgggattacaggtgtgagccaccatgcctggcctattttttctatttctataaagaatgacatttgtgtattgataggtctagcattgaatctggagatcactttaggtagtatgaacatttaagaatattagttcttccaatttataaacacgagatgtcttgatatttatctgtatcttctttaacattcttcatcactgttttataatttccagtgtaaaactctttcacctccttcgttaagtttattcctaagtactaattccttttgtaaatgtgattgctttcttaattttattttcatatatttactgtctgtgtgtagaaacgtcatcaatttttgtatgttgatttttttatccttcaaatttacttaatttagttttaacagactttttgttattgtggagtctttaggtttttctacacttatgtttatgtcatctgcacacaaagattaggattttaatccttcttttccaatttggatgcgtttcatttctttttcttgtcgaatttctctggttagggattccagtgcaatgttgaattaaaataagtggagagggggcatcttgccttgtgtgggatcttaggggaaaagcttctgtttttttcccattgattatgatgttagttgtgggcttttcacatatggtttttattgtgttgtggtaagtttcttctgtacctatttcattttatttttgtttttttaaatatttattttataatagagattaattttgctatgttgcccaggctggtcttgaactcttgggctcaagcgatcctcctgccttagcctctcaaaatactgggactacaggcatgagccactgtgcccggcctatcactattttgttgagagttcttttcttttcttttccttttttttccattgctttcttttcttttcctttccttttttcctttccttccttttcttttcctttcttttctcctcctcctcctcttcctcttcttttttctttcctcctcctcctccttcttcatcttcatttaaaatcatgaatggatgttgaatttggccacatgccttttgtacatctgtggacataatcatatgtgtgtgtgtgtgtgtgtgtgaatctttcagcctgtggatgcgctataccatccttgcacatgcggaatcatccttttatccagggataaaccccacctgttcctgatgtatgatcttcttaacatactgttgaatttggtttgctagtattttactgagaatttttgcatttaatatctgttaatgtttatcagaggtagactggcttgcagttttttttcttttctggtgttgtctttgctttgttttggtatcagggtgatcccgacctcataaaacaattttggaagtgttcccttttctattttttggaagactttaagaagaattaatattaactcatctttgaatgtttggtagaacattcagctatgaagccatctggtcctgggcttttctttgttgagatatttttgattattgagtcaatctccttctttgttattggtatgttcaggctttgtattttttattgatttgcttttttttttaagttgactgtttctaggaatttatttatgtcttttaatttatctagcttggtgtataatttttcaaaatagtcccttatgatcctatttatttatttgagacagggtctttctctgtcacccaggctagagtggagaggcttgaccacagctcactgcagccacaacctcccaggctcaagtaatcctcccacctcagctttctgagtagctgggactacaggcatgcaccaccatgcctggataatttctttttctttctttctttcctttctttcctttctttcctttctttcctttctttcctttctttcctttctttcctttctttcctttctttcctttcctttctttctttctttctttctttctttctttctttctttctttctttctttctttctttctttctttctttctttctttctttctttctttctttctttctttctttcttttcttcttttttttgtatagatgtgacctcactgtgttgcccaggctggtcttgaattcctgggctccagagatccacctgcctcggtctcccaagtgttgggattacaggtgtgagcctttttatttctgagaaatctgttgtaatagctccttttttcattttggattttatttgagtcttctctcttttttcacagtgtagctaaggatttgtcaacttcgtttaatttttcagaaaaccatctcttagttttgtttttttctattatctgtttgatttatttctgctgtaatctttattatttcatttttttctgctaagtttgggcttagtttgttcctctttttctagttcgttgagttataattttaggttgcttatttgagatctttcttcttttttaatgtttgcttatctccataaacttcccacttagcactgcttttactgcatcctataggtttggtgtgctgtgttttaattttcatttgaagatatttttaaaattccctttggttttcctctttgacccaatgcttgttcaacatgtgatgtttgatttctgcctatttgtgaatttttccatttttttttactgttattaatttccagattcatttcttgttgtaaaaaaagatttttggaatgatttaattctccttacatttcttaagacttgttttgtgaccaaacatgagctctctcctggagaatataccctgtgcatgtaagaagacattttgagaacccaggtggtcttttctcataccatttttctcacccagtgctcatactgaggttagttcattttacatctaacattttctcagcctggagctaagacacctcatgtacctttgacaaagccattctagcacaagcaaaacggtcctgagaacgagtatcttagccacctggtatggcagaggacacattcatcatggaaaaagtctgaggaaaagggtcaagattagcatggatcgagggtctggtcctgagctgggaggagaaaaaggcaggttggagtgggaccaaaccaggtatttctatctctcacttagaattgtgtcttggtacttgagatgaaccatctgaggccaccagggggcagcaggggactaggttggagaagatgattgataaagtttatcctgacctttaagaagcccctgagtcggccgggcgcggtggctcacacctgtaatcccagcactttgggagactgaggagggtggatcataaggtcagaagatcgagaccatcctggccaacgtggtgaaaccccgtctctactaaaaatacaaaaattagctgggcgtggtggcttatgcctgtaatctcagctagtcgcgaacctgaggcaggagaactgcttgaaccagggagttggaggttgcagtgagccgagatggcgccaccgtgttccagcctggtgacagcgcgagactccatctcaaaaaaaaaaaagtccctgaatctcaaaaaaaagaatgtgactttatgattaactatgaacagctgctcattaataaaaagccattaaaaaaaaaaaagaaatcccaagagctacttacccttgaatatctctaaaggtactgggaagcagtgctccaaatctgttgtggcccagtgaattcctttttagaagcaccattaatggtcctagttcaacatgtcaggccccagctttaaaccactgcaggggcaggggatgtagcagtgcttagaacccaccttagctgagaggaccaagatggttgggcaggggatgagggaaatgagaagttccagcactgtctgaagtctctgggaggaggagtgattgaactttcccacccggcctgggagcagcctgtcctcacattcatccctcacagcacaaaggagaagtcctggtttcctcagcctggagctcctgcaatagtgagggttaggatatctctggactggcctgatgtcctgggcactctcatgggttcagtctcaggaaatccatgcctaggctggattaataccctcagctgagcctcacagggaagcagaagtctctgagcccaggcccaggtgagggtggggtgaggagaggagctcaggacacagatttgcatggaggccctgccctcctctgaggcggggggataagacagggctagaggcaggcccggtgctggggtctcaaggcagcgctctcgggacatctccaccatggcctgggctctgctcctcctcaccctcctcactcagggcacaggtgacacctccagggaaatggccttggggacctctgagctaatgcttggtcttctgctcctgctcctcagggtcactggacccagtactgacccagtagagtgtgtttctccctctttccagggtcctgggcccaatctgccctgactcagcctccttttgtgtccggggctcctggacagtcggtcaccatctcctgcactggaaccagcagtgacgttggggattatgatcatgtcttctggtaccaaaagcgtctcagcactacctccagactcctgatttacaatgtcaatactcggccttcagggatctctgacctcttctcaggctccaagtctggcaacatggcttccctgaccatctctgggctcaagtccgaggttgaggctaattatcactgcagcttatattcaagtagttacactttccatagtggtccaagttcctagggaactgagaccaaaacctgccctgggctctcaggctctgtctttgctctgaagatgcttcctcaccctgtgccaggggcttcctgcaacagggccttgagaattcacttctctgtcagctcctctccttttccatcaattcccaaaggaaacctcctctcttgtttactctccgggatatgacagcttcttcttcactcgtatgacggatgtcctctctgaattggaaactacttctagctctttaacaggaagtacataccggcagggaaatgcctgcctagtgcagtccccatacttctccggatgatcctcactttattatttatttttatttttgtatgcactaaagtcgtcaatgtaaatccttacgtcgaatgcctccacttcccacattgtgtagcacagcctggattcagttcttcagaaatgacgtcctcttcaatgataaaggaccactgctctgtgaacaccccactctagtgaagatagcccaccttgctgggttattcatgtacatcttttgtggaagcagtaaccactgtgtaaagctccaaagatgttttaaagcaatgaaaacaaagaggaagaagtgtgtgtgtgtgtgtgtgtgtgtgtgtgtgtgtgtgtgtgtgtagggtccatcctgtttgccctaatatctcaggttgccgagctagggagtatttgagtgacagacttggtgccctctcaggatcctcctcctctcacatcactgagtccctgtcctggaaacaccctacaggtggacaatctccccatagtatggaagtttccaaaatggctccacagggaagagttgagctgaacacacccactctttctcatgggcatcaaatatatctaatttttctggggaaatcatcaatttctagctggaatcctgattaatcgacagactgtgagaattaaaaattttaaaaatattcagacatatccagagtccagtatttaaattctctggaattttgtgagccaatctttaaacatagttattattgtagtttagagttcatgaacctgaattaaatagattctagtaaacataaagtgccttagttgtctattgttgcataaaaattactcctaaaattaacatattcttaatgagaacacatatgcattaatctgttttcgcactgctataaagaaataccttatttataaaagaaagaggtttaactggctcacagttccacatggctggggaggcctcaggaaacttacaatcatggtagaaggcaaaggagaagcaagaactttgttcacaaggtggcaggtgagaagagctggggagggtgaacttccaaatacttttttttttgagatggagtctcactctgttgcccaggctagagtgcagtggcgtgctctcggctcactgcagcttctgcctcccaggttcaagtgatcctcctacctcagtctccgagtagctgttattacaggcatgcgtcaccaagaccgactaatttttatatttttagtagagatggggttttaccatgttgaccaggctggtctcgaactcctgacctcaagtgatttgcacacctaggcctcccaaggtgctgggattacaggcgcaagccattgtgcctggccccagacacttttaaaaccatcagctctcatggtaactccctacccatcacgagaacagcaaggggaaaactgcccccatgatccaatcccttccgtccctcaacatatggggattacaagtccctccttcaacacatggggattacaatttgagaagagatttgggtggagacacagagccaaaccatattaatgtatttgtgatcttgtagttttcttgcatcaagaatctgagagctgcttagtttggtggttctgactctgggctcctcatgaaattgcagccaagctgtcaggcggggctgcattcagaggccagagcaggtggccaggcccagcctgagggggcttctactgtccctaacctctttggcagatgtagatgaagtcagggaaaaggggagctccccacagtgggtagcatcccagtgtcagagggaaggcaccatggagcagtgggaccagcacaggaccctgggggtgcactcagacctacctggagggatggcaagaaggggcattcacagcagggacaggataaagggcctctgccccatgtccagagctgtcttggcagctcagtcacattggttatcaggtaaatcggaggtaaaccctatcctgagttttaccactgaaaatgggtacaatttgaactaggagtgttttcagactttttctttccatattgacttcttaataaccgcgatttaattttttttaaccccagcctagtttagctacatagcttccaaatgtcatgctactgtgaaactgagcaattagttacttttatcagagcattttaaatttgaacaggttccttggtctttctatgtgtaattagtcaaagcttaggtatggagtagaggatctttaccaaatgcttttctagactctgttttcattggacttatagcagctgtttcacctgggccatgcaggaataggagagttgttgctccttgacatagcatctgtaacatgcctatcctttctgccactataaaaatagctgtgctttctctccactcgtctctcctgctgtttccctgtttttcctattaaatatgcagtgtttgcaatccatcttgcattctgagaagatgaggattttttttcataaagaatgacctaaaatagctctaaagatcatcagaagtcacaactacatacttactggagtgcaataccaaatgtggcctctgattacagtaacctggagcttgcagtttaagcaattcagtccctgtcacttgtggacagattcgtatgtctgtggatgagaagatgagcaacggtcactcctgtgctcatgcacagatccctccctgcccctgtcctcaaattcagactgaagtgcatggccctggagcattacatgagtgatggtttaagagcacgttggtgatacacacaatattaatggtatcttaatttgcttgttaagcataatttgaaaacatctggacaaatttggacacaatttgaagggcatatttgataatagcttgtgacaaatgattccgttctgggagagatgctatttttggttctctaaatcgccatgaaatgaaaatctcagattataaagaaatagactcaaatcccaagtgtcttttgcttttcattccccatcaactgtgttgcccaagcaccatgtggacactgcttacagggtaggcagccaccagctgaaggcaggttctttagttgtctgagctgtcctggagctgggaacagcagcgtgtgttctgtgcctgttggtccctatgtagcacacacccactgcatattctcgctgactcaccaggagggcttgcagcagccctggcctattttcttctgaagcacctgccaatggtgcattctcccctggtcataatgcaccaggagataaacatggcatttgacacacaggtgctaactggatctaggacttctaagcttaagtagactcagagtgggcaatctaaaaaaaaaaaaaaaaataggttctcaatcggtagcccaggctggagtgcagtggctccatctcctacctcagcctcctgagttgctgggacaacaggtgtgtgccaccatgcccagccaacagagagggcaatatggacttgaaatggacaatttccattacttgaaagtttttgagaaagaactgaggtttgtttaagaggaaatcagccagagactcaaagttaaatctatcaggcccaaagtctctttggggaaaggagactcttggacgtgcacgcagcagcaagtggtatgggatcccttctctgtggggaccttggcccaactgccaatcttttcaactgacccatttgcgttttccataagtgctcgccagccagcagctgtgactgcccctcagtctcaggaagggagaaagaaggaaacaggagcaaagcctctttcaatcttagcaaataaagtgggagctttgacttttttgaacacccagatgacaggaaagaggaggaaaattttcctaaagctgttattttttaatgcctcaggaagaatcacacccggagtctcatccacactttatttggaggtatttgggtctcagagtttgtgctgagttagttaatgatttgggctactgggatggggtgaatgtgttttacaagtgagaaagaaataagctttggagtccacagggtggaggcttattggctaaattgtgtccctcaagattcatgcaatgaagccttaatcacagtgtgtgactaaatttggagacagggtctttatggaggtgattaagtgaaaatgaggtcatgagggtgggttcttatccagtctgactggtgttctccttagaagagaaaatttgcacacacagaaatcagacaccagagatgagcaggcggaggaaagaccatgtgaggtcacagcaaggaggtaacgacctgcaagccaaggagagaggcctcagggaaaatcagtcctaccaacactttcaccctggactttccagcttcagcactgagaaaataagttttgctgttgaggccactagttctttggtatcttgtgatggcagcactggcaaatgaaaacaagagggaccccaaagaccttgggtagggggaacagatggagcagggtgcaggaggcagggcagggaggggctggaaggtcatgctctgaggttcgtttcctggatggaactgggactccactcactactgtctggggaacttggggaaaaaacttcacctcccaatattgattccctaataaaatctgggccctgagcatagggctcctcatcttcctactccatatgatgcaagttttcttgaagttatgcttgtaaaacactcaccaatgcatctggcatatattaagggctcaaaagtaggccaggcatggtggcttatgcctgtaatcccaatactttgggaggccgaggtgggggatcactggagtccaggagttccagaccagccaggccaacatggtgaaactccatctctactaaaaatacaaaaaaaaaaaaaaatagctaggcatggtggtgcccttctgtaatctcagctattcaggaggctgaggcaggggaatagcttgagcctgagaggcggaggttgcggtgagcccagatggtgccattgcactccagcctagatgatagagtgagactccatcacaaaaaggaaaaaaaaaaggttgtcattctgcagcccagatcgtgccattgcactccagcctggacgatagagtgagactccaccacacacacacacaaacgcacacacacacaaaaactaacccccgccccgcaaaaatcgaaggtagccattctgctgtatgatctattgatacatacaggatgacatttgtcctgtgggcaccagggggcactgtgacccctggtttgggacactaatggctccaagtccctggtagtacttgagtcatttcctttctggccccttctattgagtggaatcctgaaacccacctgactcttctactcttgaaaaattacgcagagaatgtcctcagacatagggtcagacaagaacttcgacatacattttaaagaatggagagcagatttacatccgctgcttaacagggaaccaactaacaaagaattaagaataaaggaagtagagttgcatgaagagactcccctttctatgataagaaaggcctgaaggtcccttcccagctgtggactcagaggcagagctctggggcatttccattatggcctggacccctcccctgctcgtcctcactctctgcacaggtgctgcctcccagggctcagcccccagtgggatcaagatcagcctggccctgaccttcaactcaacatagggagtgatgcagggtgtggggttctgggaatgaggccctcatcctcagactcacctctcctgtcctctcttgtgggctccgttatttcctctgggccaactcaggtgcctgcagtgtctgtggccttgggacaaatggccaggatcacctgccagggagacagcatggaaggctcttatgaacactggtaccagcagaagccaggccaggcccccgtgctggtcatctatgatagcagtgaccggccctcaaggatccctgagcgattctctggctccaaatcaggcaacacaaccaccctgaccatcactggggcccaggctgaggatgaggctgattattactatcagttgatagacaaccatgctactcaactcacagtgacacaggcagatggaaaagtgagacacaaaccctttttctgtctgtgtcactcacttcctccggccccagcaggactgtggacacagccatgggcaggtctggctcagttttcctggatctgagaccccagggtgccctgacctccaagccctccagggagactctgaagagagtgggttaggtcaggagaggacttggggctggcaggaccagactgtcctggtattgtccagagtggctgtgtcttggcttaagatgacctgagtgtaaggatagtcagagggagacagccattgagtggtaatggtccctggatttccttctgtatggtgactggacctaaggcagtgctgcttttctgtggcccaaatgccccagatcattctgaacttctcaggtttaactgagaccctcaagccccagctccatgacatcctcatattctgaacagggagggccaccacaatgggcagtgtggtgtccatcaagattcccctttcagggctcacccatccgccatacacccaaagctgccgggaggccctggcttctcacagctgctccccaccggaaaatgccattgattgcaaagaatggcctcccccaaaagtttgcccatgtcagagcgtggctcaggtgcaatgactgcttgatgcctcaatcccaaagtcaggccttaatttaggatggccttgaagtgtgttgcagctgagcactcaattgtaacacattcccactcatgcctcccatacttctttcctgagaatatatccctaaacctcactgcatggaattccccctctcagagtaggagtctggggaattaaaagatttaaaaacaaaccaaaacagtccaaagggaagagtaacaaagaggagagagttgcacagagagaggactctggagtctgcaaatgttcgtgagcaccgatgagcacatatgtgggaggaaacaacctctggaagagaaaagaaccatccaaagacacttgagagaacactccagagcgtgtgtgcacgcacacacacacacactcacaccccacataaagaaaacaacaacactcatcatcatcaaattgctaaaaaacattttagcaattttatgctaaaatgatgatgaagaaatgtggtgaagaaatgtagccttaaaagtagccagagagacgaggtggctcacgcctgtaatccaagcactttgggaggtcgaggcaggtggatcacctgaggtcaggagtttgagaccaggctggccaacatgatgaaaccccgtctgtactaaaaatacaaaaaagttagccggatgtggtggcaagcgtctataatcccagctactcgggaggctgaggcagggagaattgcttgaacctgagaggttgcagtgagctgagatcgcaccactgcattccagcctgggcaacagagcaagactcaatctcaaaaaaaaaaaaaaaaaaaaagtcagaggcaaaagacatgttagatacaggtgaacacaatgacaagagcagaatttttattagaagcaatgcaagcaggaagtagtggagctatatttataaaatatgaaaagaaaaaacttataacccagagcaatctacagcctcactgaaatccctaccaaaataccaatgacatacctcacagaaatagaagaaaaaccccacaattctacaatttgtatggagccacaaaagacccagtatagccaaaatgacactgagcaaaaaacaaaactggaggcatcacattacctaattcaaaatatgctacaaacggccgggcgcggtggctcacgcctgtaatcccagcactttgggaggctgaggcgggcggatcacgaggtcaggagatcgagaccatcttggctaacacggtgaaaccccatctctactaaaaatacaaaaaattagttgggcgtggtggcgggctcctgtggtcccagttactctggaggctgaggcagaagaacggcgtgaacccgggaggcggagctggcagcgagccaagatcgcgccactgcactccagcctgggtgagagagcaagactccgtctcgaagaaaaaataaataaataaaataataggccatatgtgatggctcacacctgtaatcccagcagttaggaggccaaggtgggaggattgcttgagcacaggagtttgagaccaccttgggcaatataatgaaaccctcatctccacaaatttttttttttaaattagccagccttggtggagtgagcctgtggtcccagttacttgggaggctgaagtgggaggatcacttgagcccaggaggtggaggttgcagtgagtcatgatcttaccactgcactctagcctgggcaacagagaaagacactgcttcaaaagcaagcaaacaaccaaaaaatcaagtaatatcattgaaaagggggcaaaggatcagaatagacttttctcaaaagaagataaacaggtggccaacaagcatatgaaaaaatgctcaacgtcactaatcatcaggtgaatgcaaatcaaagccacaacgagacatcatcttaccccagctggaaaggctatcattaaaaagacaaaaaaataacaagtgctggtgaagatgcagacaaaacagaagacaaaaaccacgtgatcatctcaacagtcacatcaaatgttttcatgtagggaaacattactgtttgtgattttccagacttgctagagcatcataaaaagtaagatttgtggtgccgatattggagggggtgttattctgtgcaaaaaacctggatatcccatatccaactgtgaagatacttactgataaatgctaaaaaattgcaatattgtgtgtccaaatgttctgggggtcaggagtggggtctcacacgggaaaggattcagtcaaagagaaaaatagagaggctagaacatagaggaaaacataatatgtctggaaataaggagtccaaactaattggagctgagtgataacaaaagaacaatggcatgaaccatctatttctctctggaaatctcattgatatattgtgctctctccagggctatgcccagctagattataaaattgtctgttcctgaaacgtttcttgcgtatatgacagggcctaacactggaatcaagctcaggttgatgagggcagggcagttaagcacccgaccctggtggcctgtgaaatacttgggggagacaggggtttgttgtctaaagcagaggaagtgagattttccactgtggcttagaccagagcttctgaaattccagtgagcaaacaaatcccctgtggagtctgtttaagatgcagatgcagcctcagcaggtctgcgtggggccccagagtctctatgtccagcagctcccaggtgaggctcatgctgcttgtcctccaagaaccacactttgagtggcttaactcctattcgccctcctcactcaagcacaggtgagactctgccaaggaaggcactgtctgagaagcaaaggtgaccttctgtccttcctcccctggtgttttagtccatgttctattgccataaaggaatatctgaggcagagaaatttataaattttaagaaagatttctttggctgaagcttctgatggccggaagttcaagagtgggcatctgcatctgttgagggcctcaggttgcttccactcatggcagaagatgaaggggagccagtgcgtacagagaccaatgggagagaggaagcaagtcttttcctaacaagaatgcagggatgtaatttaatcatatttataaagtgtttgacatagagcctgacacacccaggtactcctagttggcagcaattattactgtcgtcgcacatgaaaattggacctgggatggaggaaaggcagcgcaaaccctctgtttgggacaagagagacttaaataatttaaaattgaggcataggagataaggagagtatccctgggtgttctcctgccaattctctcagcatctcggaaactgtttcaaggtgatgaagtcaaccagagagggaagcggaggagtttgtagaaccaagggttgcaacttcatccatgaggaggaggtgtagtcaggggattgggaagaggtggctgagctcatctgaagggtgtctaaggttttctggcccccatgtcctggcccatccctccctgcccagggtctcacccctcacctgacagcccagagctggagagtggcctatgattctgattagagaccccaccaaagcccagaggggaagacatgggtgggaggcgtcacagaagacagttttctgcctgtggtgttggggcagtttcctggaaaggaaattcagacactgtaggggagaagaaaacacaggagaggaaggcccctccccaggggattgtggcgttagagaccaaagcatcttcaagaagcccagccctgcaggaggttccctgagcccagagttcctagagctgtctgtattattttgcctggggtgccataaaaagtaacacagactacatgactcaaagaacagaaatttattgtctcactaatcttatggcgatggtagaatctgagatcaaggtgttggcagggttggctccttctgaggctgagggagggtctgtttcatgcctctcccctggcttttggtggtgtagcagtattagctgttccctggcttataggtgaatcaccccaatctctgcctccatgttcatatgacgttttctctctgttcatgtcggtgtccaagttttttctttttataaaaagaccagtcctattggatttggggctcactctattccagtatgacccgatgttaactaatcacatctgcaaccacccttttcctatgtaagttcccattctgaggtcctgatggatagcacttcaccatatgaattccagggggcacaaaattcaaattcccaacaatgggccaggcacggtggctctttgggaggatcccaaatcccagcactttgggaggccaaggtgggcggatcacatgaggtcaagagttcaagatcagcctggccaactggtgaaaccctgtctctagtaaaaatacaaaaattagctgggcgtggtggtgcgtgcctgtagtcccagctactcgggaggctgaggcaggagaatcgcttgaacctgggaggtagaggttgcagtgagccaagatcgttccactgcactctagcctgagcgatagagtgagacttcatctcaaaacaaaaaacgaattcccaacaatgcctcagacatggcttaagctgcccactggggctctgcaggtgggatgtgcaccaccaagctctcaggtggggcattacctgacagcccagaaggactccgggccctctgcaaagtgcctgatctcttgcgcaccttaaaaggtagcttttcaggctgttcttgttcttttcatgctgacgtaggagattttatcctctgctttttaagtagaagcttccttaccctcctcatcatcctgagtagatgcctaggctggtttcagagaaatcaaaccagggtggattatgagttatattagccaccagctgtcaatattctctgaatgcccagcatccatccatgctctctgaccatcaccagagtgagcaaatctctgacatgtggataagagtttcttccatgggctcccagccaggctgtaagtgagaccagaatacccttccttcagtgcatggggctcagtgcagctgcctccctgacagtctccctgggacattaagcttgtcagcttctctcttccaaatgcaggtctggttgtcctaagcccagctcagcgctgctgtggactttgcatcctaaaaacattatcaactctgccttgtgcctcagtggactggcctggaggaaacaatatgaggtgtcctggctctttccacccccagcgtctctctccctcagtggtaccagtacggtcctcatgacggttcatctatacctgccaatctaggcctccacactgccgactgtggatggtcacagaacccaaaatgctaatcagccttaagcagatcatgctaatagtttctgcagatctgggtgcctcatcccagatctaggagttcacaagctaggccagctccagggagataacatgtatcacagagtctggacacgacaaagtggctttgctgtatttttgctgggacacatgatggtgatatcaataagaactggctcaggtccctgcagcttaaggcccattgaacaggaaagcagccaggaggatgtgctgccttttgacctgtacacaaatcagtgccatgtgccgactgtgtgtgaatatctgtgcctgtgtgtatatttgtgtacatgtgtgtatgtatgtgtacgtgtccaagttggtgttgcaaggaagtgttcctactgtcaaatgtttcaaactcaaatcttttctgttttcctaacttacctgcttcttctatctctagtgcctttgttctgcactaagaataaggatgaagattagggtagtaatactagcaggaggagtaaagattcatatgtgtttaatacatatcaagcagtcttccaagtacttcatatttattaattcccttcatctcaacaactctatgagttgttcattatccctccgttttacagttgggaaatctatgatacatagattttgagaaatgggaaaactaatgcagagaaaagaagaataacatgcctgatgtcagaactagaaagtggctgacccaggagtagaatctcaggtcttctggccccagaaaacctgttcttaggcaccatcctgtcgcctgtcattgcatcaatgtggtaaggcattggtgtgtctttaaggctccagaaagttctttctactttgtatttattttgttttgtttttgagacagagtcttactctgtcacccaggctggagtgcagtggcaccatcacaggtcactaaagtctcaaccttctgggctgaagagatcctctcatctcagcctcctgagtagctgggactacaggtgaatactaccatgcccagataattttaaagtttttttgtacagatggggtctcactatgttgcgtaggctgttctcaaactcctgggctcaaccaatcttcctgcctgagcctcccaaagttctgcaattataggcatgagccactgtgcccaacctttactttttaaaagtatcatattgtgactttgagtgcaccagcagtgctctagtgctggtctattagaaatgtaattttaagaatatatatatataatatacaattttttagtggccacatttaaaaggtaaaagaaacaggtggaatttatgttcataatatattgtgtttaaatgatttatccaaaatattatttcagcatgcattcagtattaaaatattgagatatttattttatttttgtactaattctttgaaatctggtgtgttttactcctacagcacatcttacctcagactacccatgtttccagggctcagtagctccctgggactcatggccgccatattggacacagcaagtccagatggataaaggtccatttgggtcacagcccctgcagtacatactgacagctacctgggaagaatggagagttccatgacccaaagggcctcctgagggaggaatggcagctctactttccagccaaagcaggaatattgagggcactaagaaacaagggaatttttacagtgtgtttcacacttcttcccttctcaaagacattaaatataacttcaattttaaaggtgaacctcggccatcaaaggcatgttttctattggtctctttccggtggaatgaatggcaatggtccctgtaaattgtgctccaaggatccctttcagtgggaagattcttgtgataagcccaataacaagtaagaaagcaattttttatacatagatctagaacaaaaagggctcatgatgaagaatattttattgaagcttagtgtattgctatttttcataaattgctgtttttgcctatcccacaagcactgatcacttttatgaaggtacattctccaagggtcgtcttagcatgtcaggacccacaagcaaaggtgttacaagtgacctgcacgagtggccagcaggacacctggaggagcccagtgagatgaggagtggatgcgcatcaggtgggaaggcatggagaagctgtgtgccacacactcaccaaggacaggagcgggcgtatttgtggcctgtggcctaatcttaggtcagttacctctttagactaaatcccaaggagtcagcacatggaggtttcggtccgtgcacatggcacctacagggcttcacatgacgttgctaattacaatgcagcggcacttacaaaggaattagtttcatcacatcctcagcagaactaggtctaaaaaccaatatatatgtataggatatcaggtgagaaatactttcttgccaatcatgtgtattaacgttaaagtggttcagtatctagtgtgacagttgttcaggcttagtggccttgaccacgtcaaaaatggaatcctgatcctaacttgtctagagattagcctggcacaaggagcatgaccaggcatctggatgtccccagtgtcactgcagacacatgctcctttttcatctgccagagggagcattaggatgtcctcacctctgtccccagaactcaggaagggcagtacacctgactaaagagtagagggttgtgaaaagagggacctagggcactggataagcaggaggagaaggagcactgggtgggaggtagagaaaggagggggctgaatggttaggctctgaggtgtgtctcctggatggagtcttggattccactcactaccatctgagaactttgagaaaaccgtgtaacctcctgatgttgggtctcttgtcagtagacatcagtgctttcctgatgtatagggttactgtagaattataatgaatgcctggttgaggtgacatgtctaatacaccctccaaagcatcaggcatatattaagtactcataagcaggcattctgtgtgaactagtcatacatggaagatgacattccccgtgtgggcacagtaggatgctgtggactttggtttggggaccctaataacttcaagtcccctggtagcacccaagtgtaaaaggcaaagggcatgactggtgcttcctgtgaggcctcttctatttggtaaaattcactctccactcatcgcacccacctggcctttattctaaacttggaaaattgctaacatgaaggtctcagcctcagggctcagataagaactcagacacatcaatagagaggatggctgaggtgcttggccgagctcagtgaacaccccagaacaggaactgaggagtgtatgcatgtgttgggggcagcactttctcactcatccagaaagtgtgaggaatctgtacagaactggggacagggcccatttttatacccttctataagcccagcccttgtctgctcactagggagccattcaccaaggccacaggagggaaggaagtagatttgcatgaagagcatccccttcctatgttaagagaggcctggaggccccttcccagctgtggactcagaggcagagctctggggcatctccaccatggcctggacccctcccctgctcaccctcctcactctctgcacaggtgctgcctcctagggctcagcccccacaggaccaagaatcagcctggccctgacattcagctcagcacagggagtaatgcagggtgtggggctctggaaatgagacccttatcttcagactcacctcttctctcttctcttgcaggctccgtggtttcctctgagctgagtcaggagcctgcagtgtctgtggccttgggatagacagccaggatcacctgccagggagacagcatagaagactccgttgtaaactggtacaagcagaagccaagccaggcccctgggctggtcatctaacttaacagtgtccagtcttcagggattcctaagaaattctctggctccagctcagggaacatggccaccctgaccatcactgggattcaggttgaagacaaggctgactattactgtcagtcatgggacagcagtcgtactcattccgcggtgacacaggcagaaggggaagtgagacaaaaaccttttctccatctgtcacactctttcttcagctccaggaaaaaactgtggacaaattcatgagcaggtcttgccctgttcacccagatatgagaccttgaggctgcccttccctccaggtctccaggtaggctatgaaaagggtgaatcaggagtcaatacacacacaattattataattttattcttgtttgaagaagaagtagaggaataattgaacatgtaaagtgaaaacatggaaaaccgaaaaagaggaattattgaacttgtaaagatgaaaactacaatgtctgaaatttagaaaatacactgggtgagtttgacaacagaaaaaagattagctgcaaaaaaaaagattagctgcaaaaaaaaagattagcaaattgtataatacagcagtagaaattgtccaagatgaaacacatatgggaaaaataattatggaaattaatgatagaaaggaacagagtatcagtgagttgtaggacaacttcaaacagcctaaagtatgtgtaattagtgtttgaaatagaaatgggtggaggagaaatagaaaaaagtatttgcataaataatggccaaatatttttcacctttggtgaaaaccataaactgaaatatccaagaagctcaacaaaattcaagtataggagacatgaaggaaacaactccaacataaatcataatcaaattaataaaatccagtgatgaagagtcacctaaataataatgctaagagcagttctcattaaaagcaatgcaagaaagaagacggcggagcaatgtcttgaaaacactaaaagaagaatcctgtcaaccttgaattctttttcttttcttttcattttctttctttctttttcttttcttttcttttctttttttctttattttttttttttgagacagggtcttactctgtcacccaggctggagtgcagtggcacaatctcagttcacaacatccagggcttacatgatcctcccacttcagcctcccaagtagctgggaccacaggcgtgcaacactatgcccaggtaattttgtattttttgtagagatgaggttttaccgtgttgcccgggctgatctcaaacttgtgcacttaagcaatctgcccgcatcagcttcccaaagtgctgggactccaggtgtgaaccactgggcctgccaaccttgaatttttttaataaaaacaaacaaacaaaaactttcaaaaaaggagacaaaataaaccctttccagacatatgccaaattaaagaattggttgctatcagactcttacaattagaaatggtcaaggacatccctagacagaaggaaaatgataccacaatgaaatgtgaatttataccgaaaaatgaaaacatcagatatagtaaccacaaggataaacatagaaacctctgaattgtgttaatgtctaataaagataattaacacttcaaagaaaagctaacgtaaatacattgtgatttgtaatgaaaatgaaagtaaattatgtgacaaagcacaaaagctgaagggatgaacaacatgttataatggtcttatactatatgtgaatatataataacacttgaaggtaaaccttgataagttatatacgtactgtaaacccaagcaatcattaagatcaacttttttttttttttttttttttggagtctggctcagtcgcccaggctggagtgcagtggcacgatcttggctcactgcaagctccgcctcttgggttcacgccattctcctgcctcagcctcccaagtagctgggactacaggcacccaccactacgcccggctaacttttttgtatttttagtagagacagggtttcactgtgttagccaggatggtctcgatcttctgacctcgtgatctgcccgcctcggcctcccaaagataaacccttttaacagaaataattatggctagtaagccatattagagttctccacagaaacaaaatcaataggatatgtatgtgtgtatatatgtataatgtatatatgtgtatatgcatgtgtacatataatgtatatgtgtgtatatacatatctaggtacatatatatggagaagaaattggttcatacaattgtggctgactaggatgaaatctactgggcaggctgaaggctggacatttaggtaagagttgatctcgcagttttgagtctgaattctgcaaggtgggacttcaggaatcctcagtatttgctctgaaaaccttcagctcattaatgatgcccacatgcattgtggagagcagtgtgcttatataaagtctacagatataaatgttaatcacatctgaaaattatcttcgtgccaacttctatactcgtatttgacaaaatcaactaggcactatacctagtcaatctaacacttaaaattaaacatcacttaaaccagcaaggagataaaaagaaataatttttaaaaatcagtcaaaaaaaggaaacagaaaaagggaaggagaagcaatgaacatatggcacaaatagaaaatgaagggcaagttggcatatttcaaccaaattatgttactaatcacattaattgtaaatagtctaaatatcacaattaaaaggcagagattgtcatgttgaaatgaacaagactcaactatacatgctgcctagaaaaaaaaccacttcaaattataaaaccacaaaaatccaagtacaaattaaggacaattccccccactcccaagtctgtttcacaaagcagtacaaagaaggattcacagtaaattttttttttttgaagtcttactgtgtcacccaggctagagtacagtggcaccatcttggctcactgcaacctccaccttccaggttcaagtgattctcctgcctcagcctctggagtagctgggattgcctgccaccatgtctgatgaatttttgtagttttagtagagacagggtttcaccgtgttggccaggctggtctcgaccttctgacctcaagtgatccgctggccttagcctctcaaagtgctgggattacaggtgtgagccaccatgcccagcccacagtgaactcttaacacacagttatagaaatatgcatcacctctcccatcaccctttcctctctctggcttccaaaaccttggttctggtaccagagctgagggaaaacattccacagaaatattaaatcaaggtgaagaagggagattctcaagatgtaagtaaaaggcaaatgagggaatggaagtcgcaatgcccttgcatgcataaggacagctcctgcatgagaatgttgtttgaaacattaccgaggaattggtgtccatgttcatgcaggacataggtctataggatatttttgtcatgcctttgtcgggctctggtatcagagtaattcaggcctcaaataggtagtagggaaatgtttgcttctcctctatattctgaaggagattgtgtatgattggtgtcatttcttccataaaaacttgatagaatttaccagtgaagtcatttgtactaggtgggcttttcttagcaggaagattttaaattgctaattcaatatatttatgtgtcatagatctattcagattttctcctttatgaatcgattttgataatttatgtatttccagatacttatccacttcatttaagtcatccataattttggcatttattgttcgcattattccctataaccattgtaccttttgtaaggtcagtggtgatgtcactctttaagtcatggttttgacaatttgggtcaggagaagatttggaggaggagagaacaaggttgtcttgatgttgtcttggctggagtgtgacttggagaaaaatgacttgaatgaaaatacagtcagagggagatatctgtcaagtggttctggtgcctggatttccacatgtgtggtgacggagcccagcccagtgctctactcatgcccagatgtcctggattattcccctgaaatactcaggtgaagctccagctacaccatggcatcctgatattttaaacagagaagaccagtgtcatgggcactggtgatctgctcctcagggcagactcactaaccgtggcagctgggaatcccaggggcctcacagctctcactaaccgtggcagctgggaatcccagggtcctcacagctctcactaaccgtggcagctgggaatcccagggccctcacagctctcactaaccgtggcagctgggaatcccagggccctcacagctcttttctccctcaaattgctgctggctacagagaactgcctccaccaagggcatgcccctttcacagtgtggctcaggcctaataactgcatgagactgaaataccaaggccctgtctcaggttaggatgaccttgcagggcctcccagatgagtcctcaactggagtcagatttcaggctgcccagttgtgcccccccatacttccttccagagcgaatatctccaaacactactgtatgcaattttccctctcagagtctgattccagggaacacaaaatagaaaacagtctacaaggaagagtacggaagaagagagagcagcacagagacaggactctggaatctgcaaatattcctgagcactgatgatcccatgagtggaaggaaaatacttaaggccaagaaaagaaccacccaaagacatttgagggaacaattgcagggcatgtgcatgcgcgtgtgtgcgcacacacacactcacacacacacacacacaccatcagaatagagtttgttcctacaaccagtgtggaaatgtgtctaatcagaggcatcaggttaactaatcagaatttctctgccctggctgagcaaagtggcttacacttgtaatcccagcaatttgggaggctgaggcaggaggatcacttgaggccaggagttcgagaccagcctgggcaacattgtgaaaccccatctctacagaaaacttaaaaaatatagctaagcatggggacatgcacctgtagtcctagctaatcaggaggttttaagcatgaggactgcttcttgagcccaggagttcaaggctgtattgagccatgatctcgccacacagtttcaaaaaaaagaaaagaaaagagaaaaaaaaatgaataagaaaagctctgccttagtatagggggaactaactatagactaaaatctgctcctatccctcctaggacaccgtaagagcaagttcagaaaggaacatactctcttcaagaaacccttctgaatcaaagaagacaaaaatatgtggagaaatataaaaatatcatgcacctaaaaagcaaaacttcacgatgtctggcatcttattacaatagcaggacaacgtgagtcagaagtaaaaaagttggtcagcgcatcatggccctgaaattgcacaggtaatacactttctagaccagaacaaaaagcagttgttgtaactgtaatccatttgtcctggagggtagagtattgatggaacaagttaaatggagacatgaaagacatttaaaaaacacctacatttaagtcctagaaatgaccacagaaatatatgaaatcaaagtactttgaatgagattgctggtatattacatgctgaaaaagaagagattagtgaatctgatgatatagtaatgagaactattcaaaatgaaatatgcaaaactactgaaaatgacaagaaaagagcatcgttgagttatgggacaactgcatgccaatgcaacctaaaataacgtaatttgtgttactgaaaaaaagaagttggtgggggtaggggagtatatagaaaaactacaaaacaaaataatgactaaaaatgatccaaattttgtgaacatcataagccatccattttcacgaagctcaaccagcccctgacaaaatatattttaaaatataaatacgttaagataacaataccaacacatatcataatcaaattgctaaagcacagtgatgaagagacactcttaaaagcagccagaaagaaaagacatgttagatataatactaagagcagagttctcattagaagcaatgcatgcaagaagacaggtagctacatctttataatattaaaaggaacaactgtcaaccctgcagtctttacccggtgaaatatctctcaaaaatgaaggccaaataaaacctttttcaaataaataaaacttacagaattgataaatcacaagccgtcactaaaagaaatgatgaaagacatccctcatacagaacaaaaattataccagatagaagtgtgaatctgcacaaagaatgaaaagcatcagaaatggtgactacatggataaatattttaatagtgcataatgtagaaataaaagggcttgaacagcactatagaacaactagacttaaccgatgcctgtagaactcttcaagcaacaaaagcagaatgcacattcttcttgcatgcacatggaacattctccagaaaaaccgtataaaacagattgataatttttaaaaagatagaaatcacacaaagtatgttcccaaaacaatgtcattagagaaatccaaaaaattgagggaagaccatgaaaactgcatgaaaaaaattgagatgaatggacaaatcactagaaatacaaattctattagaagtgactcaagaagaaatagaaaacccgattaaaactatagaaagagattaagttaataataataagaaaagccttcccataaggaaaggcccagacacagagggcctcactggtgactattaccaaatgtttaaagaagaattaatataatttatcattaaacttttccaaaatataaaagagataaaatcacttgccaactctttctctgaggccaatattaccctgataccaaaaccagacagagccattacaagaaaagataaatacagagcaatgaccttactggatatagatactaaagtccttaacaaaataccagaaaatgtaatctaacaagatataaaaagaagtacatacaataaccaagtggtgtttatccgaggaatgcaatgatggtttaacatctgtaattgaattaattaatagaaggcatcgtattaatagaagaaaggacgaaccatattgtcatctcaaaatcacttaaaatgttttcatgcaagcagactttctttcttgctgtttttaggccatcatgagaagtggagatggcatggggtagtatttcatgcaaagaatctggatattccatactcaactgtgaggatactttctgataaatgtaaaagattgtaatattacgtttctgtatgttcagagaacacttcctagacaagatatgtgtacagaaccgaaaggacaattaggattttggcaggcattgagtgaggagtggagtcactgcaagtgtcagtcagagaacaagaaagatgttaggaaccatgtatttctacctggccatcctactgggataccatccccttcctaacacatcacccatgtggcttgtaaaaatgtccatacttgaaacattttgtccacataattacaggtctagtgctggaatcaagttccctttgatgacatcaggacagttaaaggatctgcgtgtctaactgcccccaggtgatgctaacattgctgccctctgaggaccacaagcaaagtagctcagctcctgacctcctgctcccagcacaggtgagatgcacctcagctacatctgtgaagcccaggagactttctctccctcctcaggctccctggagtgatgacccaggactcatgcctctgcacatttatcctttccctcagagtttggggccttatcagtcctgttacatcttctcagcatctgaaaccactggagaggtggtcaccatctcctgtgctgacacagcagtgacattgggggttataattctgtctcttggtaacaaaagcaacagggaagagccccatatgactgaggggtgagatcaggaaaaagcctcagagattccagttctaatctcaggccgttctttgtattcttttatgagctagttagtcagctggtcagtcagctgtggccacaagaagaaatggaagagaggttcagaaaacagccctagagaccatagacccagagctctagagacagcaggcccaatgtgctacacagggccacagggaaaggcatcaggttcattagaagacagaagacaggagggcaggggatcccttagaccatgacttttatcagaatttcctcaggaaaagcagggcaagctaaaaaatttatgattggccagcctgaataatgtcagcaggctttgggctactaaggtggtctctagctgcttggtacctggccctgggacgataaaggcagaggaatattgtatcctgggatgcacaaaccagacaggggtggtgaggctctgaacacgttagtttccatatgaaaggcaggcttctggctgagcccattgctctttcaaggaatagagaactggggagacccaggaggggtggtcttttcccagacagaaatgttttttaagatgtcaaaatatcaaaatatatagaaaattatatacagttgacccttgaataacattggtttgaactgcatgggtccattgattttcttctgcccctgtcacccctgagacagcaagatcaacccctcttcttgctcttcctcttcagctactcaacccgaatataaaaaagataaaatcctttatgacgattcagttccatttaatgactagtaaatatattttctcttccttatgatttttaaaataacattttctgttctctggcttacttcattataaaaaatactgtatataatatacataacatacacaatctgtgttaattgactgtctaagctaggcctggctctgaccctgatcctgggagacactttaggcagattactctggaaataagtccctcagtctctgaccatctctctctcctcggcgggttctctgtcctcccatgggagctcagtgcccatggtgcagacagcccctctcagctgctcaggaccaagtagggaagctctgctctgtcttggtacccgcagaacccaggctggtgcccatgctgggactttaatgtggtgacaaaactcctcatgcagtgctgattgattctctgacagtgtctaggaatgtaattcccctgaccaggggacaggttgaggatgagtttcaggggggatgacaacaagacttccaatgacacagccacagggagaattgagatgcacaatctgctgtccccagcctggatcacacgctccccctgcatttaggaaagttgcttagaattaggctgaagaggtcaggattcagttttaacattgacctctctctcattttctcttttactctcttttctccttctctcttcctctctctttctttctctttctctatgatactgaagcccttattcacccccattctcagctatgaaatggacatggaaccctgacatcgtgagtttcctcaaggatcacaggagtggagtaaagatctgagccctgtctccaggtgtcctcaagggtctacatcacaggctcctccatcctgctcttcccttacacaggggctcccctcagatcctgcccatgcctaaatttaggccccatttctttgagacctgtggacacttcatcctgaggttcctgagggtttttctccctgctgacgggagatcccactgatcacatggtctgcttgttgtttctcaatcctggagcacagctgcaagtgtcacctgagacacggccaatcccccatacaggacagcagtgaaggtggaagaatcccagagtgaccgggtaccgtcattcattcaaattccatggggctcttgctgcatcactgggtgtcatcctttgggaacctggacttctaaactataagactcagagttagaaaacagaatcataaattccccatgtaagccactacttccacccctggtcctggactcagatatgttactaatgaggaacacagttcctcatagtggctgctgattgaggacatggtgggcaaactgtggttgatggacacatctgtcttgcatcctgcattggaacacagtcttgctcatgtctttatgagtgacatgtggctgttttcatgctgcaatacaaggcttggttgtggtgacagagatcctatggtctgaaaatctgaaatactatactaaaggtcccatactgtatcatgtcttctacatgaattatctacaatagacaaatccatgcaggcagaaagaagatgagtggttgcccagaattggagaaggtgatgaaagaggagaggctgctcactgggtgcagaattttcttttgggtgatgaaaatgtaggagaactacacacacagctggtggctgcccaacaaagtgaaggtgctaagtgccactgcgttgtacattttgaagtgattaattctaggttatatgaattccacacaatacaaaactatgattttcagaaattgactgttataattgtgttattatatctacaactttatgatggcactaaaggaccatgagcagtcaatgcaaaggatccagacaatatttcaagggctcttccagagtaacaagacatgaaaaggcagctctggttctctcttgcctggcgtattttaccctcggagttttttgtttttttgtgttgttgttgttgttgttgttgttattgttgttgttgttgttacagagtctcgctctgtcgcccaggttggagtgcagtggcgcgatctcggctcactgcaagctctgcctcccgggttcacgccattctcctgcctcagcctcctgagtagctgggactacaggcgcccgccaccgcgcccggctaattttttgtatttttagtagagacggggtttcaccgtgttagccaggatggtctcgatctcctgacctcgtgatccgcccgcctcggcctcccaaagtgctgggattacaggcttgagccaccgcgcccagccaaccctcggagtttttatgagcaccgaagggtgcagggagctggaagctacccaccaggtgcctggctcactcatgtctgggtgcagcagctcccccaacaggcagctggcagaactgaaagggaagagctatatccttctgagcccccacaattgtggtgcaggattgttcccgacactcccatccagtctgcttgctcctgcacacttagaaatgatcattatttctgcccaggacctccctggtcttgctctcccctcttcctccccaggcgaccttgggaactttactcaccctctggcccttccctcctctgtccagtgttttccccacccactgtgatcagctcagatcagcgagtctgtgggacattagggatcagtcacccatgtgaggccctcgacggggtcccaggatggagcagtgtatgtccccacaaggctgcttattgcacaagtaatggaggaacaaaggggtgggtaagccccctcctgggcagcttcagaccctgctaaaataggaaacagcctggggcaggtctgaccccacttgtgtctctcctgcccccaccccagcagcagcgtcctggaggccataccatgtgctaagcagatgccaagatcacgtcattcatcatcacctggaaattcccctaaccacaccttaatacgctgcactcgtgcctcagctaaaagtatcacacactgcattgcaatgagtttggatcccagacccccttgatgtttgtcactgctctttcagatcctcgaaaacacctacccctccctgcaggtcagtgacagactcttcttcctcacacttcctttcactgtttcttccttcctgagagcagctccagagactcctcttcagggaggcgccccaacctctgattacacagcagtctgcctgtcattttctgtgtatgcattctattaatgatctgcagagcacctaaacttcatgcctcttttcctaacatgtttattaattgattttctggtgctaaatactcctacaatcaatcaaaaatgcttctcctctgcttggacactcatgagaaacagtcatgaaccatttgctattttatcctcaaaaagtaagtgtggagttcactgctgttccccacatactcaccaaataatgagaaacccagcaattacccaactttctgctccaccatcatgacacagtaggcttttctttcatttgtgtggacttaagacctcaggatggctgctgcagctccagctattatacccatattcaagagcaaaggtgctgcacgaaaacagtctgtttatttccatcacaagagaaaatgttccctgagaagatctccaaccacctgacccttacagccctggggccagcatgggaccatgtggtcagtccaagccaagagtgaccagggaaaacaaggatctttttgtaaataaatagaggagaaaatacacaggtagaagatggtgcttctactacaaactgtttctattacacagccccaacccccatgtaggaaactcctggggtcagagacagtctttctcgtgctgaattcccaggatggaatattgccggatcagagtgggtctcaataaatactggctgggtggatatgctcctgcctttgtttttggggcaggagccaccactgcctcatgtttttctacacctggagccatgaaacttggtgtctgaggtctgcggcactatatgcagagccttggtaagatgcactggaccacttaccaacccagtgacagtagagggatgtcttaggtgggccctacccattttcctccaataggacgtgctcataatttcatgggtaaccgagccccttatgcctggtattgaggcatataaggccaaataaagaagaggaattcctctcttggaaccagcagtccatggacaagggaatcagggacctgagcagcaggttctgaatccacacctgatctggggcaggacccagaacctatcaaagtcttctgctgttaactatagaatgggctcacaaaatgcagacagaatgatctgtgaactccacctggcctggctagctgagaaccaaggccaagacatagtttaaggtaaagatgttggcccagactttgggaccagcaagtgaaggagaattctgtgggctgaggtgggtctgtagggtcctcccctcccctctctgtgtcccttggggctgagcccttctctggaaactacaaagctactccagtagcagcccctgattctgctgacttgcatcacgggccgctttctccatcaaggggataagagaggcctgggagaaacctacccgccctgggccacaggaagcagcatcagggatgtctcagtcatggactggacctttctcagcctcctcgctcactgcacaggtgctgccgccagagtcccagccacccgcccagccccgggctgtgggaccaggctggccttgattgtgagctcagcagggctctgcctgtggtggaaaggatgctcatgaccttgctgcagggtgaggggctggtaaggttgaaatcttcctgtactcctgtgctcatgggcactctgaggggcacagtcaggctccctttcatcccagaagctctgtcccagccaggcaggtgcaaaggaatcctgaggatcagctcctcagcttcaagccttttctccctcatctcctgcaggtttcatggccacatatgagctgtctcagccaccctcagtgtcagtggccccattacagatggccaggatcacctgctgtggaaatactgttggaggtggatatgtttattggtaccagcagaagtcaggccagacccctgtgccggtcatctataaagacagcaagtggccctcaaggacccctgagtgattctctggctccaacttgtggaacacagccactctgaccattagtggggcccaggccagggacgaggctattactgtagcacctatgatggctgagggagcagcaggcagtggctcacagtgaaacagacagatggggatgtgggacaggaacctctaatataactaggctcaatatctcacatcctctctaagccaggatgtccaacattttggcttctctgggccacattggaagaagaaaaattgtcttgggccacacataaatacattaacactaacaatagctgatgagcttaaaaaattgcaaaaaaatctcataaagttttaagaaagtttacaaatttatgtagggccacgttcaaagccatcctaggctgcatgtggcctgcaggctgcaggctggacaagcttgctctaagcagtgaccatgactttggtctcagttcactcaggtggtttctcatggtagccaaagcagcaggagaaactgtcggatttctatttaaccatgaattttacaattacattcattgtaaatccaaacatcttgtccctttattacctgggccctacagagactagtgcacaggttcatgggataagaaatgtctccagagagcttggtttctgcactagagacagtcgtttccctccctttcaacacagagtgtggcaggaaaggaaccagttctctgagctaaccctgagaacttgggcttgagaaaaagaaagcattttgaaccagtaggattgtgcccacagaatgagatgtgctactctggcccagcccaactcctttcatttcaggagctctgtctgggccaggcaggtgcaatggaatcctagggatcagctcctcagtttcaagccttttcttctctgggtgtctgagaacaggagttgtcttgcacgtgcacatgagaaagaagtgcacacacgactctcaggtgtgagcagcaaagacagaacaaacctttccagaaggggcaaatttcattaagatgacagggccttgttacacaaccccacatgtctggactgggatctcctattggatcttgccataaatgcaaggtttcttctcccatcataaattcctgcattgcagtagacccagctgggttctagggctcaaccagcagggcactcccaccactgtgtggacctgctgcagagccttcctgctctaggacccacagacatgcaacttttctttgtttttgctatttgggttggagcaacatcccaagagtgaataatgcttcttccagaatccatcatgaccatatatacttcttgatgcgaagttaggatgtaataatgtgtcctttttttctatgggaggtgctcagctgttccaaacaagaagaccctaaacatttctgctcatatgaaggatgactccctaggtttgctttcctattctctgaatgcatgggtctccccaaatcttccaatgacctttcactgcatgcacatctcatccaaataccaccacatggtggatgcttgggcatggtagcgggtgcctgtaatcccagctacttgggaggctgagacaggagaatcacttgaacccaggaggcaaaggttgcagtaagccaagattgcaccactgcactccagcctgggtgacagagcaagacttggtctcaaaaaaaaaaaaaaaaaaaaaaagaaagaaaagtttatatttttgttctaatggttatcttaatatcttcattctataattatatgttttatataattataatagctatataagatataatacccctagtatgttgttttttggatattctacttgctcctgatggttaatttatgtgtcaacttggctaagctatggtgtcccgttgtttggtcaaatacttgtcaatatcttgctgggaggttatttcatagatgtgattaacactgacagtcaattgactttaagtaaaacagatcacccaccataatatgggtgggccacctccaatcagttgaaggccttaagaacaaaaactgaggtttcccagagaagcaggaattctgcttcaagactgtaacacacaaaccctgcctgagtttctggcctgctgactgctctacagattttaggttccagacttcgagatcaactcttacctgaatttatagcctgctggtttgccctacagattttaaacttgctagtccccacaattatgtaagccaattcctaaataaatctctctatgtataacctattggtttagcttctctgaaaagctttcacatccagtttcctggatgttaagaattactgaaactagctagtaacttactttttttttttttttttttgagacagagttttggtcttgttgcccaggctggaatgcaatggcacaatctcagctcacctcaacctccacttcctgggtccaagcaattctcttccctcagcctcctgagtagctgggattacaggcatatgccaccatgcttggctaatttttgtatttttagtagagacacggcttctccatgttggtcaggctggtcttgaactcccaacctcaggtgatccgccgccttggcctcacaaagtgcctcacatgagccaccacgcctggctcctagtaaattcttcttttccgtgatgtgtctcttacctctaataatacttttcttcttaaagtctacttcattaaaaatagttatgctgggcatggtggctcatggctgtaatctcggcactttgttggaggtcgaggtgggtggatcactgaagcccaggagttcaagaccagcctgggcaacatggcgagaccctgcctctacaaaaaatacaaaaattagctgggtgtggctaatataattctaagttggcacacttgtagtcccagctacttgggatgctgaggtgggagaatcgcttgagcctagaagggagagattgctgtaagccaagatcacatcattgcactccagcctgggagacagtgaggctctatctccaaaaaaaaaaaaaaaaaaaaaaaaagttatacagctttcttggttagtacatgcatgacatatttttcattattttctacctctctgtatccttatataaaaggcattagttgggttttactttattttcaattattttaatttttattgtccttttaaatgtaactaatgatttatttacgttgaaacccaccaccaatttgttttccatgcctattctatttcttcttatctcctctcacatcttgttttggatttattatttttattatttaatttcctccttctctattagtttcataactgtgcagtcttagagttattttaaaagatgacagtggattattttagagcttacaacatgcatccttcacttatcaaagcctaacatgagctagtactttttgttgtggttgagacagagagagtcttcctctgctgcccaggctggagtgcagtggagcaatcttggttcactgcaacctccacttcttgggttcaagcaattctcctgcttcagtcacctgagtagctgggaccacaggtgtgcaccactatgcccggctaatttttgtattcttttttagtagagacagggtttcaccatgttggccaggctggtcttgaactcctgaccttaagagatctgcttacctcggcgtcctaaagtgttgggattacaggcgtgagccaccacgcccagcctatgagttagtacttctatcctcttcctagtcagtagaagaaccttggaacaggaactaaatttacccccagtgacttatatgctaatatttttgtgtattttaaacatatgtgtgtgcatagatgtatctgtgtgttttttgtgtttttattcttatttatgttgagagtgtagagctatgtaagagtaaagagaattgtgtaatgaagccccgagtatccattcaatttcaacaacaatcttatggccaagctcatttcatgtatactctttcctgcttccctctaccccacattatttcagtgcaaatcccagatatataactgtacccatacatatttcagtatgttttatttattttaaaccccacaagatatcattttctatactactgtaatttcataccaataacattcatttagatttacccacacatctacctcttctgttaccctttatttttatttataaaaatatctttgggaaaaaatatccttcagcacatggtcaaggatctcctgagggctatgtcatggacaaaatatacatatatattccatatatatacacacatatacacacacacatatatacacatacacacacacacacacacacacacacacacacacacatatatattccactttcacttttttgtttgttttttgagaccgagtcttgctctgtggcccaggctggagtgcagtggtgggatctcagctcactgcaacttctacctcctgggttcaggtgattctcccgtctcagcctcctgagtagctgggattacaggtgttagccatcacgtctggctaatttttgtttgtttgtttgtttttgagacggagtatcactctgttgcccaggctggagtgcagtggcatgatctcggctcactgcaacctccatctccctggttcaagcaattcccctgcctcagccttccaaggagctgggattacaggtgcatgccaccatgcctggataatttttttgtatttgtagtagagaccgggtttccctatgatggtcagactagtcttgaacttctgacttcaggcaatccgcccacctcggcctctcaaagtgctgggattataggcatgagccaccgtgactggcctgttttttttttttttgagatggagttttgctctgtcaccctggctggagtgcagtggcaagatcttggctcactgcaacctccacctctcgggttcaagcaattcttgtgcctcagcctcctgagtagctgggattacaggcatccaccaccacatctggctaatttgtgtatttttggtagagatggggtttcaccatgttggccaggctggtctcgaacttctgacctcaggtgatccacctgcctcggccttccaaagtgctgggattacagggaggagccaccatgcccagccattttcacttttgaaggatattgttagtgagcatagaattctaggttggcagatattttctttcctcagtttgaaaacatgattccttgtatctgatttctcctgcttttattgggaagccaattctcaatctaattttgctcatttgaaggcaatggctttttatgttgttgtgttttctgagatggagtcttactctgtcgcccaggctggagtgcagtagtgcaatctcagctcactgcaacctctgcctcctgggttcaagtgattcttctgcctcagcctcccaagtagctgggattacaggtgtccaccatcacacctggctaattgttgtatttttaatagagatgaacttttgccatgttggtcaggctgatcccaaactcctcatttcaggtgatccgcccgcctcagcctcccaaatgctgggattacaggcatgagccagcccccaaccctggcctgaaggcagtatcttttttcctctggctgctttgaaaagttttgtctttgttttgagcagtttacactgatgcattgaggtggctcttcattccatgacttgattcttttttgtccattttagaaaattgtcagctttatctcttcaagtattacgtcttccccatcctctctctactctccttatgagactccaatttcacatgacttatgccttgttaaagtatcccccatgtctcttaatccattcctgtatgttctatctatttttctctttgtacttcaatttgtatagtttgtatcaaactatctcccaattagccgggcgtggtggtgggtgcctgtaatcccagctacttgggaggctgaggcaggagaattgcttgaacccgggatgtggaagttgtagtgagccgagatcatgccactgcactctagcctgggcaacagagtgagaccctgtctcaataaataaataaatacatacatacatacatacatacatacatacatacatacataccagttcactattttttttatgtttgtgtctagtgtgctgttcaaattgagttcctaattccattttttttgagacttttttttttttgagtctctatctgttgcccaggctggagttcagtggtgcaatctcaactcactgtagcctccatctcccaggttcaagggattctcatgcctcagcctctcgagtaactgggattaccaccatgcctaactcatttttgtatttttagtagagatggggttctgccatgttggccaggctggtcttgaactcctggcctcatgtgattggcctacctctgtctcccaaagtgctgggattataggcctaagccaccactcccagcctccatttttttttttttttttttttttgagacggagtctcgctctgtcgcccaggctggagtagagtggtgcgatctcggctcactgcaacctccccctcccagttcaagtgattctcctgcctcagcctcccgagtagctgggactacaggagcatgccaccatgcctggctaatttttgtaattttagtagagatggggtttcaccatattggtcaggctggtcttgaacttctgacctcaggtgatccacccacctcagcctcccatagtgctgggattacaggcatgagtcaccacacctagtgcatccattttttgtagctgccagttttctgatgaaattcttaattatttctttatatccttgatacacatgtaaagaatttattttaaagtacatggtctgatgattttatattctggagatcctatgggcctttttcaaagttgtctgtgctttctcttgagttttgttcctgctgtcttatttccttgtttgcttggttgtttttaatttggcaatggaagttgtgtataaaaattgttacaaataattttttttttttgagatggagtctcgctttgttgcccaagctggagtgcaatgatgtgatctcggctcactgcaacctctgcatcccagggttcaattctcctacctcagcctcccaagtagctgggattgcaggcaggtgccagcacgcctggctaatttttgtatttttagtagagatgggttttcaccatgttggtcaggctggtctcagactcctgacctcgtgatctgcccacctcagcctcccaaagtgctgggattacaggcgtgagccactgcgcccagccagaaataatttttaaaaataatttcgagcccaagcatgatggctcatgcttgtaatcccatcactttgggaggctgaggcaggcagattgcttgagcctaggagttcaagatcagcctgcgcaacatggtgaaaccccatctctacaaaaaataaaaaattagctgggtgtggtggtggtgtgtgcctgtagtcccagctgtttgggacgctgaggtgggaggctcacttgagcctgggtgatcgaggctgcagtgagccatgatcctgagactgtactccagcctgggcaacagagtgagatgctgtctcaaataaataaataaataaaaataaaataatttgaggcctagggctctgaaattctgagatctcctttatgcatttgagtgactgagatgatctgaagctggatccagtgctcctgagggctgctttatttctggttgactgtgactcctagagtaagaaacctgcaccccatgtgtggggtattatggcatcccctccctcagccacatgagtaagtcaacagcactgctctagaccaggtgtggtggctcacgcctatagtcccagctactcgggagactgaggcaggaggattgcttcaggccaggaatttgaaaccagccagagcaatatattattaggttggtacaaaagtaattgcggtttttgcctttaaaagtaatggcaaccctgtttcagcaaagtaaaaagcaaaaaaaaaaaaaaaaaaaggaaggaagaattaaaaaaagaatcagctgggcgtggtggctcacgcctctaatcccagcactttgggaggccaaggcgggcagatcatgagatcaggagatcgagaccatcctggctaacacggtgaaaccccatttctactaaaaatacaaaaaattagccgggcgtggtggcaggcgcctgtagtcccagctactcaggaggtggaggcaggagaatggcatgaacccaggaggtggaggttgcagtgagccgagatcatgccactgcactccagcctgggtgacagagtgagactccgtctcaaaaaaaaaaaaaagaatcactgctctgtctctcagcctcctcttccaggattggccgtcgccttgaggggaatgctggccttgcctgtctccagccctgtacctctctgcctcctatgcctttaagcacatgttttctatttgctgggctgtgaaatctgctcttcatctgatggggtttgctttataggtgactagattcttttctcttggtggttttagatttcgcattttcacattgaccttaaatagtctgattatagtttgccacggcaaagaccctttgcattgcattgtttggggatatttgagcctcctctatctggatgtctaatctcttgttagatgtgagtagttttcattattattttattaatgggctggcatgtgggccttggttccaggcgggctcagaggggcagctgcctgatgtctgggcagcttctctttctgtcttttcttacctggactctgggttgcttgttagctgcttctgccagttctgagttttcaaggggagaggggcccagtgatggctgttctttgaaggaaagggaagaatgtctcctgtttaacatgtttctatgtttccagttacttggttagttagttagagccagggtctctcgctctgttgcgcaggctggagtgcaatggcatgatcgtggctcacagcagcctccaccttccaggctcgagcaatgctcccacctcagcctctcaagcagctgggactgcaggtatgtgccaccatgcttggctgcctttttaaattttttttttttaatacagacaaggtctcactatattgcccaggctggtcttaaactcatgggctcaagtgatcctcctgcctcggcctttcaaagtgctgatatcacaggcagggtttccattttttaaagctcccagcagtggtataaactcctcctttccagagaaagcgcactctgtccgcatccctcatgttgtcctctcctgcctctgcttagggttcactccgggggaaagtgccacttgagagtttcctttttatgtgtggttctgactgaccgctccctgctcacagatgctgcttctcagggtggggtccctgaggcctggagtgtggcctctgacgaccttcagggccaggtgcggaatgagagcctgtggccacatggcccccggtgggagacgtcccgccgccctttgcttctctgtgccactctggctgcacagttcagagccttgggaaacgttaaccagtaggacctagaaggggaggtgagaaggggtcaccccccaggtgtgcctgtggtgagccttcgtgctgagcaggtgcagggagggaggcccaggtgcacacacctgtgaagtaggggcagctggctgggctccttgacctgctccagagcttcttattttctggccacttcacctgcagaaggcccaggtggctgtagccgctagggtcccttgcagtggaaatgatgcctgtcctcagcccctctctaggcctggcgctgtgctcagcaccgtcgtgtgtgtgtatgtatatgtgcacgcatgtgaatgtgtgcagacatcatgaggtgtggtccctgctgttaggcagcttgccttgtggctgaagtgaaccatcacctgaatcaagggatggaaacacaaggccagatgcagtggccttctatggagtcagacggtggctccgtgacctggcttcactccagaactacctggggtttctagctgtgcaaatcccaggtcccactcagattatgagtccagttctctgcaggtggaacccaggaaggtgtatttttaacaagatggtactgctcattcacccagcccagccagtggtcttggcatacccaggaaccgctgacatagagcttgtgctccccataaagtgggaaacagagcgttcctgggtgggggacatgtggcttggtcatgacagtcagggtgttacataccaggacagactgtgttcgggtgacattaaggacaagctcctgcaggctagctgcctggatagtgctggctgggggtagaagttagaggggtcacagaggggcttcctcccggccccctcatcagctgcttgatttagggcttggttctgggtccttctgggcctgattctgaaccatgggactggtgtggcctgcaggctcctcccgccacaagctgttcatggtgcagggggagaacagtgtccacaattccccagacagcagctgtggatgccaggcccccaggagttgttactgaagttgctgctggacagctcgcctttcactgagctccacatagcacccgtggtgatgggagccggatggagagagcctgccagcctgcacatcagctcccaactgggcggggcagagggaggagggggtggggaccccaggcagcagggctctgggagcagtggggccctgggttccaggggtgtctggcaggcccctccttactctacgtctctcagcctctggatggaggtgctggccgcagtcgggctctgcctctgactaagggttggggaagtggcgggtgtgggctgctgccccgtggggcctctgaacagaccccagggcctctgccaatcatgactccttcctttcagctggacccacaggccctgcaggacagagactggcagcgcgccgtcatcgccatgaatggggtacgtgtccgtgggactctcctggcgcccacttcccccagaaggatagggtggcctctgttcatttcaaatcagtcagaggtggctgagcctgaggcagcatctgagagggagcctggttggagaagggagggcccccaagagcagaatcaccatgcacgggaatcgtcattcattggctggaatgcagttgccagccaggccctgagcatccctcctcaaacaaaggtctcatggcaccaccaggacaggtggggcctccactcagggacctgggggctgcccatagaaatggagacccctgatttgtctttaggtaccccagaaaggtttaggccttaaaagcaatgacacacccaaaaaggcccgggtataaatggtaaaatgttaatatttgagattcttggctttttcttacattattctgtctttcctacttaatttttaattgttactaagagaaagctggtcacagtacactataatctcagctactctggaggctgaaccaggagaatcactggagcccaagagtttgattacagcctgggcaacattgcaagatcccatatcttaaaaaaaagtaagcaagcaagagaagcagcggggattttaggaggtgcttctgcagaaaccagtcgtttacatcatcttcaacaatcctggctcttgctgaagtagactaggggcttccccgaggggcggctccacctcatgctgagacctctgcatgccttgggggtggaaatatttgatgagactcccaggggtccttgggaccttgggctatgaggaccagaaggattagaggactgtgccccttctccccactgtagatcgaagtaaagctctcggtcaagttcaacagcaggaagttcagcttgaagaggatgccgtcccgaaaacagacaggggtcttcggagtcaagattgctgtggtcaccaagtgagtggggaggggcttgggctcacgcactgagggtgcctgtcccttcagctgtttctgcagaaaagagcatgtgtgggtctctcctctctgtgcgtggccactgcacggtgaggtcaggccccagggaacacggcgtcttcagctacctcctgtgtttcctgcaaaccagctcaggaatgtccttgccaccttgcttggaagcagtaggctggctccaggaactgcccaagtgcagggttttctgcccttgcttggaattagtcacggtcccagattcctgttgaatggttgtaacccctgcccctttgtcacgagtcagttgccaagagaagcctgtttgttggtttgagagcagttcatgcagacatagaccacttcctctgagaattcatttgcctccctaggatggaatctggctgggcctctgaccttgctggtcacgtgggccggggcctccatcagtcataccctggactcctatctgtgtctaaacaccacgccccacccccactcgcatagcactctgggagggctgtgggcatgagcagcgaggactccatcagcagctcccccagataagccctgctaatgagggggcttgcgaagcagctttgatgtgctggtaaatccaggtgcaaaacagaactcaagttaaggcctccgcacagcactgcgttctaactgtgaaggattcttactctagtgtcctgtgtggaggtattggaattgtccattgctaagactcagaggagaaaagcacttagcatcgcaggacttggagcaccggtgctgaggcaacccttcattcattcgtcggatgtgtgttaaggcccaggcccagggcaggggtcagggattctcctctcacacagcacgtgggtggcaggaccaacaccgggtctgacctcccagacgggggcacaggctgctaaccccaggcctggaatctgtcagatgcccttcccgtgctgacttgacttagacaggcctcctgaccttcccgcaaaggtcatgtgtgattcgcaggggttctggccgcttgaaaggttcctgagaaagtacatgccatgaggacagagcttgcagagggaggacaggcatgcagaaggctctgtgtgcagccccagacctgggtaccttcgtcaccgtcctcaccccacctccgggtgtgcacatagggagcaggtctcctgtgttatggcccaagcagggctgttaggacactgagaacattccctcctcccgcaggagagagaggtccaaggtgccctacatcgtgcgccagtgtgtggaggagatcgagcgccgaggcatggaggaggtgggcatctaccgcatgtctggggtggccacggacatccaggcactgaaggcaggcttcaacgtcagtgagtgtcggcctgcgcaggacgggatggaggtgtgggcagtggtgtccgcgatgagatctcagagtgctccatggcccaggcatgtcacatccttctctgtgtcttttcttcatttactgttttattattttaaaaaaagagaaaacaagagttgtacaaacagcttctatagaagccagtttttacaccatcgtacccactcatgccacttggtggagtggaccaggggcttctgtggggacttggccttcctgccttgggggtggacaggaggtggaagcccaggactcagtgcggtctgtccactgccctgtatgaggatgtggtgggcagagggcactgatgaaattcagcgcaggccggggctgcagcatctccgcctccatctcaccaaccctcacaggctttgaaggacccagactggcctcaaatgccaggggagggcactgagaccccagagggtccctcccagcatcttcaaagcaacaggattttgtgcctgcaggcccttctttgcagcacacaccacccaccctgaccaggacccctagaatgcccagcatccctgggagggccctgtggtagtttcagctccctctgggggcccagaatgaacctggcctgtggtgaggatgtaagcaccaatggccaattgggtccaaaggaagacaccggttcaaacactgaaaccaatcagattctcccacggccttcctgctatcagacgacactggtgcaggggtggttgctatgtacagggcagagccacccaatccccacgcaggcgctgtgtcctgccatgctggcctcctcctggccatcacatcaggccaagcaggggagaggaatgggaatgcccacgcacccctatcaactctgcagacacagaaccatgcacagctcttgggaggagtcagatgagctgctcaaagcccaggagggacccgcacagtggtcagtgtggcagggacggtgctttagccaaggcagggatggcgggtgactcactcaggatcttcaaggaggccgctgcatttccatgctctttccagataacaaggacgtgtcggtgatgatgagcgagatggacgtgaacgccatcgcaggcatgctgaagctgtacttccgtgagctgcccgagccccttttcactgacgagttctaccccaacttcacagagggcatcggtgagcactggaggccttggcctcgtgggagatgtctcccccatgtgcactgctgccctcggaggctgtgaaaagcgaggtgtgggaacctgagttgtaacccctctgccatggtcggcattttaacccaacctcaaaaagcaggggaccagaaccgagcctgtcctggaaggccttgcccatccccagagggctccccatccctattcctcaaggaggccaagtgggtgaaatggtcagcactgccgtgctgtggggtcctaaagtctgctgtcctccttcctgcagaccagggctaaacactggtgcccaggtgctcttgccatgggtcctggtccagccaagcatggtttcaaacatgacctgacccttagtcaacctggaggctgatgtctagagtgggcgctggagcgtgcagcacctgtggcctctgcatcacccttagggcaggtctgcctcccgggcccatgcacagaggacctggtctcccagcctgcaggtgcccctgtggtgtccaggacgacgagggggtctctgcgtacttggtggggctgggaccctcccacttcccacctccttgtgtccctcactccgctgtttcattccatgctgagcctcccctgccttgggctccctggggagggggtggtggcaggagttgcccaagggctgctctgcccatgagcagctgctctagcggctcctcctgctgctgttcgccaggtgctgctgacccctgcgaggtagagaaaaggcgttcaggtggttcacaccccacacaggtgcccctcacagggtcctcactggcggccagcgctgtgggtgtgacgatgatgacaagcctaaactgcgcaaggactcgtgtcccgggcgctccatgtgaccacctcgggagaggtctccggcttgtcgtaacccaggggagtgacccactgcctcctgcagctctttcagacccagttgcaaagaagagctgcatgctcaacctgctgtcgtccctgccggaggccaacctgctcaccttccttttccttctagaccacctggaaaggtagcccagctctcttgtggctgcccaggactccaggtctccaggccgttggggtgcccctctgctcccaccagacccccagcaccaaggaccttttcccccgacccctgtctgcagtaactcactgcttctaaggactagcaccactgccacccctgcccctgcctctcctctttgccacccgcctccctctgcactgtggccttaacaaagagctcagagctttggccgtggccagcagtgcatttggaccgcccccacttccctcccaagcacatcatgaagacctccccatcagcccagagctggccccttgtcccgggccactgagacccagaagtaccaaggctggagtcagcttgcagcacagccagggtcgaggtcactccctccctgaggactctagcatggcacagcccctctgcctctctcctggtggtggcgttgaaacagcaccctctgcttcggtcctctacagggtggcagagaaggaggcagtcaataagatgtccctgcacaaccttggcacggtgtttggccccacgctgctctggccctccgagaaggagagcaagctccctgccaaccccagccagcccatcaccatgactgacagcaggtccttggaggtcatgtcccaggtatgggaagacagcctccagcccatgcaaccccagcctgacagaggtggcctctgcctgccccacccccagtcctgcccatcttcccacttgcattgtatgtggtggtggctgagattcagagagagggacttgcctaggtttgcatggatgggagtgatagggggtgcccaggccacctcctggtcctgctggtgcatcttgctgggggcttaaaaccaccccaagtgttcgggtgtggtggctcatgcctgtaatcccagcactttgggaggccaaggcaggacaaccgaacccaggtgtttgagatcagtctgggcaatgcagcaaaccccatctccagaaaaaatagaaagaaaaattagtcaggcattgtggcacacatctgtaatcctaggtatctgggaggctgacacaggaggattgcttgagcccaggagttagaggctgcagtgatccatgatggagccactgtactccagcctgggggacagagcaaggccctgtgcatctctaaaataaataaccaccccccacccaacaagtcatgccttgtcaggaccccaccccacccccgtctcactgtaaggggttcatgacaccagcaggggtttctagcacctgaggtggacttgggggcttgggccccaaagacctccccaccagcagctgtgagcccccctctgagccactctcctcttccccactctgcgagggcaggtcgaggtgctgctgtacttcttgcggctggaggccatccctgccctggacagcaagagacagagcatcctgttctccaccgatgtctaaaggtcccagtccatctcctggaggcggacagatggcctggaaacctctggctaatcgggccatctgtagagtgggaatcaagattttctgaggcatccttgggccacccccaggtgtcaggccatctgccaagagacagtggcccaaagcagaaggacaggtggcctgggcagatcccgcccaggtctgaaagccccaggctggcctcagactgtgggttttttatgtggccacccgagggcgccccaagccagttcatcttggagtccaggcctggccctgggagacagggtgaaagcagtggtttttatgaacttaacttatagagtctaaaagatttctactgaatcacttgtcaagaagcgccctctctggggagaagggaacgtgaccggattccctcactgttgtatcttgaataaatgctgctgcttcatcctgtgggggccgtggccctgtccctgtgtgggtggggcctcttccatttccctgacttagaaaccacactccacttagaacagggtttgagaggcttagtcagcactgggtagcgttttgactccattcttggcttgcttctttttctttccagaaggatttttgtgcagaaatgggtcttttgttgccgtgttagtcctccttggaaagcagctcagaaggcccgtgaaatgtcgggggacaggacccccagggagggaatcccaggctacgcaccttagggttcgttctccagggagagcgacctcgtcccccgatcctgaccgcccttccggcccacgctctcctgtttggcttccacaggcctggacttctctggcttctctgcccacacactccctgcccccagtgtccctgcccctgccccagcacaggtgacttcatttctgtcctctcagctcagtggactcgctcaacttttgtataagtctccacttggtggtagcagcttgctgatgacttgttttaaaactttcatcctaaataaccttttgatgcttgaatatttttaagttttatacatagtttctaatttttttcccagcagatccagatacctaataagatgctggaatgtaatccctggacaatccgtgtcctggcagcatttggtcttcctctaagcgcctggctccgctgttctcaggagtgggttctgaagtctctggagaacaggatacgtggagggttaggaaggggccaggcctagagacgggagactccctcccggagcaggtggaggcacaggaccattcgctaccccatctgccgacagctgcgggggagcccaggcattctttgtaagccctcctgactacctgactcaaagaaaacagaagcatggaggccgccaagtattttcaagaaataaccccatgaatattccatcacttttttagaaagaggggcttggggcaggcagaggagagaagggagagcaaactgagagccaagtttccagacagtcctgcaggaggagaggatgcagctccccagagggaagcaggatcacatttaaggaagtgtgtggggtccctggatgacaccagcacccagtgcggctctgtctggcaaccgctcccaaggtggcaggagtgggtgtcccctgtgtgtcagtgggcagctcctgctgaacccgcagctcactggggagcctgacagtggggccatgcgcctgacactcctctctgcttgtggacctggcaaggcagggagcagaaaacagagccccttgaaggcttcctgtctgcgtctgtgtgcagtgtggatttagttgtgctttttacttgctgggagagcacagccaccatttacaagcagtgtcaccctcgtgggtggcgaggacagaacaggagcctctgctctctgtacctatctgggcccggtgggctcccttgtcctggcttccatctctgtctcagcgaccattcagccctgcgcaggaacacatgttgcttagaaaagccaaatccagccttgtctctgcctcctctggtctcatgatgtgcatctgttaccttgaaactggaaaccagtctatcaatgtctgtgccaattttttattccctccccaacctccttccccatacgactttttatttatgtaggatgtgtgctgtctaatgatgggatgaccacacttttccatgttctaaaagtgctcctctcccgcagggtcccagggctggtggttgctttgggtctacagctacgtcttacccgcctcctgcctcaacagcctgtgtggtggcaaagccggtgtggggctggggaacgcagcgttctccaggagggggacccggctctccttctgcagtgcaggcaaaggcctagatgccagtgtgacctcccacaaggcgtggcttccagactccccggccggaagtgatccttttttgccgcgggccctgagtttgaagcagcctggctttctcttggtaagtggctggtgtcttagcagctgcaatctgagctcagccacctacacaccaccgtggccgacactttcattaaaaagtttcctgagacgacttgcgtgcatgttgacttcatgatcagcgccgctgggaagaacccctgagccggtggggtggggctggaagcagcaggtgcagtgatggggctgggtgcccaggaggcctcagtgctcaatcaggccaaggtggccaagcccaggctgcagggaaggccggcctggggggtgtgggtgagcacaggcaggcaccagctgggcagtgttaggatgctggagcagcatccgtaaccccactgagtggggtagtctggttggggcagggaccgctgttgctttggcagagagagatgatccccactggggagaggctgttctgactctgcaggtgggacagggacagatggccaccagggtgacccggctggtcttcctttgctatgctaagccctgggacgtggaggattcctgccacacagcctgggcccggtttcttacctgtggccaccgctctggcacgagcccctcagtcttgggtggtttctgcctggtccgggatttggtgttcctgctgagtccagcctttctgccacctccgcatgggccgtgggtggtgttgtcagctgcctcccaccttggcttcagtagctcacccagctcacaggggagctgccctgggctggagatgggcatgcaccctgggtcctacttgaatgaatgcagcttgaggagagccggccatatacactgggccacaggttaccctcggcaatgcccacatcagccgtcagcctgagcctccccaggagagcaaggctcacacgacaaaggctgcccgtggccaatgaggtggctgagcccagccaggacctttctcggactcccgggatgtggctctgctcgtgagctgcctggtcagctctctcggggtgagaggggcttgtcacacgggcccctgcctgcagtgtgacccttctcagcttctctcagcagccctgcctgcggagtgtcaccgccaccatgatcatttccctgacactgcgagggtgtggggacgtcctgggtagagacagggcccgtggcagcagcaggctcaggggcgccctacactggtgggctggggacctggtggagaccacgccaagggctggacaaggggacgagcctccaccctggcctctccgcaggcctcagcagcccctcccacaggcagaagggttgacactgggttctgccctcactgcaagagctgcaagtgccacgtgctgttctgcccaatctggtgtctgcaggtgaggaaagggctgccgctggcccgtttctgagtgttcagcacctaaggatgacagcactgtctgtccctaccctccgggtcctgtttgaaaatcaaacccatgctcacaggccaatttttttttcttttagagacagggtctcactttgtcacccaagctggagtgcagtggtgcgattatagctcaatgcagcctccaattcccggactcaagggaccttcctgcctcagcctgccaagtagcttggactatagctgtgtgttttcttattattttgtagacatggggtctggctatgttgtccaggctattctcaaaattcccggcctcaagcaatcctcccgcctcggcctctcaaaggttgggattacaggtgtgaggcaaggcacccagctcagccacagagccctattgcatctctcttactaggagcaagagctgactgccccctcatccccattccagagtgttggggctgtgttcagccgaggccgggccactggcatggcccagggagcgggatcattcactgctgccccaaatctgagatcattccaccttgacaagacttcctcatccaatccctttacttgacagctggggaaaccaatgcgcacagagcacccccagctcactcggggtctcagagctgatccatgagcggaggctgagatcctgggatcttgtcccccagcctccctgcaaccttaatcccgttctgctgaaagagatggggccggacctcgaccagcagccctggcctggacatgactgtgctcatgcaggtattgaggccgagatgccccggcatcatatgtttttctattttcttttttttttttttgagacggtgtctcactctgtcacccaagctggagtgcagtggcatgatattggctcactgcaacctctgcctcccggttaaagtgattctcctgcctcagccttccaagtagctgggcctacaggcttgtaccaccacacctgactaatttgtgcatttttactagagacggggtttccccatgttggccaggctcgtgtcgaactcctgacctcaagtgatccacctgccttggcctcccaaagtgccaggattacaggcatgagccatggcgtcacttaaatgtagtgagaggccgggcacagtggctcatgcctgtaatcccagtactttgagaggacgaggctgtcagatcacctaaggtcaggagttcgagaccagcctggccaacatggtgaaaccgtgtctctaaaaaaaaatagaaaaaaatagccctgcatggtggtgagtacctgtagtcccagttactcaggaggctgaggcatgagaatcgcttaaacctcggaggcggaggctgcagtgagctgagatggcgccactgcactccagcctgggtgacagagcaagactttgtctctaaataattaaataaataaatatggctgagcatggtgccttaggcctgtaatcccaacactttgggaggctgaggcaggtggttcatgaggtcaggagcccgagaccagcctggccaagatggtgaaacactgtctctactaaaaatacaaaaattagccagctgtggtggcaggcacctgtaatcccagctacttgggacactgaggcaggagaatcacttgaaactggaagtcagaggttgcagggagccgagattgcaccactgcactctagcctgggcgatggagaaagactccatctcaaataaataaattaataaatacagagcaagattccatcttaaataaataaataaataaacatacacctgtaatcctagcagttcgggaggctaagacaggtcgatcacctgaggtcaggagttcgagaccagcctgaccaatatggcaaaactccatctctactaaaaatacaaaaattagccaggcgttttgatgtgtgcctgtagtcccagctacttgggaggctgagacaggagaattgcttgaacccaagaggtggaggttgcagtgagccgagatctcggctgcacttcagcctgggtgacagagtgagactgtctcaaaaggaataaaaaaaatacaaaataaaaaaaatgtagtaagatggcagagtcgtgccgcggaagcgtgctggtcctatccatgtagtgaaggctgatttcatacagaaatgtcacaagaactttttttctttttctttttttttgagacggagtctcgctctgtcacccaggctggagtgcagtggcgcgatctcagctcactgcaagctctgcctcccgggtttatgccgttctcctgcctcagcctcccaagtagctgggactacaggcctgtgcagcagatgcaggggggccactaggcccaggcagtcttgggacttgtgtgtctcctgctgtgcatccatactgggtgctttagaaacggcaggcagaccagaagcccctgttgcaagtgaggacaaagtgtgggaaggccgtgagggtctgcagtccgagatggcctggtcctcaacctgcagtgcactgttgatgcactggaatgccgcctccttctcccagtccaggtcttcagcagtgacccggtaccccagctctaagggaggtggcagcatcaaaggctcccctcgcctgcgtggcagcaggggaaacttgcatctacggggcctagaggcctgggatatgggggagccacccctgggagcgagtgtctgccctggtgctgtatctgccgtcttttcacactgggtgtgacccgaagagacagcctgaggtccgtcctcactcactgtgtttgaggaactgagggtcagctggcagtgggatgaggctggcccctcttccactttcgttccgggaggcctcccgtagagctgtaggggctcgagatggcatttcatttggggcacgagctggtccgggaggtctgcgatctctggttctgacctctgggcacctgctgcagctgtggctgaggcccagaaatgtgaagggcctccatccactccagtagtgaccccaacgtggggttcaatgcggaggggggaggggctgctgcggcagctgcaggagcagaagtgccacgccttgttcttctcatgcccgcatccatgcttgcagctgggaagggggcaggaatcagcgaggtgacctgggctgagtcctgggaatgggaagaggtggcaggaaggggatctgaggaggagaacagggggcctggtggtctgtgcttcttcccagacatgggagctgtagaggggacctctgcagcagatgctaagggggccagtaggcccaggcagtcttgggacttgtgtgtctcctgctgtgcatccatactgggtgctttagaaacggcaggcagaccagaagcccctgttgcaagtgaggacaaagtgtgggaaggccgtgagggtctgcagtccgagatggccttgtcctcaacttgcagtgcactgttgatgcgctggaatgccgcctccttctcccggtcaaggtcttcaacagtgacccggtaccccagctctaagggaggtggcagcatcaaaggctcccctcgcctgcatggcagcaggggaaacttgtgtgtactgggcctagaggcctcggatgtggaggagtcattcctgagggtgagtgtctgccctggtgctatatctgctgccttttcacactgggtgtgacctgaagagacagcctgaggcctgtcctcactcactgtctttgaggaactgagggtcagctggcagtgggatgaggctggccccctcctccgctttagccccggcaagcctcccgtggagctgtaggagctggagatggcatttcggttggtgcaggagctcgtccaggaggtctgggatgtctggttatatctgatttctgacctctgggcatggaggtctgtctgcagaggcccgggcccgggcacaaagggagagaggcctccattgtcccgcaggggccgaaatgcagacggtgcatccccggtgacctccgggacccttctctgatcaccaggattctcttggactctagggtccttgtcctgctcaggcatccctgccccgctctccttgagggccctcaacactatcttccctggacacaagtctggggacagccgggtgttgtggaccccaaaggggtgactcccggctcctgggccccacagagagtccatgttctcagtgcagtggctgagctggaggacgccctggaactcggagcacacagcactggcttgctgtggtacctgtgcaatcaaattgaaggcaggatcccaggaaggaacgcagcgcttgcaggatcaccgaaaaccttcttagagttgtcttgacaccactgatgtcaagtgtctgggtacttgtaggatggcctgccactcagtgcacgggcaggagcaacggggagatcccacaggcaaagtgaactgggggatgggctgaacgggctccaggcaactgagccctactggcaggtcctcggcctgggcccgaacaggaaggaggggcacagagtgcccaggtaaccgctcctgggagcagtggggaaccgtcggttgcttgaactctcgagagctgggctctgagcgtcctcgtccagccgccaactcggccaacggctaagccagcagtttcttctgttgccgggcaacgcgccttttaaacctgagggagcgggcgcgtgagcacatcacggcgcccgtgacagagccagcttaacggattaataagcgcagccaggtacccgcgcgaggcacttgctggcaatggcgggaggcggacgtggggggtcatgcaataggtactggaaggagagaggcgggcacaaaggtcgcgggaggaacaggtgcccacaatggcggcagatctgcccgtggatcactgaagattcctgctctcctgctgaggtggagattgcagtgagctgagatcgcaccattgcactccagcctgggcaacagagtcagactctctctttttttttttttttttttttttttgagatggagtctccctctgtcgcccaggctggattccagtggcctgatctctgggctcaccgcaagctccgcctaccgggttcacgccattctcctgcctcagcctctggagtagttgggactacaggcgcccgccaccacacccggctaattttttgtatttttagtagagacggggtttcaccgtgttagccaggatgatctccatctcctgacgtcatgatccgccctcccaaagtgctggcattacaggcctcggcctcccaaagtgctgggattacaggcgtgagccaccgcgcccggtgttgaaactcccttgaggcattttcttcggccttcgggtccatcctctgtctcctccttgacctcctcatctcctcctcgccactgccttggggaccttggccaggctcatggcatccagcagccactcaatgtcaatacctccatgttcatctctcagcccgcccttgcccgtgaacccatgcttatttatttattttttttatacgtgcacccatgctcttcaggtctgatgaagtatccaaaatcaagctcctgaccatcctcaaacctgccccttctgcagggtttacctcgctagtcggcgccatccttgattcttctctttctcccacccaggccatcatctcttgcctggttgatacccacagcctcccctttgggctttatccttatccccgtcatagctgccagagggaccctgtgaaaacactccccagcctgctcattcttctgccctaagcctgcatggcacagagcaaaagccagttgttatgggacctaggaggtcctgtgggatgggccccagcctgcatcttcatcctcttctccccaccccactccattcactctctgcctatcgctcaccagcctataccacctgcctcagggcctttgcactgaccatttaggcaacattccaggctcttttcacacgttgcctcctctgagaagccctccctgaccactctgcccatacctcatgcctcttgattccccttacctggcttgtggtttcagcactttccctgtgtgtgtttgtttttcttggcatgagggcaggacctaagtgtctgttccctgttgattccccagttccaggcatgcagtgcaaattctagaaatattttttgcatgaaggaatgagtgattgaatgcagcaagggtctggaggctgaggaccaggcagacagacattcagagttgctggaatgcgacagagacagggagtcagactggtcatgcaagatcctgggcctgcccttgggtcctggggagccacggaaggttgtgggtgccagagggttgtggtcagagccacagtcaggggccttctgagacctgtgtcccctccccaccctccctccccacctcctcaggccagctctggggtctcggcaggtggtccacaacatgacctctgagttcttcgctgcccagctccgggcccagatctctgacgacaccactcacccgatctcctactacaagcccgagttctacacgccggttgatgggggcactgctcacctgtctgtcgtcgcagaggacggcagtgctgtgtccgccaccagcaccatcaacctctagtaggggctgctgggccgcctgggtgggaaagggccaggggcgggtggcccagggactgcccacttatccagtaaggtggctccatcacctcttttcctggtgggaaactgaggcccaaccttggtagcttatcctgggcctctcagtgagtatgtttgagcctcagtgggtggatagggaccaggctgggccaggcaaggtcaggtgctgtctgacctggctgggcggtagctttggctccaaggtccgctccccggtcagcgagatcctgttcaatgatgaaatggatgacttcagctctcccaacatcaccaacgagtttggggtgcccccctcacctgccaatttcatccagccaggtatggggtggaggtctggggatgggggactggggtggagaggggcgggtgtcctgggcaggcagctgacgggcatccctgtcttctcccatcggccacagggaagcagccgctctcgtcaatgtgcccgacgatcatggtgggccaggacggccaggtccggatggtggtgggagctgctgggggcacacagatcaccacagccactgcactgatatgtgtcaccccttttctccctggccgtgcccaccctgcacagcccccaagccatgctgatcacactcccatgccccaggccatcatctacaacctctggttcggctatgacgtgaagcgggccgtggaggagccccggctgcacaaccagcttctgcccaacgtcacgacagtggagagaaacattgaccaggtgggccgggggttggagaaactgagtcacggtgtggggccccagggcatcctgggctggaggcctggatcatcacagagtggacaattgttggtgtcctctctctagtgcctgggccatctggagcccctgtgccatgagggccaagccccctgctccagtgagacccagcaggccccaacctgctcttcctgatgacctggcccgaaatggcaccacctgggctgaggcctgtgaccacacaggtgtggttcaggtggcatctggagccctgctcaggcttcccctctcctcccacccccaggcagtgactgcagccctggagacccggcaccatcacacccagatcgcgtccaccttcatcgctgtggtgcaagccatcgtccgcacggctggtggctgggcagctgcctcggactccaggaaaggcggggagcctgccggctactgagtgctccaggaggacaaggctgacaagcaatccagggacaagatactcaccaggaccaggaaggggactctgggggactggcttcccctgtgagcagcagagcagcacaataaatgaggccactgtgccaggctccaggtggcctccctgccctgtctccccactctctgggcctcagtgtattgtgtgtgaaatggagccatctgactggggaggaacagagaggtgggattcggagatcttcacaatgcggacactggaactagcctcagcatcttcagcatggggagagccaggcacatggctgggggccaggggaaggttcacaccaagccctgcccctttccaccctgatccctcggactttggggccaggccctcccttactggggctgggcagtgacactacctaggatcagccaccagggggtgccacgaccctggcactttcttaggcagagggtggccagctgatgctgggaacccgggcgccttctcagacccgtaggcgtccagctcaccctgccgatgacactggaggtgaagctgaggtccgaggaatggggactgggcaacaggctggaggaaaacatctcggtcagagccacgcccctggggggtttccaagagcaagcccagagtgaaacccaagcttgtgatcctctccagagggaggcctggttctcagggaacagcaaacgggaagatgtccccagatcccagggatcagggcttggaccagccggggacgcagcccagagggagtgggtccagaaggaaacagctagacacagcagccttcaccatccgcagcccctccaggcctccctcggggcctgctccctcctctgtgcacagttccaacacctggggcagggttctgggaagggctggtggaggtgggctggtgggaggcggtgatcacagcccagcacctggatatcaccaggggcactggggccaggggccaggtgaggccaggtcggggctatccttcaggagccccgaaaacctggtgattccaaagggcccatagacaaacaggtttttatgcctgtggagtcaagtcccactgggtctgagctctgcagggctgtgtctctggggctctgcaggggtgagatggaggtgggctcaaatggtgtacaagtcactcctcaatccttattttatttatttaatttttttaaaaaaaatttaaaccaatagagatggggactcactatgttgaccaggctggtcttaactcctgacttcaagcagtccccccatctcagtctcccaaaatgctaaaattacaggggtgagccagtgcacccagcctcaatccttattttggcctgagaggaaaggccgtggccccatttgcaggggagaagactgaagctggaggggcaggccttgctctgggttgcacagcagcaagagaagtgggagctggccacgaggcttcctcgactcgacacactggtggggtacaccctggttctccaggtcccatggggctcagcccaggactacctcggggggtgaggtacttaaatcctctccttcattctcatcgccctttcccccatcatttcctgaggaagaacattcagggacctgaaggggtggcctgcccctccacatctgtgggtgtttctcatcaggtgggacaagagactgagaaaagaaagagacacagagacaaagtatagagaaagaaaagtgggcccaggggacctgcgctcagcatacggaggccccacgctggcaccagtctctgagttccctagtatttattgatcattatctctaccatctcagagagggggatgtggcaggacaatatggtaatagtggggagagggtcagcaggaaaacatgtgaacaaatgtctctgtgtcataaacaaggttaagaaaaaggtgctgtgctttgatgtgcatatacataaacatctcaatgcattaaagagcagtattgccaccagcatgtcccacctccagccctaaggcagttttctcctatctcagtagatggaatatacaattgggttttacaccgagacattcctttgcccagggacgatcaggagagagatgccttcctcttatctcaactgcaaagaggccttccttcctcttatactaatcctcctcagcacagaccctttacgggtgtcgggctgggggacggtcaggtctttcccttcccacgaggccatatttcagactgtcacatggagagaaaccttggacaatacctggctttcctaggcagaggtccctgcggccttctgcagtgttttgtgtccctgcttacttgagattagggagtggtgatgactcttaacaagcatgctgccttcaagcatttgtttaacaaagcacatcctgcacagccctgaatccattaaaccttgagtcgacacagtacatgtttctgtgagcacagggttggggctagggttacagattaacggcatctcaaggcaaaagaatttttcttactacacaacaaaatggagcctcttacgtctacttctttctacatagacacagtaacagtctgatatctctttcttttccccacagggaccttcctggctgtgcctcgggtcaggaccagaatgacacccattcatttccctgggcctttgctccggtggtccctgcaccctggcctctgcctgacgaggatggtggggagaggaggggggacgtcccccacactgctgtctccactgttcctgctgcccaggcctctgggcttccaggactacagcgggtgggtgggtgggctggcctgagcccaggaatgcacttcagttcctggttgagcaatgtcactgaggcttgggagtcgggtgggggcgggaggaggcgtccacaggccccccctaccgtgagaggcagccgtgggaacagcctacctctaaacaatcactgcagcccaggctgaccaggggctctggccggacataggggcctggcaggctgtgtgccctgtaaggacacagtctgtctctgtgcctcagtttctctgctgcccagatggaggggcccagactccaggtgtacacatctggagcaggcagtgttcagttggggaggaagcggggaggactgtgggggccatgtgggaaggattccaccccacatcacctgcacccctgctgagcctggtcaacggagcccctcagtgggtcctcactctcctggctgcctcccatttaggcaccctgaggcctggggagaacagagccaggccagtgtccctagagaggctgcgctgccagcacagtagtagcggatttggattcagggaagcagacctgcagccagggtgggaaagagctgcaggcggggtggagcccccacatggcacagcccccctccctggaggtccatgctgcatttccaggacagcaagtcccagggatggatggtgcctggtgccaagggctagaggcatggtctgtctgcattccctacaggggcatcttgtagtcaccagcatttgatgctgtcaagtccccctgtcctctgtgcagactgggaagcccttggtcaccctggggggtggggggacccaggccaggctgcagaagcataaggacttgaacccgggtcctgagtgacaccaccttgggtcctcctccctctgcctctgttcagctccaccttgatgctgactaggctgggccatgcggagagggttaggggatagagatgagagctggggagcagggctccactctgggaggggggcagccttgcgggatccagggcagagttaagcggccccagctccgctttcctagagctgctgagaacccgggaaatggtgtggaggttccggggagccctgcccctacctggcaaccgcagtgcaacaggcaccaagttctcctgcacattgcgacagtgggaccctgggctctggcgggcggtaggtggggcctttggacctaccagcagtgagggagttaacacagcagctgacttctctaggcaaggaaaactcccctcagacgctttgctgcctggcctcctgccagcaacaagcaggagctgaaaactagaagctgaggcatgagtttggtcactccgtagtgtgcacttggtgagggcagcagctggccacagctgccagccgtctgtccattcgcccatctgtccatctggcagcccgctgttcagacctgtctgtctgtccgcccatctgtaagcccatctctgtcccattgtctatctgaccatctttctcttactgtcctctttgtctagctatctggcctgtctgtcgatccatcttcgtgtctgtcttcagcccccacctgtttgtccatctgtccaattacctgtgagtctatctatgcatcttcttgtccattcatctgcccacccatctgtccctccgtctgcccaccggcctcccctctccttctgggccgcagagccacggcccaggactgcagagccatggttggcctggtcctgctggggctggggctggcgctggctgtcattgtgctggctgtggtcctctctcgacaccaggccccatttgacccccggcctttgcccacgccgctgttgctgctgactccaaggtctgctcggatattggacagtgagtgagatgtgggaggaagctgggtggcccttggcagccagcccctcctggagaaggcgtgtgtgtgtaagcgtgtgtgtgtgtgagagattatgtgtgtgtgtgtgggtatgtgagtgtgagtgtggggtgtgggtgtgtgtaaatgtgtgtgatcgtgtttgggtgtgtgtatgtgtgagtgtgtgggtgtgtgggggtatgtgagtgtgagtgtgtggggggtgtgggggggtgtgaatgtgtgtgattgtgttttgctgtgtgagagtgtgtgtgactatgagtgtgtgagtgtgtgttggtgtgtgggtgtgtgtaaatgtgtgtgattgtgtgtgtgagtgtatgtgtgggtgtttgtgggtgtgtgtgagtgtgtgagtgtgagtatgggggtgtgggtgtgtgtgaatgtgtgtgattgtgtgtgggtatgtgtatgtgtgggtgtgtgtgtgcatgtgtgtgtgtgtgcgcgcacgtgcactggcccaggaagcaggagccgtgtgtgtgggcttcagcacctgcaggacttgagcgcaaggagacagcctcagggcccttgcacagaacaggtggcagggtgtgcccgtggggcagatggggacttggggacaatggtggtgtgtgagtccatacctggctccaggattcaggaggcccatttgcatatcccaggtgggaacctgtctggccccggctgaccctgctggccggtgcaggccccttcagtgaggccaattctccaaggctgcggtcttctcccagggtcatgggtgaaggggtttggaggctccctgcgtgggtactggcctgctggggtacacacaatgctgccatagccagtctgcccctacacccagcccggggccacatctcaggtctctcagtcctgaggagcccggtgccccacccctcacatcctctctccctgagtcagggcctgggtctcgtgagctgagtgactgatacttggtgtcctggatgagggcgtggtggagaggggccacagcgggtgtttcctgaccctcttccaggaaggtgctgctgccgctgcagggaggacacatacaggatgccccttcctgccccctgcctcccattgggcccacaaaagccagggcaagcctcccctccctgccagccacctggtctgcttcccagaaattctgtcttgcaggctgttgggaggatcccagtactttgtaaactaaagcaagggaggagtggccgttctctctctttgctcattcattcaccttttcattcattccttcttccctccattcccccatctgtccatccttccctgccctgattgctcatgccaccccccctccagcccctcctgacctggtcctttggtttctcttcagggctttctgtctcctcccacagggctgagaatggcagctcagggacaagtgggggctggggactgcttagtctccccagtggctctcaggggatttgagggtttgacgccagctgccaccccaggctgtgcccctcctctgctcaggaggacatgcagagatgcgacacccacttaaactcgaagttgcaaagatgcaaatgagactggggtctcaggcaccagagaccacccatgggcacgtggcttttgggagtggggacctgctgccacagatctctgaagagtctggacctgctgggtctccccgagtgactgtctgggggtctccatagcatgccctgctgtgtgcgcgacggtcactggttgggtaggggtctctactctaaagctccctctgccggcatcccctcgaactctcccttggtgaagagaggatgtggttttcccccagtgttttatcaaacaactctctccacttcctgttttaagaagctgggagtggaagagagcctggggctggccccagctgctgctgcgaaacaggggtcactggacgctgggaccctggccgggctggctggaggcctcaggaagaggcctgctacagtgtcatcctggccaagattcctccctgcagaggaccctggccacactgccacagggtctgctggggccaccagaagcccatgctcctgcctccatctctcccctttgtgctcacctctcaccaggaggccctcccagagttcagtctcctgcttttctttttttttttttttgagatggtgtctcgctctgtcaccaggctggagtgcagtggtgcgacctcagctcactgcaacctctgcttcgttggttcaaatgattctcctgcctcagcctcctgagtagctgggactacaggtgccagccaccacgcccagctaatttttgtatttttagtagagacggggtttcaccatgttggccaggatggtctctatctcttgattcgcccgccttggcctcccaaagtgctggcattacaggagtgagtcatggcacccggcctcatctcctactctttcagcaccaggttttattcttgggattctgctacagccgcagcccctgggtgcgagctcctaagctttctgcgagtgtggacccagcaccgtgcctagtagacatacaaaaggaacatggtgacagtgaggtctgtcatctccagcataatgactcttttgatccttgtaaaaaaggtgatttttggctgggtgtggtggctcacacctgtaatcccagcactttgggaggctgaggggggtggctcacttgaagtcaggagttggagaccagcctgggcaacatggtgaaaccacgttctcctgggtgtccaggtggtccaagaccccatgactatatcatgacaggaaagagagagttaataaatctgagggcataaaatgtgaacatatactgtttccatcccacatgaaggcacatgtgtctgagcctactctctgggaggaatagagatctcagtttccacatcagggttgcattctatgcacctgcagccatgttattctgctgtagcagatgctacacttggcaccgacattgcagatgggaccatgaccttactggagttgtagaaatctactttcaccttccagaatccatttaatgtttataggagctagtccaagaaattagatggaaataaagtcctgctacaacctgagaatctttaggcctttaaaggtaacactattacatgcaactcccaatgaagggtgaagcatgattattatttaccttttttgatggggtgaaatggggagagagtcggaattcatcacatacataaaaggcaggtcgtataaatgttagtgtttgtgagtcacaaggtctgtcttgcagcgactcagatctgcacttgtggcatgaaagcagccattgactgaacataaatgaagggatatgggtttgtttaatgaaactttatgtacaaacgtaggtagtcactatggtttgctgaccccagcttttccattgccccatggaactttctttgggatgcctttttgcagtgggttctaggtgagaaaaattggctcggatctggatgctgaagttgagactggtgctgtcatgtggctactgccctcgtccatcctgggtgacttctgactgttgtgatgagcagggccctttgtggctgcctagctcctggtgccaagaatgatgaaccctctgcattgccctctgcaaagcagaccacaggacagccaccctgaattgctcgttctcactgtgtccaccttgcctaagatggttgggcacattcactggctggttaattccagatagtgttatctcattaatgccaggcagtaccttctagaagaggctcctaccatctgcactagactatggagcttctccggggtgctagtgctctgtcacctgaatatgcttcagggatttgctaaacagaatgtccttcaggccctcccatagaacacagggaaacattttgttttcccttgtgtgactgcaaaagggaaaacaaaaataagcctgggaaagggtgatttaggactttgatgatgtcgaggctgggaactcccatcagagtttctatatatgatggggaggggccaattttttgaaagtcagcattgactggccattggacacaggtggccctacattgactctctcttgcccaggacctctcctcaaaaagtctcaggtgattcagccccacagcagcaggggcacgacaccttctgtcctgaaggctgataaccggtgatgtggacagctgccattcactctggggaagatgctgcctaattccacacccaccgcctgcatgtctagtgagagcctgcctattcctatggggacaccccaaaattagctccaccaagaagcctcctccacctccattctccacagaagacactcatcttatatgcttggctacaggtcctgtttgctctgctattatccctatcacctgtccctgtctgttcaattgtctcacatgagcagagagacgatgtctcattcagccttatttcccatgggtattaataaatattcattgagtcaattaaaaattcatgtaataacctatcaatgcatgtctctgtgtgaggtaaagaaagcatcctgattgtaaatataactctcatgttaaaagctgggagcagtggctcatacctgtaataccagcactttgggaggctgaggagggtgaattacctgaagtcaggagtttgagaccagcctgatcaatatggtgaaaccccatctctactaaaaatacaaaaattagcagggcatggtggcgtgtgcttgtaatcccagctactcgggaggctgaaacaggagaatcacttgaacctgggaggcgaaggttgcagtgaaccgagatcatgccactgcactcctgcctgggtaacagagcaagactccgtctcaaaacaaacaaacaaaagcattcttacagattatcttggcttttattcctttattctaccaataagttgttagcctctcttatgtgccatttgttacaaaaaatcagctgtcatttttatggagactgagaagtcccctgatctgtccattgtaagctgaagacccagtagggccggttttatggattagtccaagccccaaggcttgagaaccaggggagccactggtctaagactcagtccaagggaaggagaggatcaaggtcccactcatgcagtcacacacaaaggaggaattctccctgctggtgccttttgttgtatccacgccttcagtagatttgatgatgccaaccacacagaggagggcaaagtactaacttagtccaggcattcaaacatgaatctcatctggaaacaccctcatagacacactcagaaatagtgttcaatctgggcacctcatggcctagtccatttgacccataaaacttaccattactatcattaaaatggcatacgttatgtatattttgttaccataaaaaatttacattctgaaaataaagtacagtgtcttagctcatttgtgctgctacaacagaatacttgaggttgagtgatttacaaagaacagacagttatttctcacagttgtggaggctgggcagtccaagatcctggtgagggcttttatactgcattctcatgtggcaaaggcagaagggctggagaaagctaaaggctgcatgaagcctctttcctaagggccttaatcctctcaagagtgaggagctgtcatgccctaattgcctcttaaaggccatctcttttaacactaccacactggcaacatctgaattttggagaggacacattcaaactatagtagcaagtttaatttggaaataattctactcaaaaaagcattagaattgagtaatgaaaccctgtatatcccctccctggatgcaacaatggggtacgttgagtccaatccagggagcattctcgcttcctctctctactccatcttaaaaaattaacaataattttctgtccactccataatcccatttcaccaattgcccaaaatacctacagtagttatttaattatgtttactaacagaatcctcaagattccaacccttatatttgatttttacttctctctgatcgatctggcatttatcgacgaagattccatcaaaccctgggcttatgaaaaattttgcaaaaattccacagataggaaagtgttcattgtgtgcagcagaaaaatgttcatcatgcagagtggaaacatgtttatgtgtggcaagcaatggtaaagtgagtcctgcattttaaaatgaaaggacagtagatggaaattagaggtcacactgtgaaataatgaattctgttaaaggcaacaacataggttagtataaaaggcagcattatggtatttttggttagtaacttctctttggaaacctatcacaagcagagagactgaatccataattaaaaccttccagccaaagaaagtccaggaccagatggcctccatgttttttatatcagccatttaaagaattagcatcaattcttatcaaactctgaaaaactagaagaggaagaaactattcctaacgagcccaacatgaccctgaccgaagtcagttaaagaccctacaagatgtgacaactaaagaccaatatacctcgtgaatataggtgcaaacatcctcaaaatgtgtgccagcaacatgaatccaacagcatattcaaaagattatgtcatataactaagtgagattaatatcaggaatgtaaggagggttcaatataagaaaatgaatcaatggaatatacaacattaatagctcaagagagaaaatacatattccaaataacatagaacaacaaaatccaacaccttctctaaatgaaaaaaaaaaagcacccagaaaactagaagtagaaggaaacaacctctgtgtgataaaaggcgtttgtaaaaatcccacaacaaacttcatactcaataatggaagaccgaaagctatccctctgacatctccggatgcctaaccttatttaagtgagttcagcaaagttgcaagatgcaagatcaccatgcaaaactcattcatatttttttttggggggggatggaatcttgctctgttgcccaggctggagtgcagtggctcaatttcggctcacctcaagctccgcctcccgggttcacaccattctcctgcctcagcctcccgaatagctggaactacaggcgcctgccaccaagcccagctaattttttgtattttttagtagagacggggtttcaccgtgttagccaggatggtctcaatctcctgacgtcatgatccacctgcctcggcctcccaaagtgctgggattacaggcagagccaccatgcccagcaactcattcatattttatatgcaccagcaatgaacatctgaaaaagaagttttaaaagtaactctatttacaagaccaccaaaaagaatacaaataaatttatccaagaagatgaacttcttgtacactgaaaatgtcaagacatttctgaatgaaatgtgcagagatgcctcaggtggctcctgcatattccgcccctggtgaagcatgtttgcattttcttgggaactgagcacctcctgcttggtcgtaaggcagacaggccacacagagaagaataattcctccctttgggccagcagttcagggatcaagaaatcctagacctgaggagtaatttctgaatctacacctagaccaaggtggtgtctgagcctccagcagtcagtgaagagcaaccagcagtggtcaacagagagtcacatggcaaagccgcctggagctgggctggacctgcatgtcagggagatgctgacatgcagggagggtcagtgaccatgacctaacactggggggaaaaatgtccttctttttctagagtatcatcgttaacattgatgtacaaactcttttgccccatgtctcttacatctggctcttttagaatttgcttatttcacagcaacaagttcaagtcttatactacattgcatcccagcccacccaattatgctaaaactctggatctgtcaaacactttcagagcagcagatttgtacctggccctaaacgcatagtggggacactgaggcacagctcctagggccttcccctgaagctccaccaagggcaaaaacttatacaagcttcatggatattaaaaacctccatgttcacttagcaagggagaaattttattcaagttctgcagctcaggagctgtgctcaagagcaagacccagaacttctcaaagcctggttttggcacctgtagaatggagcccaaaaacgcagacagacttacctcggagctctatagggccaggacagcccaggagtaaagccagtttgagacacaatttggggtgaagatgtcggcccagaatagaaccaggagaggaagaagaaacccgtgtgctgagagtgggtctgctgggaccactcctctccttcctgggccctttggggctgagcccttctctaaaaaccacagagctactccagcagcagcccctgactctgctgatttgcatcatggccgctttatccagcaaggggataagagaggcctgggaggaacctgctcagcctgggtcttgggaagcagcatcgggggtgcctcagccatggcctggacccctttcctcctcggcctcctccctcactgcacaggtgctgcccccagggtctcactcacttgcccagccccaggcctctgggtccagcctggccctaacactgagctcagtagggccctacctgtggtgggcaggatgctcatgaacctgccgcagggcagggggctggtggggcagaaatccccccacactgtgctcctgttctcttggtgccctaagggcacttttattcctggggctcaggtcagttcaggcaagtggcaagatattctttggttaatccccagagtttcaggccttttcgctcctcttttctctccttgcaggctctgtggcctcatatgtgctgacacagccaccctcagtgtcagtggccccaggacagacacccaggatcacctgtaggggaaataatattggaattaaacctgcttaatggtaccagcagaaaccaggccaggcccttgtgcaggtcatctatggggatagcagatggccttcagggatctctaagtgattctccagctccaactcggggaacatggtcaccctgaccatcagtggagcccaggctggggacgaggctttcctctcaggtgtggggcagtggcactgcacacagtgacagaggcagacaaggaagtaagacacagaccccttccccatctgtgctgctgtcgtcctccagcccggcaacactgtggacaaagccatgagcatgcatgacccagttcacctggatctgagacccccagtctttacttccttcagccctccaggcaggctgtgcagagggggcatccagaatggatttagggctgaggtgaccaggatgtattggggttttgtggactccactgtgattcagggaaattagatcttccaagcagaccaaggtcaatatcctcagttatctctggatttccataggtggtgataggccagtccttggccgaaatgtcctgaatcagtccccagaactgcccagctgaggctcctgtcattctctacagaaaaactagtggagtggacactgtgggatcctcccagatcccctcttatgagctcacccacacagcactcctgggagcttctggcagctcagagctgttcggtgcagaaatctgcctcccccaggtttatgtctcttctcagggaggtttggtttcatgactgcctgtggccaaggtctcaagactcttcctcagtataacaggacctgaaaatcctccaagatccatagctccttgtagggctgactgaagcctcaatatgtgtcagggcctccttctgcctggtgttgcctccatcactttcttaatcatctgtgtatgatattctccatctcagagtctgtttccagggaacccaaactaagatcaccagccatccccaacacgggccatgagggagctgaagaggccactgtacactagaaagcatcagtttactcttaaattaccactgcgagtctgcaaatgcccagcgagacctgagtggttttttttttcatttgtgtgaaatgaaaagggagactgacatgccagatgctctgggttctgagggagagttggagtcagatcctcctgcaggaatccaggggcagcaggagcagcctcgccccatgcagggaccacagatgcacccagagggtgagctgcaggatggacactgcccacctccaatctgtatatcctgtgcaaaaaaatcattgttttcaccccttcttcagcctatcaaagttgtcacttaaaaagccactacatctcatcctgtgaacaggaaacccatccacatctccatcagccacataatctccacataaagattcttcaaaaaatagtaataatagctgtgaaaaagtatctaaaatattgcatgacaatcatacttagattacatatgaaaatggcactatttttgatatgctaggtaaataaaatatattatttgaagtcatttaccttcttctctttatatgtctaatgtggtgactagactagcctagtgggattcccattaggctcatcatactgtgattgaacagtgctggtctgcacctcttcaggttaacaggggctgtggagtgacctggtgcaggaaatatcatctccatccataggatatcagtgtgaacccagggagaggcactggtgcaagagagatgagaacaggggtgtggagtaggggactgagccttcactttgagccgaagaagtttcctttcctatcctcaatcctgaacaagagggatttctggacttctttttgttttcaagtttgtgccccttcagatttggggctgtctggaatcctgccaggggacaccgagaaaaaataggagtctcacactgactgttgtatttcatctgctggggccatcccaaaccactgcgtacaatttcctttcctggtgctcaaatagctgctccacgcacttgttgtggtttcagagatgaatctgggtgggaagacaggacagtgtatgttataatatttaaatggaacccaaatccattaatatttattttaatatggaacattaaaagagttttgtaataggcaatgggaaaaggtaaaaaagataaaagctttttgagaaaaaaaacaaaaacaaacttatagaatgtctatgtgtcttcagtgttgcagggttgagagagatcagctttatggtgccccatggatgtgctgagatggggaaaatcaagaaagaaggaagtatgtaccactgtgactcaacaaataaatcaaagtaaaatggacttaaatctttcaataagtcattcacaataaatatcactctggtgcacacagaaatgcctgttagcaaactttcccttccccctggccatgtctccatggatcacctgtgtgcagagtggctccggtcagtgctctgtgttccctccacagggctccccacaacatgtgccctgtgtggatgtgggtgcatcgcctggggtggctgatgtgctccagggattcgatgctgcagatgcctcagcaccaagggtgggggtgggaatgggacaaggctgcagctggggagaccaaggatcaaccacacacagcaggggtttccacggggtgagcagcctcatttcctgacagtagagcgagcctaaaggtaggtgccaggcagtggtatctgtggggtggcccaggcctggagggtcacagagacacaggcaccacacagcagagacactgagggccaggagctcactcaggtgagggacttcagcagatctttctctcctggtacaaagagatcaagttcctaccatcagaatagacaaacaaggactttaatctcctcagctgagccccactgtccagggaagaagtctctgagcccaggcccaggtgagagtgggatgaggagaggagccaggacacagattttcatggatgccccgccctcctctgaggcagagcggataagacagggctgggggcatacccagtgcttgagtctcaggaggcagcgctctcgggacgtctccaccatggcctgggctctgctcctcctcaccctcctcactcagggcacaggtgatgcctccaggaaaggggcctcagggacctctgggctgattcttagtctcctgctcctcaggctcacctgggcccagcactgactcactagagtgtgttttttcctttttccgggctctcgggctcagtctgccctgactcagcctcactcagtacccgggtctcctggacagtcggtcaccatctcctgcactggaaccagcagtgacgttgggcattataactatgtctcctggtgccagcagcacccaggcacatgatttatgaagtcagttataggctctctggagtctctgatcacttctctggctcccagctctggcaacatggcctccatgaccatctctgggctccaggctgaggacgaggctgattattactgcagttcatatacaagcagcaacattttccacagtggacataagattgattctcaggctccaagtctggccagtgagcttctttgagactccctgggatcccagcagtgacactgatcactattgctgtcccacacatcccaagtgatgaggaagtaagaccaaaaccctcctgagattcctgacttgtgtcctgacaccagggctgttgggattcctgtctttccttcaagattgttcaaataagcagtgacagtcacttccatgtgagatatgagaagaagaataattccatatgaaccaaatccacgaagcctacactgaagcctgccaagttctctgcagtccagcgcgatgaagggagcattttcgtgggaacttttgggaatatgaggggagccaggctcagctatgggttccagagacaaagctcctggatgtttctccccggccttggtccatcacctgctacctctcctcactctttccacagacactgccccaggctaagcccccacaggaccctaagcctattcctgaccctgagctcagcccaggtgatgcttcaggagatgggatcctgagaatgagccccaacatctctttaacctaaggtgtggggtcatgagacacctgttagccataagacacctgtcccccacctgctcaggagacagtggagcaggcaacagtgcagagagaaccagcaggagccaggccaggccctgcatccaaagcaggccccagtccccacagattctccagctctagcctgtggtacagcccccactttctgcaggctgaaatgggcttctcaggatgggcaggccatgatgggggatggcagtgtgtccacaggacacagccctgctgcctgcctgaccctcatgccccctccttccccaccctggttaatctccaccagaaagggcccaggttcagaactcaggacacctggatcagctcctggacttgcccccactgctctctgttctcctgagccacttagtctcttttggcctcagtgttacctgctgtgaagtgaggaggcttatactgaactgaggaagctcttttcttcattcaaaattaaaagacagaaaaacaatgaaagtcatgtaaattaaagcctgctgaggggatgtcatttaatgggcttcagtgggtttcagacgtggaacttcttgtcttttctctgcagggattccaagacaggggctcaaaagagcttgctttctgtatggtgggaacagcggtccctagctgagaataagcaggagattcccagcttcatcaggaaggcagactaggctagtgtagaaatcctctccgtacaaactctgagaggtgttgaataaaataaagataaacataatttcatgttttcatggtgccgatgatggtgatgttagctcacaactaagctgcagtgcctggaacatcaggaaatcacagtgaatcacagctgctcttattgggtgggaggtgcaccagtttgatgcctaagtacatagaaagcctgggtccctgtaggatggcacatgcatctctctggactttgaaagctttgcagaagagcttcagttgactcactctaattagtccggactgaacaaaaccactagaggagggcatttcaaccctgagacacttctatagccccaacttcctaccctgcgtgtgcgaactctctgtgctgggctgggcagggcagattgggtcaccctgcacagaatggggctggactgtctggtcctcaacttctgaggtgacaggtgctgtggaggcacgtggaagaaaaaagctcctgggctgagtctcctccaccagctgggggcagcagagctgcagccaggagcagtcaggattaaggctggggctgcccagctggggcaaagagaaggccagcctggcgttcaacaggtgtccaagaatcagtcttcagactgaaagtgagtgcagttcatcctatcccctcaggctgcagtgaccattctctgagggtcagactcatacagtgtcaccccaggacactgacagaagcccggcacagtgaaggcctcacctgggaaatgcagctggaggaggctgggaccaggtgtcaactggggcagcttactcaggaaggggatttctttggagacatcccaaggttgaggtgctctaggagggggcacagcgtgaggtgacggggctcccagggcccgggttcttcacccaggatggctgtctgagcctcctgccactctcagggccttgtccctctcagtccagcagcaacctggggagctgagccctctgtcctgggcacttccagatacaccatacctcacttccttctgcctcaccttccagctccaggcggactctgactcagggggaaactcctgtgctcaggggagtctcgggtgggtggggtgaagcatttgggatcctgatcccttcatggggcatccccagcatccttaaggagacactcttcagagggacagggcttctcacctgcctcagctctgaccatggggctgtccacactcagtgacaggacactgaccagggatctgactggagtgaccaggaacctggctggggcaaccagggaccacccaccctctggagctcacatgctgtgcagagaccatgaccctgggaccccttcagagaccatggggcctgaagttagattttcagtccagtgtggttttctcctgctttttgcaagtttacataaaacattgatgagaaaaacatacataaataacagacgagctgagggtgccaattgctaatctcttgtggcaatgaggggtgatgtagcaggagcagcaccatggctgaaatgagaccagaggccctgttgactccacaggggtgtgtggttgcttaaatgacccaactattcccactgaataatcagcaagtgtcccaatgacacagcacagcatttagatgaaatgaacaagaggggactgagtctgagggaccagggggaggaagatcatgggtccctgggccacctgctgctgagtcaggtgtcagcaagatctctccgcagagcccagctcagcccatggccaacctcctggaaggtccacagctctgctgagcctggcccaggacagaccccaggtcagcgaggtttgggacagtggtcatgagattaattcccagaaaggtgactgtgatcacagggcttgaaggctgcagctgattttctaatctgagaccctgcttcttcctcctgttgcctgtgctgccctcacagctggtttgagtgacatctctccaggaggaatcgcagaggatgtaaatttgcataaacgccaaacactgactgcccccaaaagctggagagggaataagagaggcctggggagcccagctgtgctgtaggctcaggaggcagagctctgaatgtctcaccatggcctggatccctctcctgctccccctcctcattctctgcacaggtgctgcccctaggctcagtctccacagaccccaagttgagcctgacctgaatcctgagcaaagccctgccactgcctctgggggggattcctggcaatgcgtcctttgtcctcaagccccctctcctgtcttttcttgcagtctctgtggcctcctatgagctgacacagccatcctcagtgtcagtgtctccgggacagacagccaggatcacctgctcaggagatgtactggcaaaaaaatatgctcggtggttccagcagaagccaggccaggcccctgtgctggtgatttataaagacagtgagcggccctcagggatccctgagcgattctccggctccagctcagggaccacagtcaccttgaccatcagcggggcccaggttgaggatgaggctgactattactgttactctgcggctgacaacaatctcacagtgacacaggcagatggagaaatgagacacaaaccccttgccatctgtgtcaccttcttcctccagccccaggaggactgtggacaaagccacgaacaggtctggcccagtacacccagatcagagactctgaggcctccttccttccagatctctacggaggccctacagaaggtggatcaataataaattcggggttggcaggtccagtaggtcctggtgttttctgggctggagtgtgacttggggaaaaatgacttgaatggaagtacagtcagtgggagacatctattgagtggtgatggtcccagtatttccttgtgtggtgactgaacctagggcagtgccactactctgtggcccaaatgccctgggttattcctctgagttccccgtgtattattgagatgctccagcccccactctcatggtatcctgatctgaagaatcatggccagtgcccattgcagtgtctccatctaggtgccattttcaggactcatgcatccagcatccaaacaaggctgtgtgggagaccgtgacttgtcacagctgttccccactggaaaatgccactgagctgcagagaactgctctcccagtgatgttcccccttcacagtgtggttcaggtgcaatgcctgcctggtccctagattttaatgccatgttttcatttaaaataaccacgaagtgtctcttgctgagcgctccggtgtaacacattcccagtcatgcctctcacaattttctttctgacaaaatttcctgaaaccctattgcaatgaattctccctctcagagtaggattgcagggagttcacaaattaacaaacaaaccaaatactgtctagaagaaagaggatcaaagaggagagagctgcacagggagcgcactctggagtctgcagatattcatgagcaccgatgagcatgtgcatgggaggaaaccttctgtgatagagaaaataaccattcaaagacatttgaggaaacactccatagagctcacacacacatccatgtgcacacacatgcacaatcagaatagtgcctgttcctccgctccatgaagaaaggcccgagttaaagtgggtgagatttaccagtgagaagagctttgcctcagtactggggaaaacattgccctagacaaaaggcatctctggtgttaactaagaaagtgtacggcccctgtgctgatgcccatgtcaaagaccatcacacgtattttaaccaactagcccagagttgtcaccaagagtttgatcttacaataattctgcaatgaacatccctattcagactccttggagttcacctatgaagattaccatagaataaatctctagaagttgaattgttaggtcaaaaagaagtacgtttgtaattttcactgattattctcagattcctattcacgggggggttgtaccaatttacagtgccagccataaatctttgacgtgagtatgctgttgaaagtttgggtttttgccaacatggtagattaaaattttgttgtcttgtaacagtgttattttggatttctcctattctgcttgaggttgaacattttctcaaacatttcagggctcttatattttaggatttagtgagcttttttctaaaatggccaggtaaggagggttttagcccctgtgggccaagagtcaactttgaccatattatgagggaacttataactccagttacaatgtaaccatttaaagctataaaaaccactctcagctctgggaccacacaaaacaggtggcaggccaggggtggccacaggatgtggtttaatggtccctgttttgtagggtcatttgaagtttaaaaatttcaccagcatatattttaggtggagatctttttgtgggtaatactgtatttcaccgcctatagtggcctgagatttctctctagataagaacacacttttcttattttttggatggattttgggtctatctgtgatagccctgtgtcataaactcataacttttgtgtccgtccttttactgtgatttttgggagtgtgacagtatatcaggaatacactatccagggtggaaaatcagagagagggggaggagcaagtgggcaaggaagcttgtaccaaagctggaatatccactgcagcaggctcagagaaaagggtcctaatatcagcatttgactgaagccaaaaccacaagagaccatagaggttctgaggatgacaaataaaaacatagtttaagttttaatgcattcattatttttataatccacaaaaattctaaaactcagaatttaacaatgggataaggaaaagagtttgagatgttaaacgataaagaccccaaggaaagttgccaggaaaagaacaggacctttttggtggaactatgtttatgctgtaaattaccctcttctatatgtctatatatatatttaggtataagagaacatctcatggaacacccttcttcaccacagtcaaagatcaccctcacccaaggagggaaccgaaagggaacgtcaatatgagacagaaaacataatgcacttttgtataaacattaggagagtctctatttgcatatcaaatgtggatgcttaatgttaacattggaaatagtaggttaatatgcatgtgaggtgagttttcttttgactatttctgtctgtgatttatctttcttaatagggacatttctgcccttagaacaacttaacttgtgatattttttgttctattatctgtatcagctctgttttttttttttcaaacagtggcaaagatatcccatgactaatgattaataaattcaattaatgggtatttaaattatttcaagagtggacagttgtgacttccccacatctaactcacagatgtcgctgatgctgactcactcttctcttccaatcatagcaaataaagtgggagctttgacttttctgaagacccagatgacaacaggagagaggaggtgaaaccccctaaagctgttatcctttaaaccctcaggaggaatcatcctggagaaacacccacacttgagttggattatacctaaatgagagtttggtcttagagttggtgctgagttagttcaggatttgggttgttgggatggagtgaatgcgctttacaagtgaaaaatacatgagtttttgggtccataggttggagagttcttggctgaattgtgtcccccagagttcatacaatgaagctctaatgcacggtgtgtgactgaatttggagagaatctttaaagaggtgattcagtgaaaatgaagtcatgagggtgggttcttatcgaatctgactggtgttctcgtgagaagagaaaatttgcacacacaaaaatgagacactcgagatgagcgtgcagaggaaagaccgtgtgaggactcagcaaggaggtagcgacccgcaagccaaggagagaggcctcagtgaaaaccaaacctataaacactttcatcttgactccccagcttcagaactgtgagaaaataagtgtctgctctttaggccagcaggtctttggtatctcattaaggtagcactagcaaatgaaaacaaaagggaccccaaagaccttggatgcgggaggaggaggagatggagcagggtgcaggaggtggggcagggaggggctggaagttcaggctctgaggtcatctcctgggtggaatcctgactccactcactgctgtctggggacttggggaaaaacaattaaccgcccaatattaattccatagtaaagatcgggccttgagcacaggattcctcatcttccttttttatatgatgaaagtcttcttgaggtcatgcttgtaaaacactcagcaatgtatctggcatacactatggtctcagaagtggttattatgaattttctagtgatatgtagaggatgacattggtcctgtgggcagagggggcactgtggaccttggtttgaggactctgaaagacaccaagtccgctggtagtgctcaagagcgaagagcatcacagatgcttcctcccaggccccttctattgggtaaaatttactctccactcctgacacccatctggtccttcttctgaccttagcacattatcagtttgaagacttaaggctcagggctcagatgggagctaggacaggcacactggggaatgaggagtagatttgcattcactgctcatcagagagcccacccaacaaggatacaagaataaaagaagtagatttgcatgaagagcctctccttcccatgataagagaggcctgaaggtccctccccagccatgggctcagagacagagctatgtggcatctccaccgtggcctggacccctcccttgctcaccctcctccgtctctgtgctgcctcccagggctcagcccccaaaggaccagagatcagactggccctgagcttcagctcagcacagggagtgatgcagagtgtggggctctgggaatgaccctcatcctcataattaactctcctgtcctctcttgtaggctctgtggcctcctccatgctgactcaggagccagtagggtctgtggccctgggacagtcagccagggtaacctgccagggagaaaacctaagaagccatggtacaaactggcaccagcagaagccaggctaggctcctgtgcaggtcatacatcgacaaaataaccagccctcagggctcccagaccaattctctggctccaagtcaggaacacagccaccctgaccatcactggggctcaggttgaacatgaagctgactattaccatcactcatgggacagcagtgctactcacctcacaatgacacagacagattgggaagtgagatctaaagaccttcactgtctgtgtcaccctcttcctccagccatagcaggactgtggagacagccatgagcagggctggcctgggtcacctgcatcgaagtcctccaagctgcccttccccccagctctccaggtagtctctgcagagaatgagtcaggataggatttggggctggcagaaccaggctgtcctgctgttatttggaatggatgtaccttggctcaagatgacctgagccatcttactggaaggacttactggaaggacggtaagagggagacagctcctgagtgctcatggtcactgaatttcctcctgtgtgttgactgaacccaatgcagtgcctctactctgtggcccaaataccctggattatttttctgaactgcccgtgtttaactgagaccctcaagccccagctttgtgcatcctgatgttctgaacatggaagcctttcacagtgtgcactgtgacatccctcagattcccgtttcaggacttatgcacccaccatcctcccagggctgcagggaggccctggcttctcacagctctccccaccagaaactgccatgcagtacagagaatagctttgctcaaagaattgcccatttcagagtatgtttcgggggcaatgactccctgatgccttaatctgaaagtcatgctttaatttaagaccctgaatatcaaattgaagtgccttctagctgaacactcaattgtaaaacattcccagtcacacactccacacttctttcctgagaatatatcctgaaaccctattgcatggaatcctccctctcagagtaggattccagggaacttaaaaattaaaaaaaaaaacaacacaccagtctagagggaaaaatattgaagaggagagagttagggagttgcacaaggaaagaactctgaagtctgcaaatatgcatgcactgaagagcacttgtgtgtaaagaaactccctctgaaagagaaagacccttgagggaacactccaaagagtgtgcatgcgtgcgcacacacacacacacacacacacactccagtcacagaggaaaggcctgagttacagagcatgaggtggactcatcagaagagcttcggctcagtattggggaaaatgtcggacagacatagggctactccactgtcaactaagaaagtgtagaagcaaactgggaaaagttaagacagtttccaagtaactttactgaatccaaaaataaaagaccaaaatagagaagaaaatgcaaaaggattataaactcaacaaagaaaaattcacaatgattggcattctgtcaatatttcttgcaagcaaaaaagaaaatatatgctttaacacagagaaaaatgaatcaatccaaagtggccaaaaattgcacacatgatagaccttgtaggcacgaattttggagcaattctttttttttttttttttttttttgatggagtctcactctgttgccaggctggagtacagtggcgcgatctcagctcactgcaacctccgccacccgagttcaagcgattctcctgcctcagcctcctgagtggctggaactacaggcatgtgccaccacacccagctattttttttttttaatttttagtagagacggggtttcaccgtattggccaggatggtctcgatctcttgacctcatgatccacccgccttggcctctcaaagtggtgagattacgggcgtgagccaccgcgccagccttggagcaattcttataactcttttctccttcctcatgagaatggaggatctattgaatgtgttaagtggagaaatggaaagcataaagcaagatgcaagttaaacttttagaaatggcccctaaatatctgcattgaaaaaatacactggatgagactcattgcagattagaagctgtgaaggaatagatgagtgaacttgaagatatggcaatggaagttatgcaagatgaagcacaaaaaaagtgaagagagcatcagtgagtttcaggacatcttcaagctgacttactggttataattaaagacatgaagggagataacattggtggggggagaggaaaggtagaaaagccatttaaaggaatcatggccacaatttcccaaatttggtgaaagctagaaacccactactccaaaaagcttaacaagtcacatacacacacacacacacaaacacacacacacaaataacacaccaccaacactcaccataatgaaattgctaaaaacctattataaagacatacttttaaaagtagccataaagacatggtatgtacagatgaacaacatcataaaaagaacagatttctttttctttttaaaattttcttaaacatctgtgggtacagagtaggtgtatatgtttgtgggatacatgagatattttgatacaggcattgccatgtgaaatagtcacatcatggagagttgggtttccatcccctcaagcatttatcctttgtgttacaaactactcaattacactatttcaggtattttaaattgtacaattaagttgctgacatgttatcaaatagtattgatgtaactctgacatgctatcaaatagtaggtcttattcattctttctattttatttacccattaagcatcccctaataagagcagatttcttcttagaagtcatgcaagcaggaggcagtggagctatatttataaaatattaaaagaaaaaacttactaccaaaacccatccacagactcaatgcaatccctatcaaaatacaaacgacattcacagtagtagaaaaaaactctatagttggtatggaaccacaaaatcccctgaatagccaaagcaataccaagcaaaaagcccaggctgaatatgtcacattatctgaatcaaaatatactacaaactacagtaaccaaaacaagatcgatggtattggcttaaaatcagacactgagactaatataatggaatagaataccccaaaataaattcatatatttacagccaactgatttgcagcaaaaatgccaaaaacatacgttgagaaaatgacatacttttcaataaatggcgctgagaaaaactggatattcataggcagaaccttgaaactagacttttatctctctccctatacaataatcaactcaaaatttattaaaactccgaaatataagacccaaaactataaaactactagaagggaacgtagagaacacaggggaagttcttcaggacgttggtctagacaaaaattccatagctaagacttcaaaagcacagggaacaacacgaactagacatatgggacttcattaaactgaaaatcttctgaaaagcaaaggaaacgatcaacagagtgaagacaacttctagaatgagagaaaatatttgcaaactattcaactcaaaagggcctaagatccagcataagaaaataagacaaggagctgaaataactcatcagcataaaaaacaaataatacaattaaaaagtggataaatgatatgaatagacttttcacagtcaaagacatacaaatggccaacaggtatatgacaaaatgctcaatatcactaatcatcaggggtacgcaaatccaaacctccatgagatatcatctcatcccagttggatggctatcatcaagaagacaaaaaaataacaaacactggtgaggatgtagagaaaatagaagacaaaaccacatggtcatctcaacagtcacatcaaatgttttcatgcgaggaaacattaccatttgttgtttttctagtcttgctagagcatcataaaaagataagatttgtggtgccactattggagaaaatgttattacatgcaaagactctggctatcccacaccaaactacatgaacacttactgttaaatgctaaaagaggccaggcacggtagctcacactcgtaatcccagcactttgggagaccgaggcaggcggatcacaaggtcaagagatccagaccatcctggtgaaaccccatctctacaaaaatacaaaaattacttgtatttttgcacggtggcacacacctgtagtcccagctactcgggaggctgaggcaggagaattgcttgaacccgggaggtggaggttgcagtgagccaagatcacgccactgtactccagcctggcgacagagtgagactcaggcaaaaaaaaaaaaaaaaacctaaaagattacaattctgcatttccaaatgttctggtggtcagagaccacttccttgacaagtggtgagtacggggatctgatgggataggtggcatttaggcaggtattgggtgaagaatagtgatatacacaagaaactttcaaagagaaaaacacacggaagttggaacacagaagagaacataatatgtctgagaaataaggaaagtccagactcactggagctgagtgagaacaagaaaaatggcataagccatgtatttctctctggatatctcatcaaaatattgtctcctccccaacacaccacccatgtgaattataaaaatgcccgtttttaatttttgtttgcatgtcgtgacagagtcaagcacgtgaatcaagctgagtttgatgagtccagggctgttaagctccagacccaggtggcctcagaaggacttggtggaacaagggcttgttgtcaaaagcagaggaagtgagattttccattgtggcttagaccagagattcttaaattccagtggacacacaaggccccttaaggatctggttaagatgcagatgcagcctcagcagttctggatgtggccccaaattctctgtgtccggcaactcccaggtgaggctgctgctgctggtcctcccaggaccacactttgagtggctgaactcttattcacccacctcactcaagccacgggtgagactcacacaaggagggcaccttctagaagcacaggtcacttctcactcctccccttgtgtcttagatcctttcctgttactataaagaagtacccaaggctgggtaatttatacagaaaataaaagttttatttggcagacagttccaatggctgcagagttcaaaatgtggcatctgctcttgttgaagacctcaggctgcttcctgtcatggtgaaaggtgaaggcgagccagtgtgtgctgaggtcaatgaggggaaggaagcaagagagaaagggaagataccagtctcatttaaataagcagctcttctggaaacagaggaaattcactcaccccaagtgagggcattaatctattcatgagagatccactcctatcaccctaaaagctcccattaattcccacccccaacactggggattcaatttcagcataagatttgcaagggatgaagatcaaagccatagcaccctgaggcttggccacacacttgctcatctccacatttgtcccttccttcaggaccgggatcctgactgctctgactcagtctccgtctacctcatggacacctggcagtcggtcatcatcggttttgctgaatcagcagcaacattgggggtaacaattgtgtctcctggttccaccagagacagagtagagacccacacagctgaagtgtggggtcaaatattaaaactaagagacataagattgattctcaggctccaagtctgacaagtgagcttctttgagactccctgggatcccagcagtgacactgatcactgttgctgttccacacatcccaagtgatgaggaagtaagaccaaaaccctcctgagattcctgacttgtgtcctgacaccaggtctgttcttccctcccctagaataaaacatctcttaagcacaaggctgaagaaatgtggcctcctcctttctcccacagctggtcaaagtggatacctgagagaattggctcactgaggcctcttgggaacaaaggctgggttcctgcctgtgatctgtgtactgagacacattccggacctgcccaggaaaggcaagtatagatgatgtttagttgtcacagagtccaagtagggacaattcagcggtgtcttcttgggacccctgcctctggctattttcatctactttataatgggccagggccattatttccaacttgtcatatcctttttctcctttcctcaccaggtaaggaggtggaggacagttgatgagggctggcttatgagttaccccaggatgcaaatgactttgaagtcaagcccatgtggggtcaagctcagtctataaccagggtcttttgagctctggaggagccaggcatcccagccatcaaagaggtcttgcatttgctaataaatcctcttcttccaacccacagcttatcttggctgcctaccctcatctctgtcaggaagcaatccttcgttgtttaacaccaaattattcttacttggtcagtttaaaagtcccttcctcagaaaggtcatctgtggcctgaagacaaagtgagaaggctttgctgcattttcatttggaaccttacattgccccttctgcaatgttctaaccacacatggcacatatttacaggacagcgtgataattcacttttgaaaatacagaatgtgctcatggaacaggacaatgtcatacttttggggcctgatgagcatgtccttttcacaggaccccccagagctgcccatgcatccagaaggtaccattctactctatgcaaaacgatggggcatttctatattgcagtttcttagggttccttagaaagaggccacccccaacacagagctgcacaccttgtgaccacttactgtcaattcctcaatgctgtctccaagtctcaccatgcacaagggaggaacacagagaccctggattcctagagacttgcatttcttggatgaacaaatctggggtttggttggtggcagagagctcagggctcatgtgtgagcatcacctgatgcttcctccagggtcagagtccagcccctaccctggaaggatgaaagatattgtccacagaagtggtataaaggtaacagcatcgaggacggagctgcctcttgaaatgggctattgctttgcacaacgctggagacctaaattatgttgactataatggaagagtagtccctgcggatggcctctaattgggtggaagaaagcagagggtctgcgtctgagagagcagcaatgggcagattcagcacaggcatgggcagagcagcaatcaagggtacctgagcagcaatggccccgggagaggcctggcacctgccggaagtgacgttggagacagagaaacatctaagacttaaggcttctctttctgtgcaatcccccaccccacagtttatgtgtcacagatattggcacctccttactgtaaggggtcatatgaataatacagtcctcaggggcatgggttcgaggggcagccaggtttatcctcgaagcccacttctgttacctgcagctgtgtggctgtaagcaaggcatttaatctctcagaaaaccatcctaatgagaggttaagaacctctgagaaaaaaacttagacaagaattgacagtaattcttcactattgaggctgcagggatgtaacttaatcatgtttgtaaagtgcataacacagaccctgacatgccccagctgctcctgagttggcagcaattattcctgacatcactcatgagaattggacctggaatggggatggagggaaggcagtgcagagggtttcagagggttaggaaaagagagactttaatgatttaaaatgaaggcctaggagtggagacaagcgtcctgggacattctcctgccaactctcacaatgtctcagagactgttccaaggtgaagtctactagagagctaagggaggagtttgcagaatcaaggtttgcaatgtcatgcatgagggggcagagagtcagcgggagggaagacagctgagctcatctgaagggtatttatggttttctggccctagagtccttggccatccctctatgaccagggcctcagataagcagagagcttatctgcttctctcctccaacgatagttcctggttatcctgagcccaggtcagtgcagctgtggcccattctctcctctttgtgctcagtggactgacctggaggaaacagtaggaggttcccctgctctctgtccccagggtcctttcctttcagtggcaccagcccagccctagtgtccatccatctgtgcctgcccagtcaggcctccatgctgccccctgtaatggccacaggtcaaaaactgattgtcagtcttgagcagattgtcctgactctttctgcaaaactgagcctctcacccagcaccaggacgtcacaagcaaggccagctgtaggaaggcaagtaggggagtaacgtgcatcacagagtctggacaagacaaagtagttctgctgggacacatcctggtgatgtttctcaggatggttcaggtccctgcaattgcaggcccagagaacaggactgaaggctggaagatgtgctccctttctcctgtacacaaaacagtgccatgtgtgcatgtgagtaaatgcatatgcctgtgtgcttgtgtgtgtgcacctgtgtaaatgcatatgcctgtatgtgagagagtgtgtgtgtaaatgcatatgatgtgtgtgagtgtgtgcatgtgtgtaaatgcatatgcctgtgtgtgtgcatgtgtgtaaatgcatatgctgtgtatgagtgtgtgtgcatgtgtgtaaacgcatatgcctgtgtgtgtgcatgtgcatgtgtgtaaatgcatacactgtgtgtgagtgtgtgtgcatgtgtgtaaatgcatatgcctgtgtgctggtgtgtgtgcatgtgtgtaaatccatatgcctgtgtgtgagtgtgtgtgcctgtgtgtaaatgcatatactgtgtgttggtgtgtgcatgtgtgtaaatgcatatgcctgtgtgtgtgtgtatgcatgcgtgtaaatgcatatgactgcgtgtgagtgtgtgtgcatgtgtgcaaatacatatgcctgtgtgctggtgagtatgcatgtgtgtaaatgcatatgcctgtgtgtgcatgtgtgtaaatgcatataccttgtgtgtgtgcacatgtgtaaatgcatatgcctgtgtgtgagagagtgtgtgtaaatgtgtgtgctgtgtgagtgtgtgcatgtgtgtaaatgcatatgcctgtgtgctggtgtgtgcacatgtgtgtaaatgcatatgctgtgtgctggtgtgtgtccatgtgtgtaaatgcatatgcctgtgtgtgagtgtgtgcatgtatgtaaatgcatatgctgtgtgtgtgtgtgcatgtgtgtaatgtatatgcctgtgtgtgtgcatgtgtttaaatgcatatgctatgtgtgtgtgcatgtgtgtgtgagtgtgtgtgcacgtgcatgtgtgtgtgcatgtgtgtaaatgcatatgctgtgtgactgtgtgtgcatgtgtgtaatgcatatacctgtgtgtgagtgcatgtgcatgtgtgcacatgtgcatgttagtgttgccagggagtgcttcaagtatcgaatgtcccaaattcacaacttttctattttcctcacttacctcctccctgacacatgcttctcagttaagtgagttcatatgcgcaaggcctacaaacaggcaaggcatgggccatagtcagtgctgagtcagtgtcatcaaatattgttatgcttatatagaaccttgtccagggtgggccaaatgtatgcccctgtcttgtcctgacagagcagcagaaagggagactgagacaaaacaatggccagggccctggcaacacggagacaccttcccactcctgtgagcttcacagacaaccctgggtatgggattcctgtcattcctttaagattgttcaaataaacagtgacaatcactctcatatgatatatgagaagaagaagaattccatataaaccaaacccatgacgcccacactgaagcctgccaagttctctccagtcgagcccaatggagggagcattttcatggggacttttgagagtatggagaagacctgaggaaaccaggctcagctgtgggctccagaggcaaagctctgggatgtctccccatggcctagacccttcgcctgccacctcttctcactctttgcacagatgcttcccccaggctaagcccccacaggaccctaatcctagtcctgaccctgagctcagcccaggtgatgcttcaggagatgggaccctgagaataagccctaaagtctcctcaacctgcaggctctgtagtctcttaaagactcaggtacctccagtagagttggccatgagacatctgtccctccaactgctcaggagcaggcaacagtgcagagagaaacagcagcccaggccaggccctacactcaaagcagcccccaatccccacagatcctccagcgctaacctggggtacaggccccacctctgcaggctgaggtgggctcctcagcatggctaggccatgacgggggatggcagtgtgtccatgggacacagccctgctgcctgcctggccctcatgccccgtccctccccaccctggttaagctctgccccaaagggcccaggttcataactcaggacacctggatcggctcttggacttgcccccactgttctctgttctcctgagccacttagtttcttttggccacagtgttacctgctgcgaagtgaggaggcttatactgaactgaagaagcacttttcttcattcaaaattaaaagatagaaaaacaatggaagtcatgcgaatggggggatgtcatttaatgggcttcagtgggcttcagacatggaatttcttgtctttcctctgcagagattccaagaaaaggactcgaaaagagcttgctttctatatggtgggaacagcagctgccagctaagaataagcaggagagtcccagtttcatcaggaaaacagactaggctagtatggaaatcctccctgcagaaactctgagaagtgtggaatgaaataaacataaacatgaaattaatctgccaacgatggtgatgttagctcacaactaagctgcagtgccagaaacatgcggtgattgcagtgaatcatagctgctcttactgggtgggaggtgcaccagtttgcttcctaagtgcatagaaagcctggcacgcacgtctctctggactttgaaagcttggcagaagagcttcagttgacttactctaattagtcctgacggaacaaaaccactagagtagggcatttcaaccctgagacacttctgtagcaattgctcctgccccacatccctgcactgcatgtgtgacctctctgtggtgggctgggcagggcagattgggccacactggcacagaatggggctggactctctggtcctcaacttctgaggtgacaggtgctgtggggtcacctggaaggaaaaagctcctgggctgagtctcctccaccagttgggggcagcagagctgcagccagcagcagtgaggagagaggctggggctgcccagccggggaaaagaggaaggcctgcctaaggttcaacaggtgtccaagaatcagtcttcagactgaaagtgaagacagttcatcctatcccctcaggctgcagtgaccacgctctgagggtcagactcatatagtgttactccaggacactgacagaagcctggcacagtgaaggcctcacctgggaaatgctgctggaggaggctgggcccaggtgtcagcttgggcagcttcctcaggaaggggattccctggaagaagtcccgaggtcaaggtgctctaggaggggcacagtgtgaggtgacggggttcccagggcctgggttcttcacccaggatggcggcctgagcctcctgccactctcagggccttgtcctgccctgtccagcagtgtcctggggagctgagccctctgtcgtgggcacttccagatacaccctgcctaccctccctctgcctttccttccagctccaggcagactctgactcaagggcagctcctgtgcttaggggagtctcaggtgggtggcgtgaagtatttggggccctggtccctgcatggggcatcaccagcctcattgaggagacactctccagagggatggggattctcacctgcctcaggccacagccctgaccccggacctgtccatgctcagtgacaggacaataaccaggaacctggctggagtaaccagggaccacccatcctctggagctcacatgctgtgcagagaccatgaccctgggaccctgggaccctgggaccctgggaccctggaaccgtgacagaatccatggggcctaaagttagattctcagtccactatggttttctgctgctttttgcaagtttacataaaacattgatgagaaaaacataaataaataacagacgagctgagggtgccaattgcttatctcttgtggcaatgagggaatggtatagaaggagcagcaccatggctgaaatgagaccagaggccctgttgactccacaggggtgtgtggttgcttaaatgacccaactattcccactgaataatcagcaagtgtcccaatgacacagcacagcatttagatgaaatgaacaagaggggactgagtctgagggaccagggggaggaagatcatgggtccctggtccacctgctgctgagtcaggtgtcagcatgatctctcggcagggcccagctcagccccatggccaaactcctggaaggtccacagctctgctgagcctggcccaggacagaccccaggtcaacgaggtttgggacagtggtcatgaagtcaattcccaagaaggtgactgcgatcacagggcttcaaggctgcagctgattttctaaccagagatcctgcttcttcttcttcctcttgtcgcctgtgctgcccccacagctggtttgggtgacatctctccaagaggagtcccagaggaagtaaatttgcataaacaccaaacactgactaccctaaaaagcctgagagagaataagagaggcctggggagcctagctgtgctgtgggtccaggaggcagaactctgggtgtctcaccatggcctggatccctctacttctccccctcttcactctctgcacaggtgctgtccccaggccctgctccaggccctgctccagtcttattccccacagatcccaagttgagcctgccctgaatcccgagcaaagcccagacgcagcctctgggtgcgactcctgggaatgggtcctttgtcttcaagccccctctcttgttcttccttgcaggctctgaggcctcctatgagctgacacagccaccctcggtgtcagtgtccccaggacagacggccaggatcacctgctctggagatgcattgccaaagcaatatgcttattggtaccagcagaagccaggccaggcccctgtgctggtgatatataaagacagtgagaggccctcagggatccctgagcgattctctggctccagctcagggacaacagtcacgttgaccatcagtggagtccaggcagaagatgaggctgactattactgtcaatcagcagacagcagtggtacttatcccacagtgacacaagcagacagggaagtgagacataaacccctccccctctatttcatcctcttcctcctgccccaggaggactgtggacaaagccatgagtaggcttggccaaattcacccaaatctgaacccccaggctgcccttccctccagccctccaggcaggcactgcagagtagtcagtctggagtggatttgtgcctggcaggccaggctgtcctgtgtttctttgcctggggtttgagttgtcgatggagggtctgactggaaagacagacacagggagacatccatgcaggcatgtccaaagggacatggggaactctcaggtctcagttgaatgcagtcattgttgtatcctctgggaaagcattcctctagtgcatctaagacctccagacccacagagcctgagatcaggaggagagaatgttaaatttttgctaatggaccactgaagacatttttgagtggagccactacaatttactccttgattctggactcatggatcctgactgtgggagaaacagcaccatctattgggcactgatgcacagaacatgccctatcctggaagacattgtccagccctacacatacttgccacttgcctggtgcagtaatggtgtctccaagcagtcattaaaccattcatataagccatatgtctcagaatgtttgggacaagagtaagaatcttgattgccagaagaaaaggcccatagccctttatttgcagtgaaatgaattccttggtcagaacctcctgtggaataccatcatgatgggtgcgtcattctgtaatccagagacaacagttttggcagaagcattgctgtcaatgaaagcaaatcctctgtagaataaatgtcaattctagtaagaaaaaagagctattcctgccatgatggaagagtgcaaacgaaattaatattaagcaggcccctggctgttttccacagagaaagtcatcctatagggatctctgtgttagtctctgctgttggcagatggtcactcagcagtggctacagccaggccagctccagttagtggaaatcgacattgatgagcccatggacagcctccatccctgccaccatgggcgcttttttttatggagcccactgggcattgacaagagtggttgagggaggctgcctgatgtccacagaacaagtcaccctactcacctgattagcaaaatcacttcattttcacagaagacttggtgagtattgacatatggaaaaaattctcttactttctgcccaccggaggaggtctattcacacatctctccccctgacgtatttgtgatcaatattctcattgtgtctctctcaagtccctgaacatccttgagcatctttcaagaccctgagtcacaacctgtgaattaggaacctctgcccatctcttggcaggtgacatgagccaattgcactgcttaaaattctactttaatgagaatgttcctccaacactgctgttcagggattctcagaggccaggtggagtactagcactgtccacaccagtagtggctgcatgtcctgcagaaaactctgtaaccccagcctaagtgcctcctcctaggcagctgatctcagggagcccctcaggacgtcaaggctgtagggtgagaggaagacatggtgcagggctccggtcatgtctatttggccaactcttcatgaaacttacttgggcctcgtgacctagtccctcaagtcacaaatacatccctgccatgtgattgaggagctgctggaaatggccaaccgggactgtggttcagaccaaacctagcatactggcaacttgggtcgcatggtgagctgtgtggccacaatcacacagagcctctgctgaggcccaggagcgttcgcagtctttctcaaatggagctttctgctcattcaaaaaaataagtagagggaggctgggaccccaggaccacttagaccacgcacatgatcttgtctgattattctgaatccttgcatgctcagctatgcattatggtaaccaagccacagtgtctttggcaataaaatgccactacttggcccccacctaacctgggatcccctcaaccacatcttgctacccaaaacaggtttcacctccactgagagaaatttatttttatattgagaagatgaaagattaattatttcaattgtgaaaattttataggacagtaatgtgaaaatattttaaaagacactttacgaagagtgaaagaccttccattaaaccactcaatatatgacactgtaattggcctacccaaaccctaagttcagctccgggttgggaccttctgggaatggacccttcatcctcacgccctcctctcctctcctctcctctcctctcctctcctctcctctcctctcctctcctctcctctcctctcctctcctctcctctcctcttctgtcagccctgtgcctcctatgtgcagagacagctggtctcagtgttggtggccctgggactgacaatcatgagcacatactctggagataaccttgagataaacatgcattaaggaaccagcagaatccaggccagtccatggtgctggtcatctagtataacagcaactgaccctcagggacatctgcccaattcttaggcttcaactcagggaacatggccaccatgaccattaatggagcccaagcccgggaagagactgactattgctgaactgcagataataacagtgggagcagctggcagggactcatagtaacacagagagacagggactagccacagaactgtcccatctcggcctggctctcattctcagctgccctgtgagcagctgaaggtcaggcctcagggtcaggcgtcctctctggtcttaacctggcccctgcagggctggtgattctgagcagcttctccatcctctcagggcctgcatgtgtccagtgagaagtgagtggacagggggaagctggttggagctgcaggaacctctgtcaggtttgtggtgtacatgaaaggtttaggaatccacacaacatcacatggccccagatgtaatcacacatcacacaggggaggaaagagctgtcgcagagggtacagtcctgtggaatttctcttttccttgggtataagcagcttagtggaagctccagaggctgtgtctcctctggtttccagatgagttcagttgacctccgcattctaaaggggtgcctgaggcctgaggaggactggagacccagccccttttggccccagggccctttctgtgctgacatttcacagaaactgaagaggaagaacagacactacctttcatcccacctggggactgtctttggggcacgctgaactcccatggcccccaaagtcccatcaccttccccaggtaggtcagacctgactggatgtccctctagtgccctgatagtgtggattttatctttgggctctgggctgctttctgaggagctcactaagaacccttgatgccaagtccaggacctgcccctctgctccatgtcccaggggctgcaagcatgacgggaaggtcctgctgggtgaggatggtgcccttttccagaagagatgtctgattccagtctctagggccaggtttgttgggctttttttctcacttggaaggtctcagtctctttattaccttctttaaaagtacaattggtttaatcgtgaaatcatgtgcatgcactaaagtttacagactatggtcatcagcacatatgtacactctttctggatgggacaactgtggacacggccatactggggtctctgtctctctcattatcacaagggaggataccaacagctctctcctatgcagaccgtagtcatgtttcccaattgcacaagaatgtctcttacagttgtttaatttccttcccagccaggacgcttaagtttcccatgctgatacttggttgctatttctctctgatccaacatttttcaaacagtattgcttgcaacccaaggcttatgaaacactttaccaaaagttccacaagaaaagctcaagtttctcatgcaccgttggaccaggttcattgcgtgcagtaggaccttgctcaagtgatgagtccatttgatgttttcaccatcaaggtgaagggtattatgacttttgggcactgagttgatagaaggaagacagcagctgatgatggccctgcccaccgatgtgtgtgtgtgggcaggacctatcgatggatttagaagttgagggaactgtttattctgcagatggaatttccagcactgaatctccaccaaccagacactagcactcagcaggtgctctgtaagaagaagcccttcactgccaatcacggccattacacaggtgaaggagaggatgatttttaacagccattgaccctcacagtaaactgaggtcaaaactctggtacacaaagtgactttgagagaacaggctgaggaagcaggttaattagtagcagaaggctttgccgagagcaggaacaaaacagggttggtgaggaactagtgatgccatggtgtggaaggaacaaggcctgtaccaggagcaggaaggggcatgggaaagaccacactgccacatgtgatgagtcagcacatggaaggcacagcaaatgttgcacaaaggtttttgtgtaataacctggcaaacagctgcttctctatcaagattgatgagtcaaaaaatgttactgatgcattgctgtcacatgtgaaggtgtgtgaagaatggtgacattcaaggaaacctgttctctgcagacacctacccaccagtacagcagacaccccagctatgccaagggctttgtcttcctctggggtaagagcctgggaacaacaagttggcccctgaaaggggtgccccatcatgcgctcttcatggctgagttaagtggggagctcccagagaactttccagtaaatggtcaatctgtttgttctgggtgcattgagcatgacccaggatcaatggaagtgacagaagcttaatttccccaaggctgcaaggcgggcactgggaggacggctgaagcagtttagccaccaccccctagtggctccagccccaggtaagcagggacagttgaagggcctgcctgagcccacctgtgtctaattagttccagcatcagcagctgcatcctgtagaccaccaaggagtgtgtgtgcccagcccctcacagatcacctgagcataaacaggaaattctccttcttacacctgactgcaccacacatctgccccttgctcttcatttacaagacgctatcacatcagacacggactgatctgagtcccgggttccctcaggtttctgctgtcctctcagatccccacacacaaaagactcttcaccacagggcgttgagccagctcttcccctaacactgcctcttacaggttactcttctccaatatgatgcgggtttgatttcagtgtttctacatatatacttttgtattttattgggtaagctgagccccttgtacctgatcttgagtcaggcaggggccacacagagaagaggtgttcctcccctgggaccagcagtcctcggatcagggcatcagggacctgaacagcaggttctgaatccacacctagacccaggaagtccctgagcccccagcccacagtgtggagcggccaccagggggaagcagagagttacctggcaaagccacctggcgatggggcgggcctgggtgacagggagacgctgacatgcagcaggagccagtgaccatgatctcacacctggaatgaaagggtctttattttcatagagtattgtccttgtgtacttgacactcatgtagaaattctagaataggattttaccttcagctcttgcagatgctgcctctttctctgccacagctccaggcacttgacttctcacagtgccctctcctcacacacccagttgtgctaaaatggtgtccctgccatgtgcagtgtcctccctgaggtcacaggtgtcccctttatctcccctttgctctgggagcccctgtcctgcagacacagtggcttctcctttcctggctgctcctccactttcattgtccctggtctttccggactctctcctggggaagctgccaaatcatggctcttgatttcctggtgagtcacaaaatagttgctcattaacctttagttgacttaagttcttaatcattgatacattttccccaacaactgacgacaacttagttataataaacattcacttctgggggtcttggagtttgcagccccctctcattctctcatggagcaaacatttccttcgcctcctcatctgtctctgatcctgacagcatcctggagatactgaggcacagcagctatgacctacccaggagcttgcagccaaggcagaaacttccatcacctcatggatcttccagcactctgtgtgcacttgacaaataagaaattccattgtcctctaccactcaggagctgtgccctgcggtgggacctgcacctttccaaggtgtgtgttatcatctgcacagtggagatgaagagggaacctgcattgggttctggaaagtaccatctaaaaatatatttagacctgcaacagaaatctcctctctaacataaaatatttatgatcaggacacactgagaggcctagaccaaaattaagcactgccctcctgagccaggatagaatggaggaggggactggggaccccagataattccacagttaccagcatgactctatgatcacctcctggaccagatcaaagatcatcccatatgaaggacttcatattccttaggaaatacaaagtcacctctgagctctgctgtgaccaagtgagcccaggaatgaggctgagcacagtgtgatgtggagatgtctgcagagaatatggaatcaattgataaaggagatcctgtgggcaaagggtgggagggcaaggccacccctaacctctttgggtcccttggggctgagtccttctggaaaccacaaagctcctccagcagcagcccctgactctgctgattggcatcacgggctgttctctccaacaaggggttaagagagacctgggaggagcctgcccagcctcagacttgagaagcagcattggaggcacttcagccatggcctggcccctcttttccttggtctcctgactcactgcccaggtgctgcccccagggtctcacccacctgcccagccccaggcctccaggttcagcctggccatcagtctgagctcagcagggccctgtgtgtggtgggcaggatgctcgtgaccctgctgcagggggaggggctggttgggctgaaatgcccccactctgtgctcctgtgctcatgggtgccctgagagctcttttattcctggggctcactccagccctggcaagtagcaagatatcctggggttgagcctctcagtttcaaattttttatctcccctttccttcttgcaggctctgtcacctcctgtgagctgacacagccaccctcagtgtcagtagctccaggacagatgactaggatcacctgtggggaaaacagtattggaagtaaaagtgcttaatggtaccagcagaagccaggacaggcccctgtgtgggtcatctatggggatagcaggcggccttcagggatctctgagattctctggctcaaactcagggaacaggaccaccctggccatcaacagggcccaggctggggaccaggctattactgtaagatgtgggacattaggactcctcatcccacagtgacagaggtagatggggaagtgagacacaaaccccttccccatacgtgtcactcttgtcctccagcccaggaagactgtggacaaagccatgagcatgggtttcccaattcacctggatctgagaccccccaggctgccctttccacaggccctccaggcaggctctgcagaggggacatcaagactgaatttagggcagaggtgaccaggatatattgaggtttgggggactcagttgtgatttggggaaatggggccagaatggaaggtcaggccaaggtcaacatccttagttggtctctggatttccatagggggtgaaggccagtccttgggctgaatatcctgagtcagtttccagaactgcccagctcaggctcccatggcatcctgccattctctgaaaagggccctggcatgccaggtgctctgggttctgagggagagttggaatcagatcctcctgcaggaatccagggtcaggagaagcagcctcacctgacacagggaccacagatgcacccccacagggtgagctgcaggatggatgctgctcatctccaatcctcacatcctatgcaaaaaatcattcttttcacccctccttcagtgtatcaaagttgacacttaaaaagccttaagagcccactcttgtcaacagaaaacccattcacatctccatcagccacacaatctccacagaatgattcttcaaaaaacgataacagtagacatgaaaaggtatctaaaatgttacataaataattgaacttagattacatatgaaaatgatactatttttggtatgctaggtaaataaaatatattatttggactcctttactttcttctctttgtatttctaatgtggtgactagacattgggattccaatgaggctcacatcatattgtgattgaacagtgctggtctgcacctcttcaggtaacaggggctgtggagtgacctggtgcaggaagccccatctccaatcataggacatcagtgtgaacccagggagaggcactggtgcaagagaaatgagaacaggagtgtggaccatctgcttgtacaggggactgagccctcactttgagccaaataaactttttttctattttcaattctgaagaagaagactttcctggacttctttccgttttcagatttgtgccccttcaggtttggcctgtctggatcccagccaggggacaccgaggaaatccaggagtctcacactgactctgttgtatttcatctgctggggtcatcccaaactgctgcgtatcgtttcctttcctggtgctcaaatagctgctccatgcacttgtcacggtttcatagctcagtctaggtgggaagacaggatagtgtatgttataatatttaaatggaacctgaatccattcattgtttttgtttttttgtgtttttgtttgtttttgttttgtttcgtttttgagagagagagagagtcttgctctgtcgcccaggctggagtgcaatggtatgatctcggctcactgcaacctctacctcccaggttcaagcgattctcctgcctcagcctcctgggcagctgggattacaggcccccgccaccacatccagctagtttttgtattttagtagagatgaagtttcaccattttggtcaggctggtctcaaactcttgacctcaggtgacccacctgtcttagcctcctaaagtgctgggattataaaggtgagccaccacgcccgacccaatagtttttttaaaatatgaaatgttaaaagagttttgtcataggcattgggaaaggtgaaaatagattaaaaacattttaagaaaaaaaccaaaaatgtacttgtagactgtctgtgtgtcttcagtgttgcagggttcagagaggtcagttttatggttcactaaggaggggctaagatggaggaaaccaagaaagccaaaaacacacatctctgccactcaaaacataaatcaaagtaaaatggaaaaaatctttcaataaatcattcccaataaatatcactctggtgcacatagaaaggcctgttagcaaactttccctttcccctgctggctcatatccccatggatcacctgtgtgcagagtggactctgtggtccccatttctcaggctgagaaccagagactgggaaggacaagtcacctgctcatgagtgggaagggcaggattgggagcagctggcttgggttcaggactgtggccctggtcggtgctctgtgtccctccagagggtccctcccacatgtgccccgtgtggatgtgggtgcactgcctggggtggctgatgtgctccagggattcgatggtgcagatgcttcagcacaaaacgtggaggtggggatgggatgaggctgcagctggggagaccagagaccagcgccacccagcagaggtttccacggggtgggcagccccatttcctgacagtagagacaggctggaggtgggtgccaagcagagggcgctgtggggtatgcccaggcctagagagtcacagagacacaggcactacacagcagaggcactgagggccaggagctcactcaggtgagagacttcagcagatccttctctcctgagcaaatcaggtacaaaaaaaattaagttcctgccatcagcatgcacaaacaagaacattcatctcttcagctgagccctgctgtccagggaagcaaaagtctctgagcccaggcccacgtgagggtggggtgaggagaggagcccaggatgctgattttcatggaggccccgccctcctctgaggcaaaggggataagacagggctggggcagggccagtgctggggtcacaagaggcagcgctctcgggacgtctccaccatggcctgggctctgctgctcctcactctcctcactcaggacacaggtgacgcctccagggaaggggtcttggggacctctgggctgatccttggtctcctgctcctcaggctcaccggggcccagcactgactcactggcatgtgtttctccctctttccagggtcctgggcccagtctgccctgactcagcctgcctccgtgtctgggtctcctggacagtcgatcaccatctcctgcactggaaccagcagtgatgttgggagttataaccttgtctcctggtaccaacagcacccaggcaaagcccccaaactcatgatttatgagggcagtaagcggccctcaggggtttctaatcgcttctctggctccaagtctggcaacacggcctccctgacaatctctgggctccaggctgaggacgaggctgattattactgctgctcatatgcaggtagtagcactttccacagtggtccaagttcatggggaactgagaccaaaacctgcccagggccttcagacttcctccttgctctgaagatgcttcctcacccggtgcaagaggcttgctgcagcgcggccttgagaattcttctctctcagctccttccctttccaccatgaattccaacaggaaacctgccctgtggtttcccatccaggacagggacagcttcctgatgcttgtgtgctgtggtccctgaatgtgcaactcttcccagctcttcaaatgcagggacagtgacaaggagctgcctgattggtgcagtcactgcttttttcagggatgtcttcaccctacatgtatcatcatcccctacactgtgggtagaattttagcaactacattctaatggttatcgccacaactttgatcttagaaataacagtgcagtgaacatccctatgcaggctcctttgagttcctgtgtgaatacgaccataggattcatttctaaaagtgaaattgcgggtcagaaagatgtgtgtttgtgattttcacccaatgttgtcagattcccctccagagggattgtaccaattttcaatgccagctggaagtacttgttcagagtacattgttgaatgtggaaatttttgccaacgtatcagagtgaaaaatggtaccttgttacagttttatttttcagtctcccgttctgcttaaggttgggccttttcacaaatagttcagtactcttcatttttcatgatttggtaaactttataaaaaatatccagataagaagaattttagtctttgtggccagacacggtggctcatgcctgtaatcccagcattttggaagactaagacgggtgaatcgcttgatcccaggagtttgggattagcctgggccacacagtgaaccctcatctcaattaaattaaagaaaataaaaataatttttaaaaaaatcctttgtggtccaaggatcaactttggggatattacctatggacttatatcaccatttacaatgcaaacatttaaaatgataacaactactgtcagctgcagaactaatttgactccatcaaaaaaaaaaaagctaaaagattataattctgcatttccacatgttctggtggtcagagaccacttccttgacaagcagtgagtacggggatctgaagggtagttagcatttaggcaggtattgggtgaagaatagggatatacacaagaaactttcaaagagaaaaacacatggaagttggaacacagaagagaacataatatgtctgagaaataaggaaagtccagactcactggagctgagtgagaacaagaaaaatggcataagccatgtatttctctctggatatctcattaaaatattgtctcctccccaacacaccacccatgtgaattataaaaatgcccgttttaaatttttgtttgcatgtcgtgacagagtcaagcacgtgaatcaagctgagtttgatgagtccagggctgttaagccccagacccaggtggcctcagaaggacttggtggaacgagggcttgttgtcaaaagcagaggaagtgagattttccattgtggctgagaccagtttcttaaattccagtggacacacaaggccccttaaggatcggttaagatgcagatgcagcctcagcagttctggatgtggccccaaattctctgtgtctggcaactcccaggtgaggctgctgctgctggtcctcccaggaccacactttgagtggctgaactcttattcacccacctcactcaagccacgggtgagactcacacaaggagagcatattctagaagcacaggtcacttctcactcctccccttgtgtcttagatccttttctgttactataaagaagtacccaaggctgggtaatttatacagaaaataaaagttttatttggcagacagttccaatggctgcagagttcaaaatgtggcatctgctcttgttgaagacctcaggctgcttcctgtcatggtgaaaggtgaaggggagccagtgtgtgcagatgtcaatgggggagaggaagcaagagagaagacaaagatgccaggctctttttaataaccagctctttcggaaacaggggaattcactcaccccaagtgagggcattaatctattcatgagagatccactcccatcaccctaaaagctcccattagttcccacctccaatactggggatccaatttcaacataagatttggaggtgacaaagatcaaagccatagcaccctgaggtttggccacacacttgctcatctccacatttgtccctcccctcaggactagggtcctgactgctctgacttagtctccctccaccttatgggcacctggcagtcggtcatcatcagctttgctgaatcagcagcaacattgagggtaaaaattgtgtctcctggttccaccagaaataaagtagagccccacacagctgaggtgtggggtcaaaaattaaaactaagagacataagactcattctcaggctccaagtctggccagtgagcttctttgagactccctgggatcccagcagtgacactgatcactattgctgtcccacacatcccaagtgatgaggaagtaagaccaaaaccctcctgagattcctggcttgtgtcctgacactggggctgttgggattcctgtctttccttcaagattgttcaaataagcaccgacaatcacttccatgtgagatatgaggagagaataattccacatgaaccaaatccacgaagcctacactgaagcctgccaagttctctgcagtccagcacgatgaagggagcattttcatgggaacttttgggaatatgaggggagccaggctcagctatgggttccagagacaaagctcctggatgtttccccctggccttggtccatcacctgctacctctcctcactctttccacagatgctgccccaggttaagcccccacaggactctaagcctattcctgaccctgagctcagcccaagtgatgcttcaggagatgggatcctgagaatgagcgccaacgtctctttaacctgaggtgtgaggtcatgagacacctgttggccataagacacctgtcccccacctgctcaggagacagtggagcaggcaacagtgcagagagaaccagcaggagccaggccaggccctgcatccaaagcaggccccaatcccacagattctccagctccagcctggggtacagccccaactttctgtaggctgaaatgggcttctcaggatgggcaggccatgatgggggatggcagtgtgtccacaggacacagccctgctgcctgcctggccctcatgcccactccttccccaccctggttaatctccacccaaaagggcccaggctcagaactcaggacacctggatcagctcctggacttgcccccactgctttctgttcccctgagccacttagtctcttttggcctcagtgttacctgctgtgaagtgaggaggcttatactgaactgaggaagctcttttcttcattcaaaattaaaagacagaaacaataaagtcatgtgaattaaagccttctaaggggatgtcatttaatgggctccaatgggcttcagacatggaacttcttgtctttcctctgcagagattccaagaaagggactcaaaagggcttgctttctgtatgatgggaacagtgatctccagctgagtataagcaggagagtcctagtttcatcagcaagacagacaaggctagggtagaaatcctcctggcacaagctctgagaggtgtggaatgaaataaagataaacatgaaattaatgtgcctatgatggtgatgttagctcacaactaagctgcagaaccagaaacctggtgattgcagtgaatcatagctgctcttactgggtgggaggtgcaccagtttgcttcctaagtgcatagaaagcctgggtccctgtaggatggcatgcacatctctctggactttgaaagtgttgcagaagagcttcagttgactcactctaattagacctgactgaacaaaaccattagaggagggcatttcaaccctgagacacttctatagcaattgcacctgccccaccccactgaactgcgtgtgttacctctctgtgctgggctgggcagggcagattgggtcacactggcacagaatggggctggactctctggtcctcaacttctgaggtgacaggtgctgtggggtcacctggaagaagaaagctcctgggctgagtctcctccaccagttgggggcagcagagctgcagccaggagcagtgaggagagaggctggggctgcccagctggggcgaagaggaaggccagcctggggttcaacaggtgtccaagagtcagtcttcagactgaaaatgaagacagttcatcctatcccctcgggctgcagtgaccacgttctgagggtcagattcatacagtgtcacccaaggacaccgacagaagcccggcacagtgaaggcctcacctgggaaatgcaactagaagaggctgggcccaggtgtcagcttgggcagcttccttaggaaggggattccctgggagaagtcctgaggccgaggtgctctaggaggggcacaatgtgaggtgacagggctcccagggcccaggttcttcacccaggatggcggcctgagcctcctgccactctcagggccttgtccctccctgtccagcagtgtcctggggagctgagccctctatcgtgggcacttccagatacacccgacccctcctgcctctgcctttccttccagctccaggtggactctgactcaggacgcagctcctgtgctcaggggagattcaggtgggtggcgtgaagcattttggggccctggtccctgcatgaggcatcaccagcctccttcaggagatgctgtccagaggaacagggcttctcacctgcctcaggccacagctctcaccacggggctgtcctttgatcagtggcaggatctgcatggctggagggactactgaccacatgctctctggagctcatgtcttgtgtggagaccatgacctggggaccctcagaaagaccaagcagcctaaagttagattttcagtccagtgtgattctctggttcttttcgcaagtttacgtaaaacgttgatgagaaaaagtgaataaataaaggaagagttgaggatggcaattgctggtctactgtggggctgggggataccatggaaagagcagcaccacatgtcaaatgagactagagattgggatgcatccgaaatatgtgtggttgctcaaatgacaaaactcttccaactgcaatgattcataagtgtcctacagacacagtacatcatgtacataacattaccaggatggggccaagtgactcgggggtatcaggagcagggatgaaagaggagaaagatgatgcatctttggtgtacttgctgctgagtcaggcgtcatcagtgatttctcaacagggcccagctcagccccaggccaggctcctggaaggtccatagtcctgctcaatgcagcccaggacaggccacatgacacagaggtttgagacagggaccatgttgtcaatccccaggacggtgactgtgatcacaggccttggaggccaaggctgattttctgactggagaagcagacgaaggaagctggggattcaccccttcattttaagtttctcatgctgcccccagagctggcttgagggatatcccgccatgaggagtcccagagaagtaaatttgcataaacaccaaggatgcactgccccagtgggcctgagaggaaataagagaggcctgggaagcccagctgtgctgtgggctcaggaggcagagctgtgggtgtctcaccatggcatgggccacactcctgctcccactcctcaacctctacacaggtgctgcccccagaccctgccccaggctcagccctcctaagcccctggtcttaccctgaaccctgagctcagcccaggcatagcctcagggcgatactactggaatgggtttgttatcttcaagccccctctcttgtcctctcttgcaggctctgttgcctcctatgagctgacacagctaccctcggtgtcagtgtccccaggacagacagccaggatcacctgctctggagatgtactgggggaaaattatgctgactggtaccagcagaagccaggccaggcccctgagttggtgatatacgaagatagtgagcggtaccctggaatccctgaacgattctctgggtccacctcagggaacacgaccaccctgaccatcagcagggtcctgaccgaagacgaggctgactattactgtttgtctggggatgaggacaatccctcagtgacacaggcagatggggaagtgagacacaaactcctttttcatctgtgttgtgttcttcctccagcaccaggaagactgtggaccaagcaatgagcaggtctggccaagttctactggatctgagacctccaggccatccttttttccagctgtccaggttggctctgcagagggtggagcaggagtggatttaaggctgctataatcagaatttatggtgttttggggcctcatgagtgacttggggaaataagaactggatggaagatgaaagagatgtagagaaccatcacttgaccttagatttccatacgatggtgattgggtcactccttcttcaaaatatcctacatcagtcccgaaaaatacccacctcagctcaacacctgagcttccaggcttccatggcagcctgggattttgaacaggaaaagccaaggaggggacactgtggcatctgcctcaatacccttttctgagctcacccaacctcaactgctgggagcttctaggagctcagagctgtgccctcactgggaagtgctattagctccaaagaaaacttccttcctcatatttaggcccagttttgagagttttggtttgatgactgcctgagccaagaacccaaggccctgtcctaatagaggatgacactgaaaggccttccagatccagacatcccagtatggatgcctgaggcctcagttgcaaccctattgtgggtcagggtctccttctggtgggcgatgcctccctcactccttccagatcctctgtgcatgcacatctttttctcagagtctacttccaggaaacccaaactaagatggctggctatcaccaaaataaactaccatagacctgaggtggaaacaccagcgaatttcccaaatttccattgtgaacatccaaatgcccatttatatctgagtgttccttgtattcttataaaatgaaaatggagcctgacataccaggtttttggagtcctgaaggagatgtggagacagatccttctgcaaggaatccaccgaaaggggagcagcctcaccccatgcaggggctggagatgctcccacaggggcagctgtagcatggacgctaccaacctccaccctgcacatcctgcacaaacaatcactctttcacccctccttcagcttatcaaagttgacacttacgaagccagcacagctcacccttgtcaatcagactccttcaaacctccatcaaccacacaatctcaacataaagaatctccccaacataataataggaacagtagctatgaaaatggctataaaatatctcataaataattttagattgtgttcatgtgtaaatattatttttcacactttgggttaaataaaatatattactgaaactagtttacctttttattttttatgtctagtatggtgactagacagtaggattcacatgagactcacatcatgtgattgtacaatgctggtcttgtcttaccccttgaggtggcaggtgctttggagtaacctgcttcagcaagccccatctccacccgtaggacatatgtgtgaagccatggagaggcactggtggaagagaaatgagaacacagatgtggaccagctgtttatgcaggtgactgagtcctggagccctgatcctgttctaacctagatgtgtcacatccatctcaccagagaccgctgctggcctgccttagctcataactggggggatctggcagttcatgaaacatggtcgcttgatgtccagtgttatcctgtctctctcagggcccaataagacaaaaggagctgcttttagaaagggaagtaacactctactgcacatgacatggccttattccaaaaccccatgagtctacgttgggattctccagtggggtttgccatgtacaggaggtttcagttcccacagtagagtcagctggattctctggacccaacagcaggacactcacaaccctgcctgcacctgctgcagagcctcaatgctctgggcctggaaaacaatgggtgatatttgtggctcctgatatatgggttggagccacatccccaagtgtaaaatatgctactcctagacctttatagaccttgtgtctgtttcttcctggagggaattgaagggtataataacatgttctttaatttgtaggagactctcagctgctccagacaactgaagtcccaatttctgctaatacagaagagggaacagtttatttcccactcttaaaagtgcatggatctcacaaaagcttccagtaggccatgcccatcatgtatatgtgattcaactatgatatcaagatggtctgaaccctcatgatgatatcatgatagagataagagagctaatgatgctgggcagagaaagtgtgaatgtatactgtcgtccattccacctgaatgcacactgattctgatcctattctctgagggaaatagacaagacctcagtatctgcttcagtgaggtaactgtgcacctgcagccatagcattctgttcccagagatccccatctggcacagatattgctaatgccactattgcccatctgggtctgtacaaatccaaattcatcttccaggatcattcaactattgtagagatcagtccagtaaactgaaaacaaaaccccagaagtaatcacacgtactgcgggagaggagagagctgtctcagagggcacagtcttgttgaaattcctctgctccttgggaagaaacagcccagaaaaggccccaggggctgcgtctcatctgggttcctggatgaggcacaccccctactgcactgagattccacagaagctgggggtgaagtgcaaataccgtctttggttcatccttgggattttctttttatcacacactcgtcattttgtccacaatgtccaaagtttctaaagtgctgtctaatagatagaggttctttgtgcgctgaactaaaagctcttgggttggacaatggtgatgtttgcacaacatttttactgtacttactgccgcttaattacacacttaaaaatgattaaaaggatgaaacattttgttatgtttattttaccataataaaaatattgcatgctcaggaagcaaagtaattttgcaattatacaactgttaaaaatggaagaattatgtactgagcaccattttctctgttgtttatgctacaattcaactttctctctctctcactctttctctaattagcaatgatcttctgtctggtccaaggtcacacatttccagtcttccagaaatgtctgttgaatctgttaatttgttgccaggaagaatactcaaacttctcatgctcatatttgagtgttagctgtctccagccagcatttctaagccagaccctttgtcaaggcttttgaataattttgtgaaaagtacccccaaagatgacagtgttcactgttggcagcaggactgtttccatgcagtagggctatgctgggtgtgcagtggagctgtgcacactgtgctcacggggcagattctgtgctgctgactctgatccctgtgcttgggaggaccgtgtccactgctgagtctacatctgaatttgattctcaagaaaaaggtcattcatagctattggacactgagtcacatagagggacagaaggtggctgaggacaccttatctctgatgagcataaggggattagatctgctggtggaacaggaagctgaagaaacctgtggctctaaacatggaatttccagccctgagtctctgctgtccgtgcccctctcatctgtatgttcctgggagatgtggaccacgggggttagaggtgaaggggattgggaagctttcatgttctctctcaccatctcccttgcttatctaacacactcttacacacctactttattggagcttctgctctacaaacatggctgagctctaaattagagacttttgaaagtgcagacggatgcaggaactcgtccatctggagactttccaccacttgaagcagtgaacacgtctgtgcaaggctcagaatttcaagtgacaggatgttgggatttcaaagaaaactaaatctttggatgaaccacgacagaagagggaaggttcacacatttccctgctgcttgggcctcagtgaggactgactcagccagtctcaggctcctggagaccgcctgggagatctgcactaggaaaccattttcagcacagcctggggctggtaaggggcccttactctgttattctgctgcctgataattttgcatccagagaagaattaggacctgtgagtccaggaatttcaaagcccatagacaaggtcccctcattctgccgtgacagcctcagctctgctttcccaaaaaaagagcatcttcccagcatgaagaaccaggagcaaagagggagcttctcccaggggtgagcagggcagaagccaccttggtcagtgggaaggaaacatgctcagctcacatctgacccagaatgactcagtcacacctgtgcagggtcacctgtgtgtgagcatcatctatttgctccatgagaaaataccttgtgtggctcttgggtaaaatcataccataggtgacatttctctgcctattgcttcagccgatgcttttcgtgattccctttaggacactggcataaggtaagcatgtcaggtgtgggacgtattgaacaggaaaagcagaggcttctcatatcaatgctcgtggcttgtatttgggcccatacctcatggaaatgggaaaaacagaaaagaaaatgatactctgctcaaaaaagcactgagaaatgctatagtattaatatatcgacaactcatttattgagctaatgaaatattaacatagatagatcatttttatagggggatccctaatccttaaacattatattaaaaatttgtcagcttaaaggatcattaaaaggcctatgtttgattgaaacctggagtactgtactttgagtcttctaatcagccaatgagtgcagggagctggctgccctcccaggtcctgactggctccatgtccaggtagagcagcgctccccacaggcagctggaggaactgacgaggggaagctgttggcatcagggcctcaaaaatttgactcaggattttcccacgtcccctccccaagtccaggcgggttccaggacactcagaagagctcatcattatgggtctaggacttccctggtcctgctcttctttcttccttccccagtggccttaagattgtcactccctgtcacaggcccttcctttccttgtcaagtgcactccctgaattctctgctcctgggtcaggaaagctctggaacttcagggaaagcagtgctgggtgacccaatggggacccagaaagctggcccagggccagatacacaggcagcagggtgggtccctacagtgctgcctggtgggcatcaggtagaggggagtgaccaggaccaactcccctgagtgtcttcagggccaggtgaactagggagggtctgggacctggtgtggacccatgcactgacccaggaataggacaggaaactcctcagagcaaggactgtgttttcctcatgctgagctcctgaaaagcagtcttgccaggatagagtgggccagggtggatatatgttgggtgaatgagcttctgtctctgttttattgcaggagtcactacgaaggtacgctggccctgtatttgtatccagaaccagtcaaagccacctgtgagtcctgcatccctcagtaccaagccccagtcccccttcaggaccacccaccacacagagagacagacgtgcagggagcctgaggaagaacctgaaacctcctctactacatggagtgtttgtatttccatcaggaatcttgagcaccttgtgccgggtcttgaggcaggaaggggccacacagagaagaggagtttcttccctgaggtcagcagtccatgaacgaagggatcagggacttgagcagcagattctgaagcaacacctggacccaggaggcccctgagcctccagcagcccgcgtagagtggccaccagggggcagcagagagtaacctggcagaagcacctggagatggggtgggcctgggcatcagggagatgcccacatgcagggagggtcggtgaccatgacctgagatctggagggaaagaggttcttcttttcttagagtatttgtccttgacaccgatgtttacattcttctggcttcctggttctcagatctgactcttggagatgatccttatttttctgacacacattcaggcactttgcctcttcccatcgacctggcccccatctcactgtcacacatgccatcccatcctgtagtcagacgtgtcccacctccctgcctttgctctgggagcccctgtcctgcagacacagccacttctccttccctggccacccctcaacgtccactgtccccggtctttcctgactctgttctggggaacctgccaattcgtagttcttgatttccttatgagacacacaatacttactcattaatcttttgttgacttaagtttttatccattgttacattttcccagcaacagaagacaacttagttataataaacacttacttcctgggtcttggagtttgcagccccctctcattttctcatgaagcaaacatttccttcacctcctgatctgtccctggtcctgacagcaccctggtgatactgaggcacagcacccatgacctgacactagaactcgcagccaaggtagaaacttaccgcatcccatggatcttccaaaattctatgtgcccttggcaaccaagaattgcattctcctctagcacagaggagctgtgccctggaatggggcctgtacctgtccaaggcttgtgccgtcccctgtgggagatgagaagcgtccctgcattgggctcttggggacccgtcttggacatgagtgagaatgaagagggtccctgcattgggctctggcatgtgactttaaatggatttaggcctgtaccagacatctcatgtctgacataaaatatttacaatcaggacattactagagaagcagaaaaaagctaaccacctccctcctgagccaggatggaatgaaggaggggactgtggaccccagataattcccctgtcaccactgtgactctaacaacctcttaaatcacggccaacatctatcccataggaaggtctttatatcccctagaaaatacagaggaagtcagctctgagcttttccacgaccaacccagccaaggagcaaggctgggcacaacctgggtaaagatgtgagcccagaccatgggaccagtgggtgaaggaaaatcgcatgggctgagggggtgggtaagcaggggccagccctcctctctctgtttcctttggggctgagtccttctctggaaaccacagatctcctccagcagcagcctctgactctgctgatttgcatcatgggccgctctctccagcaaggggataagagaggcctgggaggaacctgctcagtctgggcctaaggaagcagcactggtggtgcctcagccatggcctggaccgttctcctcctcggcctcctctctcactgcacaggtgatccccccagggtctcaccaacctgcccagcccaagggttctgggtccagcgtgtccttgattctgagctcaggagggcccttcctgtggtgggcaggatgctcatgaccctgctgcagggtgggaggctggtggggctgaactccccccaaactgtgctcaaaggcttgtgagagcctgagggactgcacctgccaggagagagtagtgagttttcagttcaaagtctccatacaacaggaaagtcatgggccactggggctggggctgattgcaggggataccctgagggttcacagactctctggagcttgtctgggacagcagggcaagggatttcataagaagcatctttcacctgcaagccaacctctctcttatttatttatttatttatttatttatttatttatttatttttatctttgcaggctctgtgacctcctatgtgctgactcagccaccctcggtgtcagtggccccaggacagacggccaggattacctgtgggggaaacaacattggaagtaaaagtgtgcactggtaccagcagaagccaggccaggcccctgtgctggtcgtctatgatgatagcgaccggccctcagggatccctgagcgattctctggctccaactctgggaacacggccaccctgaccatcagcagggtcgaagccggggatgaggccgactattactgtcaggtgtgggatagtagtagtgatcatcccacggtgacacaggcagatgaggaagtgagacaaaaacaccctcccagcctcggtcaccctcttgctccagccccgggaagcctgttgataaagccatgagtgaatctggcccagttcacctggatctgagcctttcaggttgcccttccctccagccccctccaggagtctctacagaagatacatcaggcataaatatggcctggaagggccagaatcatctggtgacttggggctgttgtgtgagttagagaatgaaggcttgggtggaaagacagacagaggcaacctctgtccactgtcctacccctggatggtcatatggtggggacagggcaagtccttagaccaactgtctggatcaggccccagaactactgcccagttctgctgaggtcctggcccccaggctgtgtggcagcctgtgattcccaacagagcaaaccagaggaatggacactgtgaagtctgcccagatcccctcctcaatgtgacccacctggcactgctgagaagcccagcagctcagagctgtgccctcactgggaagtgctgttggttgcagaaagcttcctcaagtttgtgtcccttttcagaggggttcggtttaatcaaccaagatctcaaatccttgcctcaatttaagatgccactgaatgaagggcctcccagctccagagctccctgtgtggatacctgaggcctcaatgtcaactccatcacgagtcagggtctccttctgccccgtgttgcctcccccactcccttctgaatcttctgtgcatggacatctctattgcagagttagcttccagagaaccccatctaagatggccagctgtccccaacatgggtcatcagggacctgagtaggccactataaactgaaaactctggtttctgtccaaatttgcagagtaaatgttgaaatgcccaatctgatggttccttgaatttttatggaatgaaaagggagcctgacatgccaggtgctctgggttgagggattgttggagtcagatctccctgcaggaaagcccggggcagggggagcagcctcacccctcacaggaaccacagatacacccacaaggtgagctgcaggatggatgctgcccacctccaccctccacatcctctgtaaatgttgctcctttctacaactccaaccagatatgtagatgtggcgaactacgtaaaatacggatcattcatcacatcaaaacccactgcaggacaccctggtcaacaaagaacccaatcacatccccatcaactacatagtttccaaattttccatctccagaaaaataacaataacaatatacatgaaaatcgatgtaatttatctcatacataatttcatgttgataacgtgaaaatgatagtattttgctctactgaaataaataaaatatatatatatatctgaatttatttgtcttatcttttcatatttaatgtggtgactagacactagggggtcacaggaggatcgtgtcataccactatgggacagagctcctcacaactctttcaggtgacaggtactgttgagtaacctgctgcaagcatccccatctccaccagaccatataagtgtgaacccaggaagaggcactggaacaatagagagaaaaacctgcttgtgcagaagacggtgcccttgagccctgctcctgctccatcctacgggtgccacattcatctcatggtgtaatatttcgtgccctgcctgagcttatgaccgaggggatatggcaggtctgactgtgtggttactggtgtctcatgaggttctggatgtaacaaagccctcgaatatagaagaggttgttttcaaaaggaaataattatctactgcacatgacatagacttgttgctaaatcccatgcgtctacactaggattctcctctgaagccttgccttaagcacaaggtttcagttcctatgtccagttcctctattatggtagagtctgctagtttctctggcccaatagcaggacactcactcccccacctgcacctgctgcagagcctttctactcttggccccaaaacactgggtgacacagttctcagacccatgatttatagtgtcagtattcaggcctcaggggtccctgatggcttctctggctccaagtctggaaacacagcctccatgaccatctctgggttccaggctgaggatgaggctgattattactgcaactcacataggagaggtggcactttccaccgtggtccaagttcatggggaattgagacccaaacctgccctgggctctcagcctctctcttgttctgaagatgcttcctcaccctgtgcaaggggcttcttgcagcactgccttgagaatttcccctctcccagctcctctcctttctcaccaggaagtccaaaaggaaacctgctctgtgatttctcatccaggacagtgacagcttcctgatgcttgtgtgctgtggtccctgaatgtgcaactcttcctagctcttcaaatgcaggcacatagtgagaaaagctgcctgactggtgcattcactgctgtttttaaggatgtcctcacccaaaatgcatcctcctcccaaattgtgaagaacaatctggacagaggtcattacagggagtttcaagaaactgcatcttattcaattgtgtccaccatggtctggtaaagatggccctcctggatggactattcctctgcatgtctgtcctgaagcagtgaccactgtgagaagatctgaacatgtttgtgaggtattaaggacgagaggaaactgttgtttttattattcttttgtttttgtttttgaaacaaacttttgctttgtcgccaggctggagtgcagtggcagaatcttggcttactgaaatctcagcctcccaggctctaccaatgctccctgcctcagcctcccgaagagctgggataacaggtgaccaccaccatgcctggctgatttttgtatatttagtagagacgggatttcaccatgttggccaggctggtcttgaactcctgatctcaggtgatgcacccacctcggcctctcaaagggatgggaatacacacaggagccactgcatctggcagtgttttttttatttttgctcctcctctttgcctcaatacctcaggttgctgagctggggagattttgcgtgacaggctcagtgctccctcaaaatcctcccgtctcaattcgctggggccctgtcctggaaactccccaaaagtggatggtgtccctataggttgggagtttccaaaatggccccacagggaagagttaacgtgagtccattccttcttcctcattgacatccagcatttgtaatttccatgggtgtcaatacttttgtagctgaaatctttcttaatctactaaaggtgagaatgaatttaataaatattcagacattagttgcatccaatatttaaattttatgagtcaattggtagacatagccattattatatataatttaggcttcataaactttgattaaataggttttattaaaaacaaagtaaccattttattatgtgtttagactatatcaacatgttgtgtacctgaaatatccacaagaaaatatatttcaaaaaccaaattgtatttattgtctattgttgcataaaaattgctccctaatatttagcatggtaagagaacacgtgtttgtgatcttgtcacttcggtgcatctggaattgagagcagcttagttttgtggttctggttctgggttggtcatgaagttgcagccaagctgtcaggccaggctgcattcagaggccagagcaggtggccaggcccagcctgaggggcttccactgtccctaacctgtttgtctgatgtggaaaatctcagaggaaaaggagagagtgaagtgtaaggcacctgtcccagtcccccttgtcaaaggccatcccatacctgcaccatttcttattctttcctggggcgtcataggcatagagcactgcccattcattctaacgctgtagagtattctgtagtaggattttagccatgcagcctctaatggttatcaccatgattttgatcttacaaatcacactgcagcaagcatccctgtgcagactcctttgagttcatgtgtgcatatcaccataggataaatttccagaagtggaattgctgggtcaaaaggatgtgcatttttaacttttatccattgttttcatattcccctccagttctaccagtttacaataccagccctaaatattgattggaattcattggtgaaagtgcaagtttgtgccaacctatcagatatacaaagttatcttgttacacatttatttttgatttctcctattttgcttgaggttgagcatttactcaaatatttcagtgctcattatgttttaggatttggtaaaccgtttcttcaatgcctcggtaagaggtattttagtctttgccatgcacaagacaacgttgggataatatgtatgttctgatacaccatctacaacgtaatcattaaaacatataaaaaccactatcagttctggggccattaaaaaaattggtggcaggccagggatgtcccacaggatgtggtttaacggtctctggtttctagggttatttgaagtttgaacattgcacccgcatatgttctatgtggagatctctttgtgagggacactgtaattcacctcctctaggggcctgaggtctttctttggataagaacctacctgtaccatgtgtttgattggatcttgtgtctgctcaagacagccctgtgtcacaagctcatgactttcatcttcatccatttgctctgttttgtgagagcttcagtatatcaggaatagagattcctccgaggtgaaaaattagaggcagagggaggggcaaatgggcaaggaagcttgcaccaagtcgggagtgatccagtgtaggctgagagaaaaaaggtcttaaaatcagccttgtagctgaaaccaaaaacacacaagatggttggtgttctgagcatcattaacaaatgataaatgaagttgaacttttaaatgtattgcaaatttttataaagcaagtagatcgttaaactcagaatgcaacaatggaataaagaagagagtttgagatgtttttaaaatttatttatttatttatttatttttgagatggagtctcactctgttgccaggctggagtgcagtggcacaatcgcggctcactgcaacatccacctcccgggttcaagaaattctcctgcctcagcctcccaagtagctgggattacaagctctcgccatcatgccaggctaatttttgtattttttgtagagacatggtttcacaatgttgaccaggatggtgtcaatctcctgacctcatgatccacccgtctcggcctcccaaagtgctgggattacaggcatgaactaccgtgcctggctgagtttgagattttaactgtaagtcctccaactaagttgccatgacaagaacagggatgatgagagtggaaatatgttatcctgcaaattatcgttttatgtaaaagaatattttccctcttttaggtaaaggaagcatcttctggagcaccttctctctgactatcaaagcaccattaagccacaaataaactgtaacatgaagtaggaaacaactgcccttttatataaccattgagaggtggctttatatgcataccaaaatgttgatgctcaatgctaaaattggatttagtaatttaatatgcctacaagaaattaattttctttggattatattatttctgtgtacgatttatcttagttaacttggaaatattctgctctaaaaacaactcttgttttttgggttatattttctgtatcaactatagctcttttccaaatgctgtcagagatagcccatggctactgatcacaaaattcaattttatggcatttaaattattctatactctaaattattttaaaagtgcacagatgtgaatttttcacatctgactcaaaaatgttgctgatgttgactcacttttttatttcaatcttattgaagtaggagtttacttttctggaacctggatgataacaggagactggagaggaaaccccccaaattgttttcctttaaaccctcaggatgaatcatcctggataatcacccacacttgatttgggtgatatctaaatgagagttgggtcttagagtaggtgctgagttagtttaggacttgcgctgttggaatgagttgaatgtttttacaagtgagaaagacatgagttttttggagtccagagggtggggggttattggctgaattaagtcccccaaaatgtatgcattgaagctgtaacacacaatatgtgactgaaattgtgcatagggtctttaaagaggtgactaagtgaaaatgaaaaaattagggtggattcttctcaaattggactgatgtcctcctaggaagaagaaatttgcacacacagaaatgaggcaccagaggtgagcgtgcagagaaaagaccaggtgaggattcagcaaggaggtagcaacctgcaagccaaggagagagtcctcaggggaaaccaaacccactaccacctttatcttgggttttccagcttcagaactgtgagaaaatatgtttctgccatttcggtcactaattctttcctatcttcttgtgggagctctagcaaaaacaagagggaccccaaagaccttggatgagggagaaggaggagatggagcagggtgcaggaggcggtgcaggaaggggctggaaggtcgggctctgaggtgcatctcctgggtggaatcttgactccactccctattgtctggaggacttgggaaaaacatttaacctcctaatattcactcactaataaagatgggcttgaagcacaaggctccccatcatcctattctatattacaaaagtcttcttgaggtaacacttgtaaaactctcgctaatgcatctggcatgtattatggactcataagtagcccttctgagtgatctagtgatgtgcagaaaatggcattcatgctgtgtgcaccagggggcactgtgaggtttagtctgaggcccctaatgagtccaagcccctagtaatgctcaagggcgaagagcctgactgttgcttcctatgaggccccttctagtgggtaaatctgaaaatgcacttggcccttcttctgatcttgagaaattactcagagaaggccatcaggctcagggctcagacaagaaccaggacaaatgttttagggaatggagaacagatttgcatccactgctcaccagagccacctaacgacgacacaagaataaaggaagtagatttgcatgaagagacttcccttcctatgataagagaggcctggaggttcctccttagctgtgggctcagaagcagagttctggggtgtctccaccatggcctggacccctctctggctcactctcctcactctttgcataggtgctgcctcccagggctcaaccccatattatcatgctagctgtgccaacctggccctgagcttcggctcaacacagggagtagtgtagggtgtgggactctaggcgtgaaacccttatcctcacctcttctgtcctcttttgcaggttctgtggtttcttctgagctgactcaggaccctgctgtgtctgtggccttgggacagacagtcaggatcacatgccaaggagacagcctcagaagctattatgcaagctggtaccagcagaagccaggacaggcccctgtacttgtcatctatggtaaaaacaaccggccctcagggatcccagaccgattctctggctccagctcaggaaacacagcttccttgaccatcactggggctcaggcggaagatgaggctgactattactgtaactcccgggacagcagtggtaaccatctcacattgacacagacagatggggaagtgagacagaaaccccttcactatctgtgtcatcctctctctccagccccagcaggactgtgaacaaagccataaacagggctggcccagttcacctgcatctgagacctccaggctgcctttccctccattcctccaggtaggctctgcagaaggtgggtcaggatgatgtgaggcttgaaggaccaggctgttctgctgttgtttagactgagtgtgccttgcctcaagatgacctgaatggaaggaccacaagaaggagatgggcagctgttgagtggtcatgatccctggagttcctcttgtgtggtgactggatctaacacaatgcctgtactttgtggcccaaatgccctggattattggtctgaactccccatgtttaactgagaccctcaagccccagctccatgcatcctgatgttctgaacaggaaagtcttttctagtgagcactgtggcatcccttggcatcccagcttcacacagcaattccccaccaaaaaatgcctttgagtgcaaagaacggcttcatgcaaagatgtgcctccttcagaatgtagttcaggagcaataactacctgatgccttaatcccaaagccatattttaatttagaatgaccttgaaatgccttctagctgagcagtcagttgtaacacattcccagtcacgcctcccacacttctttcctgacagtatgtcatgaaaccctactgcatggaatcctgcctcttagagtaggattccagggatctcaaaaattgtttagaaatgaacaaaaacagtctagttggaagagtatcaaagaggaggcagttgcacatgcagagaactctgaggtctgcaaatatacatgaactgatgagcacttgtgtgtaaagaaacacctccgaaagagaaaagaaccacgcaaagactcttgagggaacacctcacagagctcactcccacacacacccacccacgcactcacagacactcacacactacagtcacagaggaaaggcctgacttacagggcatgaggttgactcatcagaagagctttgcctcagtactggggaaaaagtcaccctagacaaaatgctgctcaggtctcaactatgaaagtgtaaaagcaaacagaaaactcaaactgtttttctgaacagtaaagtaactttactgaattcaacaataaaagacagaaatagagaatgaactgcaaaagaattctcaacccagcaggaaaaatgcacaatgccttcatcctgtcaatatttcctgcaaggtaaccagaaaatatatgctatatcaaacagagaagtgaatcaatcccaaatggcaataaaattgcacacatgatagaccttgtaggcaaggatatgaaagaaattcttataactctattctattctacttgttcttgaggatataagattgaaaaatcatattaagtggatacataaaacatataaagacagacgcaagttatactcttataaatgatccataatatgtctgcaataaaaaatacactgaatgagactgattgcagattggattctgtgaaagaatagatgagtgaacttgaagatatggcaatggcagctattcaagacgaagcacaaaagcgtaaacagagtatcagtgagttttaggacatcttcaactgcctaaattggtataatgaaagtcattaaaggaggtaagattggacagggaagagaaaaggcagaaaaacaatttaaaggaacaatgaccaaaatttcccaaattttgtgaaaactagaaacctcctattccaaaaagtttaacatgtcccaaagacacacacacacacacacacacacacagagagagagagagagagatagagagagagagagaaagagagaaagggagagagagagatacaggtgaacaacaaaatgacaagaacaaatttggtttttaaaaatttttttaattttagtggcttcatagtaggcatatatttttattgggtacacgagatgtttcaaaacaggcatgcaatgtgaaatagccacattatggaaaattcggtattcattcactcaagcacttatcctttgtagtataaactattcaattacactcttttagctttataaaatgtacagttaagttgttattgactatagtcatcctgttgtgctgtcaaatagtaggccttattgattatttctaactagttttttcttacccagtaaccatccccaggtaatagttgatttcttattagaagtaatgcaagcctaaatcagtggagttacatttagaaaatattaaatgaagaaacttactacccaaagcaatctacaaactcaatgcaattcctatcaaaataccaatgatattattcacagaaataaaaaatcctctaaaattggtataaaaccctaaaagacgctgaatagccaaagcaatactgagcaaaaagaacacagctgaagatatcacactactagaattaaaatatgctacaaactatagtaaccaaaacaggaagttattggcatgcaatcagacactgagaccaatataacaaaatagaaaacccgtaaataaatccatatatctatatatagctgactttcaacaaagatgtcaagaatgtacactgagaaaatggcacaattttcaataagtggtgctgagaaaactggatacccatctacagaacaatgaaactagacacttatcctctccacaaaaaaatatcaactaaaaatggattaaaggcccaaatataacaccccaaactataaaactactagaagggaacttaacataggggaagaacaaattctttaggacattgttctagataaaaaattatatggccaagacttcaaaagcacaggcaacaacaaataatagagatatgggacatcattaaactacaaagttcctgaaaagcaaaggaaacaatcaacagagtaaagacaacatgtagaatgagagaaaatatttgcaaactgttcacttgacaagggcctaacattcagtgtatgaaaattttaaaaaaactgaaataactcattagcataaaaaaactaataatatcattaaaaatgggccaagaatttgaagagacttttctcaatagaagatatacaaatggccaacaggcatacgagaaaaatgttgaacatcactaattagtgagggaatgagaatcaaaaccccagtgagatacaatctcaccctagctggaatggctatgatcaaaaagacaaaaaatgcaaagctggtgaaggtaggtgacttcacatttctctagtccgattctctgggaacaatgagagtgctctgtctttgctctccctctagtaactatttttcacacgcaaaaatatggaccctagtgggaaataatgcctaagaccaccaacaccttaatcatttgttcatcacactagaaatgaaactgttttccaaataatattaacatctatctgtgtctatcgccattgtgtcaatgtctgtgtgatcctataacatttagaaggcctagaagaatgcccttgctttttgcaatatgaaaatggccgatatcatagatgatatagatatagatagatagggggttgtattttgaaatgtatttctctaaaggacttctttcacttcaaatttgaaattattcttgttttaaatgtcacaaatgataaaccttatagaatgataacacaattgtatgtgttataaagtcacagggtctatcaaatgatgaaccaatcattcggtgttgaggttagtagtattttttttatttcgattctcactaaatgagaacacgttttgtattgaggggccatgccctaaccataccacatcgtggggttgctcagagactgtgaggttctgcccacactaagccagaaggagaattttattcctaagccaggatgagaattttattcctcacactgctctctgcacttgtttgtatcccataatatcccccaaaagtgagcatgagaagttcattttttaagctgcttgttcattctcttacatttaatacatgtaccaaaaattgtcttcatttttaaaataaaatgttatgctatcttgtaatctataaccctatagaataatcttgatccatacacttttgctatcacaagcagaacaagatccacttcctctctctgggataaatcccatgaccgctgctctttgagcattatttttcttaagttattttttaaacagaaatttatctgacttaccttaaccaaatgtcttttcaaagtaaccgcatttcttttaagtgaaaaattaaatagttaccttctgttatcaagaattatctgaatacaaaatatttattgtttcaactttagaaggaatgaaaaacatctacaggttactaatctaaaaatgcaggctctgggtttctatggtgttaacatgtcttccaaattttaagtaacaggtatttaaataacatgaactttgttttcaaacttagaaaatgtttcaaccttttggctgggcatggtggctcaagtctataatcccagcaatttggaaggacgagctgcgagttttgtctgatcccaggagctcaagaccagcctgggcaacatgatgaaactccatctctaccaaaagttataaaactttgccaggcatggtggcactgcctgtagtcccatctactcaagagactgagatgggaggattgctggagccagagaagttgaggctgcagaaggtaaactgtagaggctaaaacatgataaatatttaattcatcacttaaaagaaatgttggttacattgaaaagaaatttgattaatgtaattagatatatttctgtttaaaaaataattgaagtaagccctgttagcaccactgcattccagcctgggcaacagagcaaaacctgttaaagaaagaaagaaagaaagagaaggaaggatgaggaaggaaggaaggaaggaaggaaggaaggaaggaaggaaggaaggaacgaaggggaaagaaaaaaaggaagaagatatttcaagctttacagtaccagagccactctgtaatcaataagcaacaggaccaaaacagaaagagattctgtagaacagtctaaccagcgatacaattatacatttctgttcagatatcaaaaccattttcaatagtaaatatatggaatgaactccccacagagatcaagtaggatgtatgatgtgtgaatgaaattatgagttgagagtaggaaatttataaatttaatcaaacaaattaaagcattatgaggaagttgtactgctaatgtattacttggcaagctgttcagtggaacaccaagatattcttaaggaagttgcaaatatcttttaaaatgttatcattgaagtggatttttaaaaaatgaggacatgaatacctttacaaagtattcagggataaagagagaaaaataaatttagattgtgcatacatatataaaatttattttaaaagataagcttgtcttttttatcccttaaataaaaggagcagatatttaaattccttgtcttttattttaaaatttagaaaatgcttacagcttcccacactgaaatttatactaagacagataatctaatcaagggataacaaaatcaaaacagaattctcttgatgaatctattttcttgatttttaagtctcagtgtgtactctatagtaaaactatttataattgattctgctgtttgaaaatatttactgatcgtttatcttgcaccaagtgatctccagctctgaagataggtcagtgggaaaacatacaaagttgcccagcttcgttaaacttaaattctaatgaggaaaaaagaagtaattaatcagggactttaaaacaggagtgttgtgatatggcttggaattctaactgcttcctgtgcttgctgtgtggagactggattgaaaaatagggcgatagaagcttaaattcatatagaatatggctagcctgtattttgagggcccctgaaataagaatgtatagtagttctcattatttcctcaagaaatctgtgcagtagagctttggccttgggagggaagtactatagtcaccaagtggtgagggtgggaaggtgaatttgcaaataccacttggaatgagttcactttaaaggtaaagctggcaggattttcatacatgtcagatctgaaaaaatgtgtgtgcgtgtgtgtgtgtgtgttatagagagagagagagagagagagtgaaaaccagacagataccgagagagaacgacagatctgcagtgacagagagaattaaaagcggacaccacgaatattgagctcagaaactataaaatgggaggtgccattaaacagaatggggaagagcaagtttgaggagtatcagtggctccatgtggacttattgattttgacattcctaacagatgtccaaatggagaagtcagacagtgttgtgcgtagtctagtgttaaggtatcaaagaaaatatcaggaaatgagtgacacaaaaattagtaagaaagcaaagataagaaacattagtcaaagtcctgagtccagtggttatctaacacccaaaaagtagtaggccgggtgccgtggctcatgcctggaatcccagcactttggaaggccaaggcgggcagatctcctgaggtcgggagttcaaggccagcctgaccaatatggagaaaccctatctctactaaaaatacaaaattagccgggtgtggtggctcatgcctgtaataccagctactcaggaggctgaggcaggagaatcgcttgaagcagggaggtggagggtgtggtgagccgagattgcatcattgaactccagcctgggaaacaagagcaaaacttcatctcagaaagaaaaaaaagtgataaagacaagaagaaaccagcaaaaaagtactaggggtaattatcaaaaatgtcaaagggaaagtaggttaagtgttctggaattctctcaaagaaagttttgaaaaaaggagggaggaagagatcaactgctttcaatgctgctgatacataaattaagacaaaggctgaggaattatgcttcaattcatcatttaacgatatggatattgtttgtgctttgataagagcaattttcttggagtgagtaggtgagaaaccatattggagtggtttctcaaaggaatgcctgatctctggattcttaaggaaactttttattgaacagtggaggcacaaattggatttgttttaattccggggtcgggacacactctaaacatgtgcctctgcatgcctcgcttattacagctaggtatcctagtatctttcagtaacagaataatcacctgcaaaacccacacccatttaatagacacgctttacaaagactgatactagaagttgttggagaggatgtggttccacgtaatatcttatgagtcactgatgggcaagtaagctggtaaaatgtctttggaaaactcactatacctgctatactaaaacattcagataccaaacaccagaaattccatattgtaatatatttctatgagaaaaaaacaagagccctgtattaaaatatagattattattaaaaataatcacactgggtttcctgatttttttattagcaagtcagtctctgcctgattcaatagtacaacctctatctaatatatatatatagtgtttttaatcaaccactaagaaaaagtattatattttatatcaattctacattcagtgccgaaaccagcattttgtagattccagagatttgttgaataaataatgaataacttaaataagttaatatttatagtatccatatacaaataatacatcatctcagaatacaataataacgtttgttatgcagaaaatgatttcaatctcagttaaaaatattttgggcttaggagttactgtcatatatggatgctcacattgttttgtttatacgaaaatgtttgtagttaacgtacgtttttggtacttaagccttttgttcttgctgccatagcaaatagtgtgcctattaggaacaagaaccagaggtttacttcatcttaacagatttcttaataaaatacatgccatactgtttggtttaatgcataagcaaagagtcattcactccgccattgctacgtgtccctcctctaatacggctcctgaagatgttaccgatagcagaggactttgtgttcaacctaagcactttatagccctttcactttcaactaagtatgagataaaataattcagcaccaataaaacaaacacttcttaaatactgaccctttttttgagcctgtttcacgttacgcagcaagacagagtacacttctctttcccagcaaatcagtgttggcactacaccctctacactctgaaaacttgtattattggcttccttagaaacacaatttgagcttataatttagatgtcatcaaataatgtacaaaaatatgctacttccttccccttcacttctcttctcttctcttcttatcagataattgtcagttgttttttctctccaactcctttcctccgactacctgatttttaaaagactttctgcacatttccaatcttagtattgtagagacaaaatgtgtggtcaaactgcatatataggaagagctgaattatatgcaagcatttttaaatacacaattcctcctcagttttctgtgattatttcatataatcaaatgtcttccagatacacatcccaaacgagtggttgtcaagctctgctttgtggtctaatttcatcagaattatccaaaattcttatgataaatacagataaattgacataactccagatttatgaaatcaacatttccagaacccaggaatatgcattgaaaaagtgtattcctcagatgatgctgacatgatacgggatccgagtttacaatgcaaggaaaattaccttccttgcccttcagctgacccttgtatccagaggtcctcttcccctttcatattctgccctctctccttctgcacctttctcctttcctccctccagttctgctcatccagatcccaagccctcccccatggattccctaaacctcccaaatggtcagttgccactaaagttccctctgtctcatgaacaagttatgtgggcaaatgtaaaatttaagcttggaccaagctgactcaagagcggcaattacaaatttccctaaacccagaggggaccagcaaacacttgtagaagattagagatttcctgtgagtgcaaagggctcagagtgtcctgatgctgtagaccaaatcttactgtcccctccaattcatgtgttaaaatctaattccctatgtgatgggatttggaggtgaggccttggaaggtgattaagtgatgaaagcagagaacccgtgaaggggatcagtgtccctatcaaagggacggctgagaactcctcatcccttctgtcatgtgaggacacagtacaaagatggccgtctatgaaccaggaaggaagccctcaccagacacaaaatgtgctgaccactcactgctgactccagtgagtcagaggagcgcaggccacatacctgggtctctgcctccatgcctcccacagtgcccagggctgagagcagagtggcagctgctgactggggctgtgctggccacctgctctcttctacctcttgctcaagccatgctttcagccccatggctgaggccagtggctagagcaggtgccatgatgtcaggcagctccttaatgggctggtccttggcaggaccagggcaggggcaggagggctctgcagctgcctctagctccagttctgtccctgaagggggctcttcccctagtgctggcactggctcatcagctggtgctggaaggtcctggattgccgcacattgagcaggagatgaaaaagaagaaagagtcaccaatgtcagtcactttccactggaatttccacacacagaatcagcctcactgaattaaaggaattccagtccaaaaacactgcccccgcaaagtctccaaaactacaggccccccctcaccatgtgcctgtgcctggaggaactccagaggctccagcaggccaaggacaatgcacggatgtggcccggatgggatcaccagtgaggcctggcctcgtagggcctgcccagggctgtcctgtggtacctgggtgcgccttcggccagaggtgcctggggtgaggaatgagcctgcatcggcatcatgggaaaaggctgtcactctgggccctcctgaagcaggagcctcaagatatgcggatgcagcatgagaacatcttgctctcctgagcatctcccaccaagggaactggctgcgggactgtctctaggatgtgggtgcctggttaccagaattctaagttctgtgagggtatatcaccaaggaagtgaagtcacttctttaaggttccgtatcctcagccccttccttccataagacctactcagaaccccctgggctgctggctgctcaccctccccccaggccagatccttacctgtacacaggtaagtccacccagggcctgcttgtacacgtgctcctgatgtgcacctgggacctaggaatccacttagggcctgtgatccaacaggggcctaatgttgtttaaaagtaatttttattattcctacaggaaagaaaaggccttctagcaataagaagcacagtttcacatcaaaaacataaaaatgatcaaaatcttggggaagaaatgtatcaattttaatcactgaaatgttaacttttgataaatatttaagtttataaggaaaaataaaaccatgctgataaaaccacagttgtagggaatgctatagagtttctcctttgtggtttgaacacagaaaggtcccacctagttaggctcataattttctaccttaatcttcttgttcttatgattaatggaaaaaataccatgacaatgatggtgatgatggttcaagtacacactgaggtttagtgacagaaacatcaggtgctcccagttacagtgcagctgttcttattggggtgggaaaatcaatcttgtgttcagtatacacgggaagcaggagtacatgtggatatgaccacatttcactggacttatattttaaacagaagatctacagtttattcttcaaaaaataataacacttgccatgcaaagtatatatataagatgtctcaaataattgtacttacattgcatatgaaagtgatacattttgatatgctaggtaaataaagtaaattatttaactcatttacttcttccctttgtatttttaatgcgatgactagacattcagatttccatgaggctcacatcatattgtgaatgaacagtgctggtctgcaccccttcaggttacaggggctgaggagtgacctggtgcaggaagccccatctccatccataggacattggtgtgaacccagggagaggcgctggtgtaagagagatgagaacacaggtgtgaaccacctgcttgtgcaggggactgagccttcacataagttgacacttaaaaagccaccacaccccacccttgtcaacaggaaacccattcacatctccatcagccacacaatctccaagattcttcaaaaagtaataacaatagccatgcaaagtatatgatatatatcataaataattgtacttacattatatatgaaaatgatactctttttgatatgctaggtaaataaaatacattatttaaactcattgacttcttctctttgtatttataacatgacaactagacagtgggattcccatgaggctcacatcatattgtgattgaacaaggctggtctgcagggcttcaggttacaggggctgtggagtgacctggtgcaggaagccccgtctccttccataggacatcagtgtgaacccagggagaggcgctggtatgagagagatgagaacacaggtgtgaaccacctgcttgtgcaggggactgagccttcacttggagccaaagttttctttcccaggttcaatcctgaacaagagggccttctggacttctttttgttttcaggcttgtgccccttcaggtttggggctgtctggatcccagccaggggacactgaggaaatccaggagtctcacactgactgttctatttcatctgctggggccatcccaaactgctgtgtaccatttcctttcctggtgctcaaatagctgctccatgcccttgtcatggtttcagagatgaatctaggtgggaagacaggacagtgtatgttataatatttaaatggaagctgaatccattaatatttattttaatatgaaacattaaaagaattttgtcataagcaatgaggaaagaggaaaagatattcaagttattttgagaaaaaataaaaatgtatttatcaaatgtctgtgtgtcttcagtgtcgcagggttgagagcagccagctttaggttgccctgaggatgcgctcagatgggaaaaagcgagaaagcaggaaacgcgtctctgtgacctgacagataaatcacagtaatggaaataagtctttcaataattcaaacattcacaataaatatcactctgatgcacacagaaaggcctggtaacaaactttccctttgacctgctggctcatatccccatggatcacctgtgtgcagagtggactctctggtccccatttctcaggctgagaactagaggctgggaaggacaagtggcctgctcatgagtgggaagggcgggattgggagcagcagactcgggctcaggactctggccctggtcagtgctccttgttccctccacagggtccctcccacatgtgcccgtgtggatgtgggtgcactgcctggggtggctgatgtgctccagggattcaatgcggcagatgcttcagcaccaaaggtagggagtagggatgggacgaggctgcagctgtggagaccagggacccatgatgcccagcagaggtttccacggggtgggtagccccatttcctgacagtagagacagcctagaggtgggtgccaagcagagggcactgtgccatgtgcccaggcctggagggccacagagacacaggcgccacacagcagagacactgagagccaggagctcactcaggtaagggatgtcagcagatctttctctcctgagcaaatcaggtacaaaaaaattaagatcctgccatcagaatagacaaacagggactttaatctcctcggctgagccccgctgtccagggaagaagaagtctctgagcccaggcccaggtgagggtggagtgaggagaggagctcagggtgcagatttgcataaaggccccgccctcctctgaggcagaggggataagacagggctggggtcaggcccagtgctgggatctcaggaggcagctctctcggaatatctccaccatggcctgggctctgctcctcctcaccctcctcactcagggcacaggtgaggcctccagggaaggggcttcggggacctctgggctgatccttaactcctgctcctcaggctcacctgggcccagcactgacttactaaaatgtgtttcttcctttttccaggatcctgggctcagtctgccctgactcagcctccctccgtgtccgggtctcctggacagtcagtcaccatctcctgcactggaaccagcagtgacgttggtagttataaccgtgtctcctggtaccagcagcccccaggcacagcccccaaactcatgatttatgaggtcagtaatcggccctcaggggtccctgatcgcttctctgggtccaagtctggcaacacggcctccctgaccatctctgggctccaggctgaggacgaggctgattattactgcagcttatatacaagcagcagcactttccacagaggtccaagttcctggggaactgagaccaaaacctgccctgggctctcaggccccctccttgctctgaagatgcttcctcgcccagtgcaagcggcttcctgcagtgcggccttgagaattcttctctctcagctccttccctttccaccatgaattccaaaaggaaacccgctctgtggtttctcatccaggacagggacagcttcctgatgcttgtgcgctgtggtccctcaatgtgcagctcttcccagctcttcaaatgcagggacagtgacaaggagctgcctgagtggtgcagtcactgcttttttcagggatgtcttcaccctacatgcatcaccatcccctacactgtgggtagaattttagcaactacattctaatggttatcgccacaactttgatcttaaataacagtgcagcgaacatccctacgcagactcctttgagttcctgtgtgaatatgaccacaggattcatttctaaaagtgaaattgcaggtcagaaagattgtgtgtttgtaattttcacccattgttgtcagattcccctccagagggattgtaccaattttcaatgccagctggaagtacttgttcagagtacattgttgaaagtggaaatttttgccagcttatcagacagaaaaatgttaccttgttacagttttatttttgagtctcctgttctgcttacattttggccctttcagaaatagttcagtactttttctttttttaggatttagtaaactttataaaaaatatccagataaggagaattttagtgtttgtgggcaggcacagtggctcacacctgtaatcccaagcacttcgaaagagtaagacaggtgaattgcttgttcccaggagtttgagattagtctgggccacacagcaaaccctcatctctattaaattaatgcaaataaaaataaattttaaaaagaattattttagtctttgtggcccaagaatcaactttagggatattacataggtacttataacatcatttacaatgtaaccatttaaaaagataaaaatcactgttatctctgggccatgcaaaaacagttgtcaggccaggagtggccacaggatgtggttgaacggtccctggtttgcagagttatctgaatgttgaaaattccaccagcatatgatctaggtggggatctctctgtgagggtcactgtatttcacctcctgtattcggctgaggtctttccttggataagaacatgctcacatcatctatttgatgggctcatgggtttgcccaagacaaccctgtgtcacaatcacataacttttatctgcattgcttgttctgagttttgggagagctttaatatatcaggaatagactcctcctaagggaaaagtctgagggatatggatgggcaaggggtcaagaaagcttctaccaaagctggaatatccagggcaggctcagagagaaggatcctaatatcagcatttgactgaagccaaaaccagaagagaacatggacgttctgagaataataagtaaataaacagtttaaattttaaatgtattgaatattcttatactccatgaaaattctagaacggaatttaacaatgggataaggaagagagcttgagatgttaaactataaagaccacaaggcaagttgccaggaaaagaacaggacctttttagtggaaataggtttctgctgcaaattacctttcctatgaaattggtttttaggtataaggaaacatcccatggaacattcttctttcctacagtcaagatcaccctcaccccacaagggaacctcaatatcaaatagaaaaaataatgcactttgtataaccattaggagagtctttatttgcacatcaaaatgaggatggttaatggtaacattggaaatagtagtttaatatgcataagtgatgaatttcttttgactataccatttctgtctgtgatttatctttcttaatagggacatactctgttcttaaaacaatttaacttgtgttatcttttgttctattatctgtatcagctctgttttttttttcaaacactggcaaagttattccatggttaatgattattaaattcaatttatggatatttagattatttaaattatttcaagagtggacagatgtgatttccccacatatacctcacagatgttgctgatgctgacttgttcatctcttccaacctctgcaaacaaagtgggaaattggatttttctgaacacccagatgacaacgggagaggaggtgaaacccccctaaagctgttatcctttaacccctcatggtgaatctcccatccacacttgagttggatgatatgtaaatgagagtttggtcttagagttggtgctgagttagttcaggatttgggttattgggatggagtgaatgtgctttacaagtcaaaaactatgagtttttgtgtgcataggttggagagctcttggctgaattgtgtcccccagaattatacaatgaagttctaatgcacagtgtgtgactgaatttggagacagcctttacagaggtgattaagtgaaaatgaggtcatgagggtggcttcttctccaatctgactggtgttctgagaagagaaaatttgcacacatagaaatgagacactagagatgagcatgcggaggaaaaaccatgtgatgacacagcaaggaggtagccacctgcaagccgaggagagaggcctcagggaaaaccaaacccaccaacacctttatcttgactccccagcttcagaactgtgagaaaataagtgtctgctctttaggccagcaggtctttggtatctcattaaggtagcactagcaaatgaaaacaaaagggaccccaaagaccttgggtgccagagaaggaggagatggaggatggtgcaggaggcggggcagggaggggctggaagttcaggctctgaggtgcatctcttgggtgcaatcctgactccactcactgctgtctggggacttggggaagaatcattaacctcccaatattaattccataataaagattgggtcttgagcatagggctgctcatcctcctattccatatgatgcaaatcttcttgaggtcatgcttgtaaaacactcagcaatgtatctggcatacactatggcctcagaagtggttattctgaattttctagtgatacatagagaatggcattgttcctgtgggcagaggaggcactgtggaccttggtttgaggactcagaaagacaccaagtcctctggtagtgctcaagtgcgaagagcgtcacagatgcttcctcccaggccccttctattgggtaaaatttactctccactcctgacacccatctggtccttcttctgaccttagcacattatcagtttgaagacttaaggctcagggctcagatgggagctaggacaggcacactggggaatgcggagtagatttgcattcactgctcatcagggagcccacccaacaaggatacaagaataaaagaagtagatttgcatgaagagcctctccttcctatgataagagagggctgaaggtccctccccgctgtgggctcagagacagagctctggagcatctccaccgtggcctggacccctcccctgctcaccctcttcactctctgaactgcctcccagggctcagcccccaaaggaccagagatcagcctggacctgagcttcagctcagcacagggagtgatggagagtgtggggtctgggaatgaccctcatcctcataattacctcttctgtcctctcttataggctttgtggcttcccgtaagctgactccagagccagcagtgtctgtggacagtcagcaagggtaacctgccagggagaaaacctaagaagccatggtacaaactggtaccagcagaaccctgccagatgcctgtgcaggtcatacatggtaacaacaaccagccctcagggatcccagaccgattctctggctccaagtcaggaacacagccaccctgaccatcactggggctcaggttgaacatgaagctgactattaccgtcactcatgggacaacagtggtactcatctcacagtgacacagacagattggaaagtgagatctaaagaccttcactgtctgtatcaccctctttctccagccatagcaggactgagcagggctggcccgggtcacctggatcgaagcccttcaggctgcccttccctccagccctcccggcagactgcagagagtaggtcaggataggatttggggctggcagaaccaggctgtcctgctgttatttggaatggatgtaccttggctcaagatgacctgagtggaaggacagtaagagggagacagctactgagtgctcatggtcactgaatttcctcctgtgtgttgactgaacccaagacagtgcctctactctgtggcccaaataccctggattatttctctgaactgcccatgtttaactgagaccctcaagccccagctttgtgcatcctgatgttctgaacatggaagcctttcataatgtgcactgtgacatccttcagattcccatttcaggacttatgcacccaccatccacccagggctgcagggagttcctggcttctcacagctcttccccaccagaaactgccatgcagtacagagaatagctttgctcaaagaattgcccatttcaaaatgtgtttcatgggcagtgactccctgattgccttaatctgaaagtcatgctttaatttaagaccctgaatatcaaattgaagtgccttctagctgaacgctcaattgtaaaacattcccagtcacacactccacacttctttcctgagaatgtatcctgaaaccctactgcatggaatcctccctctcagagtaggattgcagggaactcaaaaattaaaaacaaacaaacaaaaaacagtctagagggaaaagtattgaagaggagagagagagtgcacaaggagacaactctgaagtctgcaaatattcatgcactgaagagcgcttgtgtgtacagaaactccctctgaaagagaaagacccttgagggaacactccaaagagcgcgcgcgcacgcgcgcgcacacacacacacacacacacacacacacattccagtcacagaggaaaggcctgagttatggggcatgaggtggactcatcagaagagcttcggctcagtattgaggaaaatgtcgccctagacatagggctactctgctctcaactaagaaagtgtagaagcaaactgagaaaagttaagacagtttccaagtaactttactgaatccaaaaataaaagacgaaaatagagaagaaaatgcaaaagaattataaactcaacaaagaaaacttcacaatgattggcattcaatcaacatttcctgcaaggaaaaaagaaaatatatgctctaacacagagaaaaatgaatcaatccaaagtggcaataaaattgtatacgtgatagatagaccttgtatgcaaaaattttggagcaattcttataactcttctccttgctcatgaggatagaggattgattgaaggtgttaagtgaagaaatggaaggcatgaagaaaaatccaagtttaacttttagaaatggtctctaaatatctgcattgaaaaaatgcactgaatgagaatgattgcaggttaggtgctgtgaaagaatagttgagtgaacttgaagacatggcaatggaagctattcaagatgaagtacaaaaaaagtgaagagagcaccagtgaatttcaggacatcttcaagctgacttacttggtataattaaaggcatgaaaggagataacattggtgaggggagaggaaaggtagaaaagccgtttaaaggaatcatggccaaaatttcccaaatttgttgaaagctagaaacctacaactccaaaaatcttaacaagttacacacacacacacacacgcaagtaatacaacaccaatactcatcataatgatattgctaaaaaactatgataaagacatacttttaaaagtagccatagagtaaagacatggtaggtacaggcgaacaacataagaagaagaacagatttcgttttctttgtaaaattttcttcaacatctgggggaacatagtagatatatgtatttgtggaatacatgagatattttgatacaggcatgcaatgtgaaacagtaacatcatggagaattgggtatccatcccctcaagcatttatcctttgtgttacaaactactcaattacagtattttaggtattttaaattgtacaattaagttgttatcgatgtgctatcaaatagtattgacataactctgatgcgctatcaaatagtaggtcttattcattctttctattttatttacccattaagcatccacaaataagagcagatttcttcttagaagtcatgcgagcaggaagctcgcatgtggagctatatttataaaatattaaaagaaaaaacttactacccaaacccatctccagaccatgaatttctctctggatatcttattaaaatattgtctcctatcaaatctctatcaaaataccaatgacattcacagaagcagaaaaaaaattctgtaactggtatggaaccacaaaagcccctgaatagccaagcaataccaaacaaaaaaccccaagatgaatatatcacattatctgaatcaaaatatactacaaattatggtaaccaaaacaggatcaatggtattggcataaaatcagacattgagactaataaaattgtatagaacacaccaaaataaattcatgtatttacatccaactgattttcagcataaattccaagaacatacattgagaaaaggacgcacttttcaataaatggtgctgagaaagtggatacccgtatacagaagaatggaactagacccttgtctctctccgtatacaacaatcaactcaaaatctattaaaaaccccaagtataagacccaaaactataaaacaactaggagggaacgtagaggacatagggaaagttcttcaggacattggtctagacaaaaattccatagctaagacttcaaaaacacaggcaacaacaaaaactagacatatgggacttcattaaactaaaaatcttctgaaaagcaaaggaaacaatcaacagagtgaagacaacttgtagaatgagagaaaatatttgcaaacaattcaactcaaaaggacctaagatccagtataagaaaataagacaaggagctgaaataactcatcagaatagaaaaccagtaatagcattaaaaagtgtacaaatgatatgaatagacttttcacagtcaaagacatacaaaaggccaataggttaattaaaaaatgcccaatatccctaatcaccggggcatgcaaatcaaaacctccatgagatatcatctcatcccagctaggacagctatcattaagaagacaaaaaaataacaaatgctggtgacgatgtagcaaaaatagaagacaaaaccacatggtcatctcagcagtcacatcaaatgttttcatgtaaggaaacattaccatttgctgtttttctagtcttgctagagcaccataaaagataagactagtggtgccaatactgtagaaaatgttattacatgcagagaatctcactatcccataccaaactacatggattcttactgttaaatgctaaaagattacaactctgcatttccaaatgttctggtggtcagagaccacttccttgacaagtgatgagtacggtgatgtgaaaggatagttagcatttacgcaggtattgggtgaagaatagtgatatacacaggaaagctttcaaagagagaaacacatggaggttggaacacagaagagaacataatatgtctgagaaataaagaaagtccagactcactggagctgagtgagaacaagaaaaacggcatgaaccatgtatttcactctggatatctcattaaaatattgtctcctccccaacacaccaccgatgtgaattgtaaaaatgcccgttcttaaattattttttgcacatcatgacagggtcaagcatgtgaatcaagctgagtttgatgagtccaggtctgtctgatgagtccagacccaggtggcctcagaaggacttggtggaacgagggcttgttgtcaaaagtagaggaagtgagattttccattgtggcttagacaagagattcttaaatttcagtggacacacaaggcccctgaggggtctcggtaagatgtagatgcagcctcagcagttctggatgtggccccaaattctctgtgtccagcaactcccaggtgaggctgctgctgctggtcctcccaggaccacactttgaatggcttagctcttattcacccacctcactcaagccacaggtaagactcacacaaggagagcatattctagaagcacaggtcacttctcactcctccccttgtgtcttagatccttttctgttacaacaaagaagtacccaaggctgggtaatttatagagaaaataaaaggtttatttggctcacaattccaatggccacagagttcaagatatggcatctgctcttgttgaagacctcaggctgcttctagtcatggtgaaaggtgaaggggagccagtgtaggcagaggtcaatgggggagaggaagcaagagagaagaggaagatgccaggctcttttaaataaccagctctttcggaaacagtgggaattcactcaccccaagtgaggacattaatctattcatgagagatccactcccatcaccctaaaagctcccattagttcccacctccaacactggggatccaatttcaacatgagatttggaggcgacaaagatcaaagccatagcaccctgaggtttggccacgcacttgctcatctccacatttgtccctcccctcatgactggggtcctgaccactctgactcagtctccctccacttcatggacacctggcagtcggtcatcatctgttttgctgaatcaacagcagtattgggggtattcaacattccacatttgtattgtttgaaaattgcccaatcttaggtgttttgttattgctacacaaacagactaagacatttactatttaatggttacatttcattctctttttatgaaattttgttgctaacagggactttctgcttggtcagaagattaacaattgtgtctcctggttccaccagaaacagagtagagacccacacagctgaggtatggggtcatagattaaaactaagagacataagattgattctcaggctccaagtctggcaagtgagcttctttgagactccctgggatctcagcagtcagactgatcattattgctgtcccaaacatcctatgtgatatggaagtaatatcaaaaccctcctgagattcctgacttgtgtcccgacatgaagtctgttgggattcctgtcattccttcaagattgttcaaataagcagcaacaatcactctcatatgagatatgaaaagaagaattccacatgaaccaaaccctgaagcccacactgaagtctgccaagttatctgcagtccagcgcgatggagggagcattttcgtggggacttttgagagtatggagaaggcctgaggaaacgaggctcagctatgggttccagaaacaaagctctgggatgtctccccatggcctcgacctctcacgtgctacctctcctcactctttgcacagatgctgccccaggctaagcccccacaggaccctaatcctagtcctgaccctgagctcagcccaggtgatatttcaggagatgggaccctgagaatgagccctaaagtctccttatcctgcagcccctgtggtctcttagactcagctacccccagtagagttggccatgagacacctgtcccccacctgctcaggagagagtgcagcaggcaacagtgcagagagaaccagcaggagccaggccaggcgctgcattcagagcagcccccaatccaacagattctccagctctagcctggggtacagcccccaccttctgcgggctgaagtgggcttctcaggatgggcaggccatgatggggattggcagtgtgtccatgggacacagccctactgcctgcctggccctcatgccccctccctccccatcctggttaagcaccaccccaacgggcccagtttcagaactcaggacacctgggccagctcctggacttgcccccactgctctctgttctcctgagccacttagtctcttttggcctcagtgttacctgctgtgaagtgaggagccttatactgaactgaggaagctctttcttcattcaaaattaaaagacagaaaaacaacgaaagtcatgcgaattaaagcctgatgaggggatgtcacttaatgggcttcaatgggcttcagacaaaacttcttgtctttcctctgcagggattccaagaaagggactcaaaaagagcttgctttctgtatggtgggaagagcagtccccagctgagaataagcaggagagtcccagtttaatcaggaagacagactagggtagtgtagaaatcctctcagcacaaactctgagaagtatggaatgaaataaagacaaacaagaaattaatggtgccgacggtggtgatgttagctcacagctaagctgcagaaccagaaacatgcggtgatgggctgagtctcctccaccagctgggggcagcagagctgcagccaggagctttcaggagagaggctggggctgcccagctggggcaaagagaaggccagcctggggttcaacaggtgtccaagaatctgtcttcagactgaaagtgagtgcagttcatcctatcccctcaggcttcagtgaccacgctctgagggtcagacacacggtgtcaccccaggacactgacagaagcctggcacagtgaaggcctcaccagggaaatgcagctggaggaggctgggcccagatgtgagcttgggcagcttcctcaggaaggggaatccctgggaggcgtcccaaggtcgaggtgctctaggagggggtatagtgtgaggtgatggggctcccagggcccgggttcttcacccaggatggcggcctgagcctcctgccactctcagggtgtcatccctcctggtccagcagtgtcctggggagctgagccctctgtcctgggcacttccagatacacccgacccctcctccctctgcctttccttccagctccaggcggactctgactcagggggcagctcctgtactcaggggagtctcgggtgggtgtggtggggcatttgggaccctggccctggatgggcatccccagcctccttcaggagacactcttcagagggacagggcttctcacctgcctcaggccacagctctgaccatggtgctgtccacgctcagtgacaggacactgagcaggggcctggctggagtaaccagggaccacccaatctctggagctcacatgctgtgcagagaccatgaccctgggacccttacagagaccatggacctaacgttagattctcagtccagtgtggttttctgctgctttttgcaagtttacataaaatattgatgagaaaaacatgaataaataacagacaagttgacggtgctgattgctaatctcttgtggcaatgaggggtgatgtagcaggagcagcaccacgactgaaatgagaccagatgccatgttgactccacaggggtgtgtggttgcttaaatgacccaaatattcccactgaataatcagcaagtgtcctaatgacacagcacagcatttagatgaaatgaacaagaggggactgagtctgagggaccaggaggaggaagatcatgggtccctgggccacctgctgctgagtcaggtgtcatcatgatctctccacagagcccagctcagccccatggccaacctcctggaaggtccacagctctgctgagcctggcccaggacagaccccaggtcagcgaggtttgggacagtggtcatgaggttaattcccacaaaggtctatgatcacagggcttgaaggctgcagctgattttctaaccagagaccctgcttgttcctcctgttgcctgtgctgccctcacagctggtttgagagacatctctccaggaagagccacagaggatgtaaatttgcataaacgcttaacactgactgcccccgaaagcctgagagggaataagagaggcctgcggagcccaactgttctgtgggtccaggaggcacagctctgggaatctcaccatggcctggatccctctcctgctccccctcctcactctctgcacaggtgctgaccccaggcccttccccaggctcagtccccacagattccaagttgagcctgacctgaatcctgagcaaagcccagacacagcctctgggtgggactcctggaaatgggtcctttgtcttcaagccccctctcttgttcttccttgcaggctctgaggcctcctatgagctgacacagccaccctcggtgtcagtgtccctaggacagatggccaggatcacctgctctggagaagcattgccaaaaaaatatgcttattggtaccagcagaagccaggccagttccctgtgctggtgatatataaagacagcgagaggccctcagggatccctgagcgattctctggctccagctcagggacaatagtcacattgaccatcagtggagtccaggcagaagacgaggctgactattactgtctatcagcagacagcagtggtacttatcccacagtgacacaaggagacagggaagtgaaacataaacccctccccctctatttcatccccttccttctgccccaggaggactgtggacaaagccatgagcaggcttggccaaattcacccaaatttgaacccccaggctgcccttccctccagccctccaggcaggcgctgcaaaggagtcagtctgcagtggatttgtgcctggcaggcctggcagtcctgtgtttctttgcctggggtttgagttgttgatggagggtctgactggaaagacagacacagggagacatccatgcaggcatgtccagagggatgtggggaactctcaggtctcagttcagtgcagtcattgttgtatcctctgggaaagcattcctccagtgcacctaagacctctagacccacagagcctgaggtcgggatgagagaatgtcaaatttttgctgatggatcactaaaggcatttttgagtggagccactacaatttactccttgattctggactcgtggatcctgactgtgggagaaacagcaccatctattgggcactgatgcacagcacatgccccatcctggaagacattgcccaaccctacacatacttgccacttgcctggtgcagtaatggagtctccatgcagtcattaaaccattcatataagccacatgtctcagaatgttggggacaagagtaagaatcttgaatgccaggagaaaaggcccatagccctttatttgcggtgaaacgagttccttggtcagaacctcctgtggaataccatcgtgatgggtgcatcattctgtaatccagagataacagttttggcagaagcattgctgtcaatgaaagcaaatcctctgtacatgccaatgctagtaaggaaaaagagctgtctctcccatgatggaagagctctaatgaaattaatatcaagcaggcccctggctgttttccacagagaaggtcatcctatagggatgcctgtgttggtctctgctgttgacagattgtcacccagcagtggcttcagccaggccagctccagttagtggaaattcacattgatgagcccattatcagcctctatccctgccaccatggccacatttttttggagtctgttggacaatgacaggagtggttgacggaggctgcctggtgtccatagaacaggtcaccctactcacctgattagcaaaatcacttcattttcacagaagacttagtgagtatttatatatggaaaaaaattctcatgctttttgcccactggaggaggtctactcacacatctctccccctgacatatttgtgatcagtattcctgttgtatctctcccaagttcctgaacatccttgaccatattccaggaccctgagtcacagcccatgaattaggaacctctgcccatctctttgcaggtgacatgagccaattacactgcttaaaattctgctttaaggagaatgttcttccaccactgctgttcagggattctcagaggccaggtggagtactagcaccgttcacaccagtggtggatgcatgtcctgcagaaacatctgtaaccccagcctaattgcctcctactaggcagctgatctcagggagccactctggaggccaaggctgtagggtgagaggaaggcatggtgcagggcttgggtcatgtctgtttggccaactcttcacgcaacttacttggccctcgtaacctaatccctcaagtcacaaatacatccctgccgtgtgattggggagctgcctaaaatggccacccgggactgtgtttcagacgaaatccagcatatcagcaacttgagtctcgtggtgagctctgtggccacaatcacacagagcctctgccaaggctcaggagccctcgcagtctttctcaaatggtgttttctgctcattcaaaacaaaataagtaggggggggggctgctcacgtgcttccagtctgggacactaggaccacctaaaccacacccacgatcttgtctgattattttgattccttgttggctcagttatgcattatggcaaccaaaccacagtgtcattggccataaaatgccaatccttggtccccacctaccctgggatcccctcaaccacatcttgctacccagttaaggtttcagcaacactgagaaaaatgtatttttatattgagagaggaaacattctttcaattgtgaaaaatttataaggcaggaatgtgaaaatattttaaaagacattttacaaagggtgaaagaccctccattaaaccactcaatatatgacactgtaattggcctcccaaaccctgacttcagctctgggttgggaccttctgtaaaggggcctttcatcctcaagccctcctctcctctcctctcctctcctctcctctcctctcctctcctctcctctcctctgctctcctctcctctcagcctgtgcctcctacatacagagacagctgctctcagtcttggtggccctgagactgacaaccatgatcacatgctctggagataaactcaggataaacatacacttaggaaccagcagatgccaggccaggcctcggtgcttgtaatctggtataacagcaagtgaccctcagggacctctgcccaattcttaggctccaaatcaaggaacatggccaccatgaccattagtggggcccaggcccgcgacaaggctgactattactatactgcagataataacagtgggagcagctggcagggactcatagtaacacagagagatagggactagccacagtactgtcccacctcggcctgcctctcattctcacctgccctctgagcagctataggtcaggcctcagggtcaggtgtcctctctggtcttaacctggcccctgaggggctggaggttctgagcagcttctccatcctctcagggcctgcatgtgtccaatgagaagtggacagggtgaaggtggtcagagctgccaggacctttgtcaggtttgtggtgtacatgaacagtttaggaatccacacaaaagcacatggtcccagttgtaatcatacgtcatgcaggggaggagagagctgtcgcagagggcacagtcctgcagaatttctcctttccttgggtaaaaccagctcagtggaagccccaggggctgtgtctcctctggtttccagatgagttgacccccacattctaataggttgcctgatgcctgacaaggactggagacccagccccttttggcctcagggccctttctgtactgatatttctcagaaactgaagaggaagcacagacactacctttggtcccacctgggaactgtgtttggggcacactgacctcccatggcccccaaagtcccatcaccttccccaggtaggtcagtcctgactggatgtgcccccagcgccctgatagtttggagtttatctttgggctctgggctgctttctgaggagctcactaagaaacccttgatgccaggcccaggacctgcgcctctgctgcatgtcccagggctgcaggtgtgaagggagggtcctgctgggtgagggtgatgcccttttccaggagagatgtctgattccagtctctagggccacatttattgggctttcttttctcactaggatgtctcagtctttttatttccttctttaaaagtacaactggtttagggtgacctgctcgggtccccttccacattgtagaagctttgttatttcactcttcacaaaaaatctcgctgctgctcactctttgggtccatgccaccttaaaaaaaaagtacaactggtttaatcatgaaatcatgtgtacacactgaagtttacagattattgccatcagcatatatatatatatatatatatatatatatatatatatactgtttctggttgggacaactgtggacaaggccatactggggtctctgtctctctcgttatcacaagtgaggatactaacagctctcttttatgcagactgtggtcatgtttcccagttgcacacgaatgtctcttatggttgtttagtttccttaccagccaagacccttaagttttcatgcagacaattggatgttatttctctctgacccaacatttttcaaacagtattccttggaacccaacaaaagttccacaagaaaagctcaagtctctggtgcacagttggaccaggttcattgtgtgcagtaggaccttgctcaagtgatgggtccatttgatattttcactatcaaggggaagggtgttacgacttttgggcactgagttgatagagggaagatagcagctgatgatggccctacccaccaatgtgtgtgtgggcagtacctattgatggatttagaagttgagggaactgtttattctgcagatggaatttccagtactgaatctccagcacccagccactagcattcagcaggtgctctgtaagaagaccttcactgccaatcacagccattacacaggtgaaggagaggatgacttttaacagccactgactcacagtaaactgaggtagaaattcagcttcacaaagtgactttgagggaacagactgaggaagcaggttaattattcgctgaaggctttgcccagagcaggaacaatacagggttgatgaggacgtagggatgccctggtgtggaaggaacaaggcctgaaccaggagcaggaagaagcatgggaaagaccacgctgccacatgtgatgagtcagcacatggaaggcacagcaaatgttgcgcaaaggtttttgtgtaataacctggcaaacagctgcttctctatccagattcatgagccaaaaaatgttactgatgcattgctgtcacatgttaaaatgctgggaagcatggtgacattcaaggaaacctgttctctgcaaacacctacccaccggcacaggagacaccccagctatgccaagggctttgtcttcctctggagtaagagcctgggaacaatcaggtggcccctgaaaggggtgccgcgtcttctgctctgcatggctgagttaattggggaactcccagagaacattccagaaaacagtcaacctgtctgtgctgggtgcattgagcatgacccaggatcaatggaagagacagaagcttaatttccttatggctgcaaggtgagcactgggaggacggctgaggcaggttagccaccgcccctgagtggcttcagccccaggcaaacagggacaggtgaagggcctatctgagcgcacctgtatctaaccagtcccagcatcagcaactgcatcctgtggaccacgagggggtgtgtgtgcccagcccctcacagatcacctgagcataaacaggaaattctccaccttacacccgactgcacaacacatctgcctccagctcttcatttacaaggtgatatcacatcagacagggactgatctgggtcccagatccctcaggtttccgctatcctttccagtccccacacagagcagactcttcactgcagggtgttgagccagctcttcccctcacaatgcctgttacaggtttacaagttactgttctccaatatgattggggtttgtttcactgtttctctatatatatatatttgcattttcttgggtaagctgagccccttgtacctggtcttgagtcaggcaggggccacacagagaagaggacttcctcccctggcaccagccgtccacagatcagggcatcaaggacctgagcagcaggttctgaatccacacctagaccccggaagtccctgagctcccagccgacagtgtggagcagccaccagggggaagcagagaatcaactggcaaagcgacctggggatggggcaggcctgggtgatagggagatgctgacatgcagtaagagccagtgaccaccacctcagatttagagggaaagggtctttattgtcctagagtattgtccttgacactgatgtaaaaattctagaatcacattttgtcttcagctcttttgcatgctgactctttgtctgacacagatccaggcacttgacttctcacaacgccccctcctccacacccagttgtgctaaaactgcatccccctcatgtgcagtgtcctctctgaggtcacaggtatccccctactcccatttgatctgggaacccctgtcctgcagacatagtggctggcttctaacttcctagctgcccctccacatccaccgtccctggtctttcccgactctctcctggggaagctgccaaatcacagctcttgatttcctggtgagtcacaaaatagttgctcattaacctttagttgacttaagttcttatccattgatacattttccccagcaactggagacatcatatttataataaacattcacttctggggatcttggagtttgcagccccctctcattctctcatggagcaaacatttccttcacctcctcatctgtccctggtcctgacagcatcctggagatactgaggcacagcagcaatgacctacctagaagctcacagccaaggcagaaacttccagcatctcatggatcttccaacactctgtgcgcacttggcaaataaggaatttcattgacctctatcactcagaggttgtgggctgtggtgggacccgcacctgtccaaggtgtgcattatcacctgtacagtggagacgaagagggaacttgcattgggttctggaaagtactgtctaaaaatagatttagacctacaccagaaatgtcctctctaacataaaatatttatgataggacacattagaggcctagaccaaaatgaaatacctccctccagagccaagatagaatggaggaggggactggggaccccagataattccacagttaccagcatgactctatggtcacctcccagaccaggtcaaaacccatcccataggagggacttcatattcctttgtaaatacagacaaagtcacctctgagctctgctgtgaccaagggagcccaggagtgaggctgagcacagtgtgatgtggggatgtgtgcagagaatatggaatcaattcataaaggagatcctgtgggcaaagggtgggagggcaaggtcacccctaacctctttgggtcccttggggctgtgcccttctcgaaatcacaaggctcctccagcagcagcccctgactctgctgattggcatcatggacccttctctccaacaaggggttgagagacctgggaggagcctgcccagcctcagacttgagaagcagcattggaggcacttcagccatggcctggcccctcttttccttggtctcctgactcactgcacaggtgctgcccccagggtctcacccacctgcccagccccaggcctccaggttcagcctggccgtcagtctgagctcagcagggccctgtgtgtggtgggcaggatgctcgtgaccctgctgcagggggaggggctggttggggtgaaatgcccccactctgtgctcctgtgctcataggtgccctgagagctcttttattcctggggctcactccagccctggcaagtagccagatatccttgggttgagaccctcagtttcaagttttttctgtccccttttctttccttgtaggctctgtcacctatgagctgacacagtcaccctcagcgtcagtggccccaggacagatgaccaggatcacctgtggggaaagcagtattggaagtaaaagtgctcaatggtaccagcagaagccagccaggcccgtgtgtgggtcatctatggggatagcgggcggccttcagggatctctgagagattctctggctccaacttggggaacgtggccaccctgaccatcaacaggacccagggtggggacaaggctattactgtaagatgtgggacattagcactcctcatcccacagtgacacagggagatgaaggagcaaaacacaaaaacctcttccattggtgtcactcttgtcctccagcccaggaagacagtggacaaagccatgagtgtgtgttgcccagttaacctggatgtgagacccccaggctgccctttccacaggccctccaggcaggctctgcagagggggcatcaagagtgaatttagggctgagatgaccaggatatattgaggtgtggaggaatcagttgtgatttggggaagtggggcctggttggaagatcagaccaaggtcgacatgcttagttgggctctggatttccatagggggtgaaggctagtccttgggctgaatatcctgagtcagtttccagaactgcccagctcacgttcccgtggcatcctgccattctcttcaggaaaaccagtggagtggacactgtgggatccacccatattccctcttctgagctcacccacccagcactgctggtagctctggcagctcagagctgtgccctcactgagaagggctgtcagcagagaaaactgtctcctccaggtttatgccccttcttagcaaggtgtggtttcataactgcctgaggtgaagctctcaagactccctttcaatatgggagaaacagaaaatcctcccagcttcacagctccttattgggatggtagaagactcaatgtgggtcagagtgtccttgtgcccggtgttgcctccctcacttagtttcacacctactgtgaaagcaaagctccatctcagagtctgcttccaggcatcccaaaataacataaccagtcatcccgaacgtgagccatcaggaacctcaggaggccacagtataccagaaagcaccagtttattcctaatgatcattgtgagtttgcaaatgcccaatgagatctgagtgtttcttgcatttgtatggaatgaaaagggccctggcatgccaggcactgtggggtctgagggagagttggagtcagatctccctgcagggaaacctggggcaggaggagcagcctcatcccatgcagggaccacagatgcacctgcagggtgagctgcaggatggacactgcccacctccaccctccacattctgtgcaaaaaatcattctttccacccctccttcagcctatcaaagttgacacttaaaaagccaccacagcccacccttgtcaacaggaaacccattcacatctccatcagccacacaatctccacataaagattcttcaaaaaataataacacttgccatgcaaagtatatatataagatgtctcaaataattgtacttagattgcatatgaaagtgatactattttgatatgctaggtaaataaagtaaattatttaactcatttacttcttccctttgtatttttaatgcgatgactagacattcagatttccatgaggctcacatcatattgtgaatgaacagtgctggtctgcaccccttcaggttacagtggctgaggagtgacctggtgcaggaagccccatctccatccataggacattggtgtgaacccagggagaggcgctggtgtaagagagatgagaacacaggtgtgaaccacctgcttgtgcaggggactgagccttcactttgagccaaacaagcttcttttcctatcttcaatcctgagcaagaggactttccggacttctttttgttttcaggtttgtgcccctccaggcctgaggctgtctggatcccagccaggggacacagaggaaatccagaagtctcacaccgaccctgttgtatttcatctgctggggccatcccaaactgctgcgtaccatttcctttcctggtgctcaaatagctgctctatgcacttgtcatggtttcagagatgactctaggtgggaagacaggataatgtatgttattatatttaaaaggaacttaaattcattaatatttattttaatatgaatcattaaaaaaatttgtcataggcaatggggaaggaggaaaagatattaaaattattttgaggaaaaaaccaaaattgtatttctcgaatgtctgagtgtcttcagtgtctcagggttgacagcggtcagctttaggttgtcctgaggatgtactccattgggggaaagcaagaaagcatgaaacacacatctctgtgacctgacacataaatcacagtaaaatggaagtaaatcttttaataaatcaaacactcacaataaatatcactctggtgaacacagaaatgcctgttaacaaactttccctttcccctgctggctcatatccccatggatcacctgtgtgcagagtggactctgtggtccccatttctcaggctgagaaccagaggctgggaaggacaagtcacctgcttgtgagtggcaggggaaggattgggagcagtggactcggtctcaggactgcggccctcaggaccaatgccacctagcagaggtttccacggggcgggctgccccatttcctgacagtagggacaacctggaggtgggtgccaagcagagggcactgcagggtgtgcccaggcctggagggtcacagagacacaggcaccacacagcagagacactgagggccagaagatcactcaggtaagggacttcagcagatctttctcctgagcaaatcaggtacaaaaaaattaagatcctgccatcagaatagataaacaaggactttaatctcagctgagctccactatccaaggaagcagaagcctctgagcccaggcccaggtgagggtggggtgaagggaggagctcaaggtggagatttgcatgcaggccccaccctcctctttggcagaggagataagacagggctgggggcaggcccagtgctggggtctcaggaggcagcgctctcaggacatctccaccatggcctgggctctgctgctcctcaccctcctcactcagggcacaggtgacgcctccagggaaggggcttcagggacctctgggctgatccttggtctcctgctcctcaggctcaccggggcccagcactgactcactggcatgtgtttctccctctttccagggtcctgggcccagtctgccctgactcagcctgcctccgtgtctgggtctcctggacagtcgatcaccatctcctgcactggaaccagcagtgacgttggtggttataactatgtctcctggtaccaacagcacccaggcaaagcccccaaactcatgatttatgaggtcagtaatcggccctcaggggtttctaatcgcttctctggctccaagtctggcaacacggcctccctgaccatctctgggctccaggctgaggacgaggctgattattactgcagctcatatacaagcagcagcactctccacagtggtccaagttcctggggaactgagaccaaaacctgccctgggctctcaggccccctccttgctctgaagatgcttcctcacccagtgcaagcggcttcctgcagtgcggccttgagaattcttctctctcagctccttccctttccaccatgaattccaaaaggaaacccgctctgtggtttctcatccaggacagggacagcttcctgatgcttgtgtgccgtggtccctgaatgtgcaactcttgttagctcttcaaatgcagggacagtgacaaggagcttcctgattgatgcagtcactgcttttttcagggatgtcttcaccctacatgcatcaccatctcccacactgtgggtagaattttagcaactacattctgatggttatcgccacaactttgatcttaaataacaatgcagcgaacatccctgtgcagcctcctttgagttcctgtgtgaatatgaccacaggattcatttctaaaagtgaaattgagggtcagaaagatgtgtgtgtgtaattttcacccgttgttgtcagattcccctccagagggattctaccaattttcaatgccagccggaagtacttgttcagagtacattgttgaaagtggaagtttttgccaacctgtcagactcaaaaatgatacctgttatggttttatttttgagtctcctgttctgcttaagtttgggccttttcagaaatagttcagtactttttcttttttaggatttgggaaactttttcttaaatatccagataagaagaattttaatcttcgtggccggacaccgtggctcacgcctgtaatcccaagtgtgttggaagggtaggatgggtcaattgcttgctcccaggagttgagattagtccgggccacacagtgaactctcatctctattaaattaaagaacataaaaataaattttaaaaggaagtattttagtctttgtggctcaagaatcaactttggggatattccataggtatgtatagcatcatttacaatgtaaccatttaaaatgataaaagccactgtcagctctaggccatacaaaaacaggtgtcaggccagggatggccacaggatgtggttgaacagtccctggtttgtagggttatctgagggttgaaaattccaccagaatatgatctaggtgggaatctctctgtgagggtcactgtatttcacctcctgtattagcctgaggtctttcattggataagaacatgctcacatcatctatttgattgtatcatgggtttaagacaaccccgtgtcacaatcacataacatttatctgcattgcttgctccgagttttgggagagctttaatttatcaggaatagactcctcctaaggcaaaagtctgagagagagggatgggcatgtgggcaagatagtttgtaccaaagctggaatatccagggcaggctcagagagaaggttactaatatcagcatttgactgcagccaaaaacagaagagaacatggaggttctgagaatgacaaataaacaaatagtttaagttttaaatgtattgaatgtttttataatccatgaaaattctagaacagaatttaacaatgggataaggaagagagcttgagatgttaaaactataaagaccccaagccaagctgccaggaaaagaacaggatctttttggtggaaatatgtttctgctgcaaattattattttatgtgtgtgtgtgtgtgtgtgtgtgtgtgtgtgtgtgtgtgtgtgtgtgtgtaaggaaacctcccatggaacatccttcttccctacagtcaagatcaccctcaccctacaagggaacctaaacaaaatgtcaatatcaaatagaaaaaaataatgcactttgtataaccattagagagtctctatttgcacatcaaaatgtggatgcttaacgttaacattggaaatagtattttaatatgcatatgagatgaattttctttagactatttttgtgaattatctttcttaataaggacatactcttctcttagaacaatttaacttgtgatattttttctattttctgtatcagttctgttttttctaaacactggcaaagatatcctatggctactgattaataaattagattaatgtgtatttaacttaggtaagttagttcaagagtggacagatgtgatttccccacatatcctatggctactgattaataaattcaattaatgggtatttaacttaggtaagttagttcaagagtggacagatgtgatttccccacatatcctatggctactgattaataaattcaattaatgggtatttaacttaggtaagttagttcaagagtggacagatgtgatttctccacatatacctcacagatgttgctggtgcttactcactcttctcttctaatcttagcaaataaagtgggaaatttgacattcctaaacacccagatgacaacaggagagaggaggtgaagccccaaagctgttattctttaaatcctcaggatgaatcaccctggagaatcacccacacttcagttggatgatacgcaaatgagagtttggtcttagagtggtgctgagttagttcaggatttgggtcactgggatggggtgaatgtgttttacaagtgaaaaatacatgagttttggggtctgcagggtagagagttcttggctgaattgtgtcccccagatctgggttgagtgacatcccaccaagaggagtccaggagaagtaaatttgtgtaaacaccaaacatgcactgccccactaggcctgagaggaaataagcgaggcctgggaagcccacctgtgctttgggttcaggaggcagagctctgggtgtcttaccatggcctggaccccctctctgcctctccttcctcaccctctacaaaggtgatgcccccaaccctgccttaggctcagcccttacaggatcctgagctggtcctgccctgaaccctgagctcagcctaggcatagcctcagggtgacaccactggaaatgtgtttgttatcttcaagccccctctcctttcctctcctgcaggctctgtggcctcctatgagctgacacagccacccgcggtgtcagtgtccccaggacagacagccaggatcagctgctctggagatgtactgagggataattatgctgactggtacccgcaaaagccaggccaggcccctgtgctggtgatatataaagatggtgagcggccctctggaatccctgagcgattctctgggtccacctcagggaacacaaccgccctgaccattagcagggtcctgaccaaaggcggggctgactattactgtttttctggtgattagaacaatctcacagtgacacaggcagatggggaagtgagacacaaatccatttttcatctgtctcatcttttcctccagcaccaggatgactgtgggccaagccatgagcaggtctggccaagttctactggatatgagacctccaggccatccttttgttcagccctacaggttggtgctgcagagggtagagcaggagtggatttagggctgctataatcagaattttcttgtgttttcaggcccctgaagtgacttggggaaataagaacgggatggaagatgagagagatgtagagaacaatcacttggccttagatttccatacgatggtgattgggtcactccttccaaatatcttacatcagtccccaaaaatgcccagctcagctcaacacctgagcttccaggcttccatggcagcctgggattttgaacaggaaaagcagaggaacaggaaaagcactgtggcatctgcctagatatgcttttctgagctcacccaccctcaactgctgggagcttctagaagcttagagctgtgccctcacaggaaagtgctattgtttccagaaaacttcctttctcatatttaggctcagttttgagagttttggtttgatgactgcctgagccaagaacccaaggccccgccttaatacaggatgacactgaaaggccttccagctccagacctcccattgtggatgcctgaggcctcagttgcaatcttatgatgggtcagggtctccttctggtgggtgatgcttctctcactcctttcagattctctgtgcatgaaaatgtttatctcaaagtctactttcagggaacccaaactaagacggccagctgtcaccaaaatgagccaccatagacctgaggtggccactataccctggaatgcatcagcgaatttcctaaatttccactgtgagcatccaaatgcccaacgatttctgagagatccttgtattcttataaaatgaaaagggatcctgaaatgccaggtgctctgagtcctgaaggagaggtggaggcagatcttcctgcaaggattccacggaaaagggagcagcctcactccatgcagggaccagagatgctcccacgggggcagctgtaggatggatgctgcccacctccatcctgcacatcctgcacaaacaatcactctttcacccctccttcagcttatcaaagttgacacttacgaagccagcacagctcatccttgtcagactccttcaaacctccatcaaccacacaatctcaacataaagaatctccccaaaataataatagtaacaaaataataataataataaaataatagtaacaaaatagtaatagtaatagtaatagattttcaggcacagaaatagtaatatagtagctatgaaaacttctataaaaatctcataaataattttagattgtgtgcatgtgtaaatattatttttcacactttgtgttaaataaagtatattattgaacctagtttacctttttattttttatgtctactatggtgactagacaataggattcacatgagactcacatcatgttgtgattgtacaatgctgatctggtcttaccccttcacatgacaggtgctttggagtaacctgcttcagcaagccccatctccacccataggacatatgtgtgaagccacggagaggcactggtggaagagaaataagaatatgggtgtggaccagctgtttatgcaggtgactgagtgctggagccctgaccctgctctaacctagatgtgtcacatccatctcaccagagaccactcctggcctgcctgagctcacaactggggggaaatcgcatttctggcaacatggtcacttgatgtccagtgttatcctgtctctcccagggcccagtaagacaaaagaagctgtttttagaaaggggagtaacactctactgcacatgacatggccttcttccaaaaacccaggagtctacattgggattctccaacggggtttgccatgtgcaggaggttttatttcccatggtggagtctgctggattctctggccccaacagcaggacactcacaaccctgcctgcacctgctgcagagccttcctgctctgggcctggaaaacaatgggtgacatttatggctcctgatacatggattggagtcacatccccagtagtaaaatatgctactcctagatcttataggccttgtgtctctttcttcctggggaaaattgaaggttataataacatcttttttttttttttttttttttaagatggagtctcgctctgtagcccaggctggagtgcagtggcccgatcttggctcactgcaagctccacctcccagattcacaccgttctcctgcctcagcctccctagtagctgggactacaggcacgcgccaccgcacccggctaatttttttgtatttttttattttagtagagatgagttttcaccgtgttagccaggatggtctcaatctcctgacctcgtgatctgcccgcttcggcctcccaaagtgctgggattacaggtgtgagccaccgcgctcggccataacgtgttgtttattttgtaggagactctcagctgctccagacaactaaagtcccaatttcagctaatatggaggaggaaacatctttgtttatttcccactctcaaaagtgcatggatctcacaaaagcttccaataggccgtgcccatcatgtacatgtgattgaactatgatatccagatggtctgagcccccatgatgatatcatgatagggaagggagagctaatgaagctgggcagaaaaagtgtgaatgtatactgttgtccattccacgtgaatgcacactgattctgatcctattctctgaggacaatagacaagacctcagtatctgcttcagtggtttaactgtgcacctgcagccatagcattctgttccaggagatccccatctggcacagatattgctaatgccactattgcccatctgggtctgtacaaatccaaattcatcttccaggatcattcaactattgtagagatcagtccagtaaactgaaagtgaggaccccagaagtaatcacacgtactgcaggagaggagagagctgtttcagaggccacaatcctgttgaaattcctctgctccttgggaagaaacagcccagaaaaggccccaggggctgcgtctcatctgggttcctggatgaggcacaccccctactgcactgagattccacagaagctgggggtgaagtgcaaacaccgtctttggttcatccttgggattttctttttatcacacactcgtcattttgtccacaatgtccaaagtttctaaagtgctgtctaatagatagaggttctttgtgcgctgaactaaaagctcttgggttggctaatggtgatgtttgcacatttttactgtacttactgccgcttaattacacacttaaaaatgattaaaaggatgaaacattttgttatgtttattttaccataataaaaatattgcatgctcaggaagcaaagtaatactagtttaattttgaaatcacacaactggtaaaaatggaaagaaaagcaccattttctctgttctatatgctacaactcaactttctctctctctctctttctctaattaacaatgatatcctgtctggtccaaggtcacacatttccagtgttgcaggaatgtctgttgaatctgctaatttgttgccaggaagaatactcaaacttctcatgctcatatttgattgtcaactgtctccagccaacatttctaaaccaggatcctttgacaagacttgtgaagaattttgtaaaaagtaccccccaagatgacagtgttcgctgttggcagcaggactgtttccacgcagtagggctatgctgggtgtgcagtggagctgtgcacactgtgctcacggggcagattctgtgctgctgactctgatccctgtgcttgggaggaccgtgtccactgctgagtctacatctgaatttgattctcaagaaaaaggtcattcatagctgctggacactgagtcacacagagagacagaaggtggctgaggacaccttatctctgatgagaataaggggattagatctgctggtggaacaggaagctgaagaaacttctggctctaaacatggaatttccagccctctgtctctgctgtccatgcccttctcatctgtatgttcctgggagatgtggaccacgggggtcagaggtgaaggggattgggaagctttcatgttctctctcaccatctcccttgtttatctaacacactcttacacacctactttattagagcttctgctctacaaacatggctgagctctaaattagagacttttgaaagtgcagacggatgcaggaactcgtccatctggagactttccaccacttgaagcagtgaacacatctctgcaaggctccaaatttcaagtgacaggattttgggatttcaaagaaaactaaatctttggtgaaccacgacagaagagggaaggttcacacatttccctgctgcttgggcctcagtgaggactgactcagccagtctcaggctcctggaaacctcctaggagatgtgcactaggaaagtcttttcagtacaacctggggcaggtaagtggcccttactctgatattctgctccctgataattttgctttcagagaagaacaaagacctgtgattctgggaagttcaaagcccccagacaaggtcttctcattctcccgtgacagcctgagctctgcattcccaaaaggaggagcatcttcccggcatgaagagccaggagtagagagggagcttctcccaggggtgagcagggcagaagccaccttggtcagtgggaaggaaacgtgctcagctcacatctgacccagaatgactcagtcacacccgtgcagggtcacctgcatgtgagcatcatctatttgctccatgagaaaataccttgtgtgactcttgggtaaaatcataccgtaggtgacatttctctggctattgcttcagccaatgtttttcaaaattcactgtaggacacttacataaggtaagcatgtcaggtgtgggatgtgttgaataggaaaagcacaggcttcctgtatcaatgttcatggcttgtattcatggccataactcgtggaaatggaaaaaaaaaaaaaacagaaaagaaaatgataccctgctcaaaaaagcactgagaaataccattgtagtaatatatcttcaacttataagttgagctaattgaacattaacttagatagatcatttttatggggggattcctaaacctaaaacattgtattaaaaattttgtcaggttaaaagatcattaaaaggccaatgtttgattaaaatctggagtcttttactttgggctgcaatcagccaatgagtgcatggagttggctgccctcccagaccctgactggctccacgtcgaggtagagcagcgctcccgacaggcagctggaggaactgacgaggggaagctgtttgcatcagggcctcaaaaatttggctcaggattttcccacgtcccctccccaagcccaagctggtcccaggacactcagaagagctcatcattatgggtctaaaacttctctgatctcgctcttctttcttccttccccagagaccttggaattgtcagtccctctcacaggcccttcctttccttgtcaagtgcactccctgaattatctgctcctgggtcagcaattctctagaacttcagggaaagcagtgctgggtcacccacatggggccccagaaagctggctaaggaccagacacacaggcagcaggctaggtccccacagggctgcatggttggcatcgggtagaggggagggaccaggaaccactcgctgagtgtccgtagggccaggtgaactagggaagggctggaacctggtcaaagaattgtgtactaagcaccactttctctgttctatatgctacaactcaactttctctctctctctcttctctaattaacaatgatatcctgtctggtccaaggtcacacatttccagtgttgcaggaatgtctgttgaatctgctaatttgttgctgggaagaatactcaaatttctcatgctcatatttgattgtcaactgtctccagccagcatttctaaaccaggatcctttgacaagacttgtgaagaattttgtaaaaagtagcccccaggatgtcagtgttcactgttggcagcaggactgtttccacgcagtagggctactgcaagccacacctgtccccacacagtagcatcttcctggaggtcaagagtgattttgtttgctatgctgccccagatcacctaatttattacctgtgaatttcacacactacacatcctgcctgtccccaaattcttcacttatgggcaaatgtcacatctgacctgaactggtttacatcccagatccccttcaggcttcccactgtcctttcagatcctcacacacccaagacccttctccgcagggcacagacacagctccctgcacacgcttccatcacttgtctcttcactccttcctcaaaggaactccacagactcttcttcagggaggccttctccaatcactgaagctacagcagccagccagtcagcttctgtcagaactttcaatgattagctgcatagagcttacaattacacatttgttttttctatcgttatcttttgactgatttatttctattaatcattgcattatcagtcagaaatgctttttcactacaagaacacatgtggcaggaaccagggagcttccaattttcttccacaaaaataagtctgcacgtgcttggtggttgttttccagatgctctccagttccataggaagctcaaatatttctacctctccattccctttcaatgagatgttgactttgttttcattgttgttgatgtaagacctcagcatggctgctgcagctccagctatcacacccaagttcaagagaaaaagcaaagcacaaacccaatctagtccttccttcataagaggaaaagtttcctgagaagaatctcagccatctgactcttacatcctatggaccaacgctgggctacatggtcactgctggctagaagaaactggaaatttgcctgactttcaagtgaatagaggggatgacacacaagtagaaggtggtagggagtatctgctgggtctgtaaacccaatctgcctactgcactgatccagcaacaggacaggaaactcctcagagcaaggactgtgtcttcctcatgctgaattcctaaaatgcattcttgccaggacagagtgggtcagggtgaatatttgttgggtgaatgagcttctgtctctgttgtattgcaggagtcaccaccagtgcacattggccctgtatttgtatccagaaccaatcaaagccacccctgagtcctgcatctctcagtaccaagctccagtcccccttcaagaccacccaccacacagacgtgcagggagcctcaggagggcactgtcacctccttctccacatgtgagtgtttgtatttccatcaggaatctgagcacctcgtgcccaggtttgaggcaggaaggggccacaaacagaagagaaatttcttctctgaagtcaacagtccatgaatcaaggaatcagggacctgagcagcagattctgaagctacacctgaacccaggaggcccctgagcctccagctgacagtgtagagtggccacctgggggcagcagagagtaacctggcaaaaatccctggaaagggggtggagctgggcatcagggagatgctgacatgcagggagggtcagtgaccatgacctgagacctggagggaaagaggttcctcttttcttagaatatttgtcattgacactgatgtttaaattcttctgacctcctgtctctcagatttgactcttggaaatggtgcttatttttctgatacagattcagacaatttgcctcttctcattgccctggcccccatctcactgtcacacatgccattccattctgtagtcacgcgtgtcccacctccctgcccttttctctggtagctcgtcctgcagacacaggggcttctccttccctggccactcctccacgtccactgtccccagtctttcccaacactgtcctggggaacctgccaaatcacagctcttgatttccttatgaggcacaaaatacttgctccttaatcttttgttgacttaagtttttatccattgatatattttcccagcaagtgaagacaacttagttataataaacattcacctccagggtcttggagtttgcagccccctctcattctctcacaaagccaacatttccttcacctcctgatgtgtccctggccctgacagcaccctggggatactgaggcacagcacctatgacctggcattagaactcacagccaagtagaaacttatcacatcccatggatcttccaaaactctgtgtgcacttggcaaccaagaattgcattctcctctagcactgaggggctgtgccctggggtggggcctgtactggtgcaaggcttgtgctgtcccctgtagagtgggaagtaaaaggtccctgcattgggttctggattgtgtcttcaaaatgaatttaggcctataccaaacatctcatgtctgacataaaatatttatgaccaggacatttctagagaagcagaagaaagttaaccacctccctcctgagccaggatggaatggaggaggggactgtggaccccagataattcccccatcaccactgtgactctggtaacctcttgaacagggccaaccactatcccataggaaggactttatatcccctagaaaatacagagaaactcagctctgagtttttccatgaccaactcagcccaggggcaaaagtgggcacaatctgggtaaagatgtgaactcagaccatgggaccagtgggtggaggagaatcccatgggctgagggggtgggcaagcagtggtcaccccttttctctctctctctgtgtcccttgggactgagcccttctctggaaaccacaaagctcctccagcagcaacccctgactctgctggtttgcatcatgggctgttctctccagcaaggggataagagaggtctgggaggaacctgcctagcctgggcctcaggaagcagcatcagcagtgcctcagccatggcctggacccctctcctcctcagcctcctcgctcactgcacaggtgctctgcccagggtatcaccaacctgcccatccccagggctctgggtccagtgtggccatgactatgagctcaggagggccctgcctgtggtgggcaggatgctcatgaccctgctgcagggtgagggactggcggagctgaagtcccctcaaactctgctcagaggcttgtgagagcctgaggggctgcacctgccaggagagagtactgggttttcagttcaaaggctccatgcagagggaaagtccatgggccactggggctagggctgattgcaggggataccctgagggttcacagactctctgaagcttttccaggacagcagggcaggggatttcatacggatcttttacctaaaagccatcctctcctttttttttttttttaatctttgcaggctctgcgacctcctatgagctgactcagccacactcagtgtcagtggccacagcacagatggccaggatcacctgtgggggaaacaacattggaagtaaagctgtgcactggtaccagcaaaagccaggccaggaccctgtgctggtcatctatagcgatagcaaccggccctcagggatccctgagcgattctctggctccaacccagggaacaccgccaccctaaccatcagcaggatcgaggctggggatgaggctgactattactgtcaggtgtgggacagtagtagtgatcatcccacggtgacacaggcagatggggaagtgagacaaaaacaccctcccagcctcggtcaccctcttgctccagccccgggaggcctatggatagagccatgagtgaatctggtccagttcacctggatctgagcctcccaggccgcccttccctccagccccctccaggagtctctatagagcatacatcaggcatacacatggcctggaaggaccagaatcatctaatgacttggggctgtcgtgtgagttagagaatgagggcctgggtggaaagacagacagaagcaacctctgtcctctgtcttacccctggatggtaatggggtggggatgaggccagtccttagaccagctatctggctcagtccccagaaccaaccctgctgaggtcctggcccccaggctgtgtggcagtctgtgattcccaacagaccaaaccagaggaggggacactgtgaagtctgcccaggtcccctcttcaatgtgacccacctagcactgctgagaagcccagcagctcagagctgtgcccacaatgggaagcgctgttggttgcagaaagcttcctcaagtttatgtcctttctcagatggttttggtttaatcaaccaagatctcaagtccctgccttaatgtaagatgccactgaatgaagggcctcccagctccagagctccctgtgtggacggacacctgaggcctcagtggcaaccccattatgagtcagggtctccttctgcccactgttgcctccctcactctcttccaaatcttctgtgcatggaaatcattgcagtcaccttccagggaaccccatctaagatggccagctgtccccaacatgggctgtcagcgacccgaggagtccactatccactgaaaattctggtttctgtcctaaattttcagagtacatgttcaaatggccaatctgatggttccttgaatttttatggaatgaaaagggagcctgacatgctctaggttgagagatagttggagtcagatctccctgcagggaaacctggggcaggcagagcatcctcgccccacgcagggaccacagatgcacccacagggtgagctgcaggatggacactgcccatctccgccttccacatcttctccaaatgtcacccctttctacaaccccaacccaaatcattgatctccagaaaaataacagtaacaatagccatgaaaatctatgtaattcatctcataatttcatgttaacatgtgaaaatgatagtattttgctttattgacataaataaaatatactatttatccaattttatttgtcttatatttttatatttaatgtggtgaccagacactaggggtcacaggaggatcgtgtcatactgttatgggacagagctggtcaggactctttcaggtgacaggtgctgttgagtaacctggtgcaggaagccccatctccaccagacccaggtgtgaacccaggaagaggcgctggaacaatggagaggagaacctgcttctgcggaatacagtgcccttgagccctgcccctgctccatcctacgtgtgccacctccatctcaatgtggatcatttcttgccctgcctgaggtcatgactgaggggatctggcaggtctggctgtgtggccactgctgtctcatgtggttctggttgtaacaaagcccaggaacatagaagaggctgttttcaaaaggtaaataataatctactgcacatgacatagacttgttgctaaatcccatgggtctacagtaggattctcctgttgaggtttgccttaagcagaaggtttcagttcctttgtccagttcctctattatgatagggtctgcagtttctctggcccaatagcaggacactcacacccccgcctgcacctgctgcagagcctttctgctcttggccccaaaacaacgggtgacacagttctcagacccatgatttatggtgtcagtattcaggcctcgggggtccctgacggcttctctggctccaagtctggaaacacagcctccatgaccatctctgggttccaggctgaggatgaggctgattattactgcagctcacataggagaggtggcactttccacagtggtccaggttcatggggaattgagacccaaacctgccctgggctctcagcctctctcttgttctgaagatgcttcctcaccctgtgcaagtggcttcttgcagcaccaccttgagaatttcccctctcccagctcctctcctttctcaccaggaagtccaaaaggaaacctgctctgtgatttctcatccaggacagtgacagcttcctgttgcttgtgtgttgtggtccatgaatgtgcaactcttcctagctcttcaaatgcaggcacatagtgagaaaagctgcctgactcatgaagtcattgctgtttttaggggcgccctcaccctaaatgcatcctcatctcccacgctgtgcaggccaatctgcacagaagtcattacagggagtttcaagaaattgcaccttagtcaactctgtgtccactatgctctcgtgaagatggccctcctggctgggctattcctctgtacctctgtcctgaagcagtgaccactgtgagagctgagcatgtttttgagggattaagaaccagaggaagctgttgtttttcattattattattattattattattattattattttgagacagagtctcgctctgtcaccaggctggagtgcagtggcacaatcttggctcaccgtaacttcagcttcccaggttcaagcaattctccctgccttagactcctcagtagctgggattacaggtgcccaccaccatgcctggctaatttttgtatatttggtagaaacggggtttcgtcatgttggccaggctggtcttgaacttctgacctcaggtgatccacccgccttggcctccgaagtggtgggaatacacacgtgcgccaccacacctggctgcgtttttcttatttttgttcctcttctttgcctcaatacctcaggttgctgagctggggagattttgagtgacagactcagtattctctcaaaatccccctctctcacatcgctgaggccctgtcctggaaactctccaaaagtggatggtctccctataggatgggagcttccaaaatggctccacagggaagagttaacctgagttcattccttcctcctcattgacatccagcatttgtaatttccatggccatcaatactactatagctgaaatcttcattaatctactaaaggtgagagtgaatttcatacatattcaaacattagtttcatccaacatttaaattttatgagtcaattggtaaacatagccatgattacatgtagtttaggcttcataaactttgattaaatggattttatttaaaacaatgtaatcattttactatatgtgtatcctacctatatcaacatgttgttacttgaaatatccacaagaaactatatttcaaaaaccaaattgtatttattgtctattgttacataaaaattgctccctaatagttagcatattaagagaacacgtgtttgtgatcttgtcactttggtgcatctggaattgagagcagcttagttttgtggttctggccctgggttggtcatgaagtcgcagccaagctgtcaggccaggctgcattcagaggccagagcaggtggccaggcccagcctgaggggcttccactgtccctaacctgtttggctgattggaaaactcagcggaaaaggagagagtgaagtgtaaggtgcctgtcctggtcccccatgtcaaagaccattccatacatgcaccatttcttattctttcctgcaacatcctaggcatagagcactgcccattcattctaaggctgtagagtattccacagtagaattttagccatgcaacctctaatggttaacaccatgattttgatcttacaaataacactgcagcaagcatccttatgccgactcctttgagttattgtgtgcatatgatcataggataaattttcagaagtggaattactgggtcaaaatgatgtgcatttgtaatgtttacccattgttttcacatgtttcaccagtttacaatgccagccctaaatattgattggaattcattggtgaaagtgcaaatttttgccaacctatcagatataaaaaagttaccttgttacacttttatttttgatttctcctattgtgcttgaagttgagcatttgctcaaatgtttcagtgctcattactttttaaaattcggtaaactttttcttaaatgtataaataagaagtattttagtctttgccacacaggagtcaactttggggatactatgtaggtactgacagcaccatctgcaatgtaaacattaaaatatataaaaaccattttaacccattaaccatccccagataatagctgatttcttattagaagtaatgcaagccagagtcagtggagttatatttagaaaatattaaatgaaaaaacttactacccaaagcaatctacaaactcaatgcaattcctttcaaaataccaatgacattattcacagaaatttaaaaaaacctctaaaattggtataaaaccaagaaagatcctgaatagccaaagcaatactgagcaaaatgaacacagctaaagatgtcacactactagaattaaaatatactacaaactatagtaaccaaaacaggaaggtaggtattggcaatcagacactgagaccaatataacagaatagacaacccagaaataaacccatctatcatatagagccaatcgattttcaacaaagatgccaagaacatacactgagaaaatggcacaattttcaataaatggttctgagaaaactggatatccatgtacggaacaatgaaactagacacttatccccctccatataaaaaatcaactaaaaatggattaaagactcaaatataagacccaggctataaaactactagaaaggaacttagagaacattggggaagaacaattctttaggacattgttctagataaaagttgtatggccaagaggcaacaacaaataatagagatatgggacatcattaaactgaaaagctcctgaaaagcaaaggaaacaatcaacagagtaaagacaatgtgtagaatgagagaaaatatttgcaaactactcacctgacaaggacctaatattcagtataagaaaagttaaaaactgaaataactcatcaacaacaacaaaaaaaactaataataccattaaatagtgggccaagaatttgaatagacttttctcaatagaagacatacaaacggccaacaggcatatgagaaaaatgttcaacatcactaatcagcgagggaattaaaatcaaaaccccagtgagatacaatctcaccctagctggaatggctatgatcaaaaagacaaaaaatacaaatgctgatgaagatatgcgacttcatatttttctagtccaattctctgggaacaatgagagtgctctctttgctctccctttagtaactatttttcacatgcaaaaatatgggccctactgggaaataatgcctaagaccaccaacaccttaactgtttgttcatcacactagaaatgaaactgttttccaaataatattaacatctatctgtgtctatcaccattgtgtcaatgtttgtgtgatcctataaagtttagaaggcctagaagaatgcccttgctttttgcaatacaaaaatggcctaacagatatagatgacatagatatagatatagatatagatgatatagatatagatatagatgatatagatatagatatagatagatagggggttgtatcttggaatttgtttctctaagggacttatttcacatctaatttgaaattattctggttttaaacattatagaatgataacacaattggtgaaccaatcattctgtgttgaggttaacagtatttttttacttcaattctcactgaatgagagcagtttttatacggaggggccatgccataacaatatcacatactggggttgttctcagactgtgaggttctgcctacaccaagccaggatgagaattttatttgtcaaactgctctctccacttgtttgtatcccataatataccccaaaaatgagcataatttcattttttatgctgtttgttcttacatttaatacatgtaccaaaaagttgtctttgtttttaaaataaaattttatgctatcttttaatctatgtccctatagaaaaatcatgatccatacacatttgttatcacagaaagaacaagataaatttcctctctctctcataaatgccatgaccgctgctttttgggattatttttcttaaattattttttaaacagaaattcatataacttaccttaatcaaatttcttttcaaagtaatcacatttcttttatgtgaaaaattatttaccttcttttatcaaaaattatcttaatacaaaatatgtattgttttacttttagaagaaatggaaactatctacacattactaatctaaaaatacatgctctgggtttatatggtgttaacatgtcttccaaattttaaggaataggtatttaaatgtcatgcactttgtttttaaatttagaaaatgtttcaaccttttgcctgggcatggtggctcatgcctagaatccctgcactttgggaggccaaggtgggaagatcacctgagctcaagaccagcctgtgcaatatggcgaaaccccatctctacaaaaaatttcaaaaattggccaggcatggtggcaccacccacaatcccagctactcgagaggctaagatgggaggattgctggagccggagaagttgaggctacagaaggtaaactgttgaggctaaaacatggtaaatatttaattgttcacttaaaagaaatgttggttacattgaaaagaaatttggttaacgtaagttagataaatatctgcttaaaaaataatttaagcgagctgttagcactactgcattccagcctggtcaacagagcaaaatctgttgaaagaaagaaaaagaaggagagaagggaagggaagagggaagggaaaggggaaggggaagaggaagacagaggtggagggggaggggtggaggaggaagagggaaggggagagagagagagaaagagacaaagagagaaagaaagacaaagaaagaaggaaagaaagaaagaaagaaagaaagaaagaaagaaagaaagaaagaaagaagaaagagaaagaaaaagaaagaaggaaggaaggaaaaaaagaaggagaaaagaaagggacagaaaaaggaaggaacgacggggaaagaaagaaaaaaagaaaaaatatttcaagcttttcagtagcagagacacttcgtaatcaataagcaacagaaccaaaacaaaaaaaaaaatctacagaacagtctaaatacaattataaacttctgattcggatatcaaaaccatttcaataataaatatatggtatgaaaacctcacaaaggtcaagtagaatgtattatatttgaaagaaattacgagttgagagtaggaaatttataaatttaatcaaacaaataagcattatgaggaagttgtattgctaatgtattatttggcaagctgttcagtggaacaccaagatattcttaaggaagttgcaaatatctttttttttttttttttttttttgagacggagtctcgctctgtcgccccggctggagcccaccaccacgcccagctaattttttgtatttttagtagaaacagggtttcaccgtgttggccaggatggtctcgatctcctgacctcgtgatccacccgcctcggcctcccaaagtgctgggattacaggcgtgagccaccgtgcccggctgcaaatatcttttaagatgttgtcattgaagtggatttaaaagtgaggacatgaatacctttaaaaaatattcagggataaagagagaaaattaaatttagattgtatacatatataaaatgtattttaaaagatcagcttggctgggcgcggtggctcacgcctgtaatcccagcactttgggaggccgaggggggcgcggatcatgaggtcaggagatcgagaccatcctggccaacatggtgaaaccccgtctccactaaaaatacaaaaattagctgggcatggtggcgggcacctgtaatcccagctactggggagggtgaagcaggagaatcgcttgaacccaggaggcggaggctgcagtgagccgagatcgcaccactgcactccagcctggcaatagagtgagactctatcaaaaaataaaaaataaaaaaataagcttgtctctttttattccttaaataaaaggagcagacacttaaattccttgccttttattttaaaatttagaaaatgcttacagcttcccacagtgaaatttatacttagataatctaatcaatggataataatatcaaaacagaattctttgaccaatctattttcttcatttttaagtctaaatgtatactcaaagaaataaaactatttataattgattctgctgtttgaaaatatttactgatcatttaccttgcaccaactgacctccagctctgaagataggtcagtggtaaagtatacaaagttgcccagcttcgttaaacttaaattctaatgaggaaaaaagaagtaattaatcagggactttaaaacaggagtgttgtgatatggcttggaattctaattgcttcctgtgcttgctgtgtggagactggattgaaaaatagggcgatgataggagcttaaattcatacagaatatggctagcctgtattttgagggcccctgaaataagaatgtatagtagttctcattatttcctcaagaaatctctgcagtagagctttggccttgggagggaagtactatagtcaccaagtggtgagggtgggaaggtgaatttgcaaataccatttggaatgagttcactttaaaggtaaagctggcaggattttcatacatgtcagatctgaaaatctgtgtgtgcgtgtgtgtgtgtgtgatagagagagagaaagagagagaattagaacaagacagatacagacagacaatgacagagctgcagagacagagagaattaaatggggacaccaagaatattgagctgagaaactataaaatgggaggtgccattaaacagaatggggaagagcagttttggggagtgtcagtggctccacgtagacttattaattttgagattcctaaaccacatccaagtggagaagacagacagtattgtgtgtagtctagtgttatggtatcatataaaatatcaggaaatgaatgacacaaaaattagtaagaaagcaaagataagaaagataaaagtcccgagcctagtggttatctactgcctaaaaagtagtaggctgggcatggtggctcaggcctgtaattccagcactttgggaggccaagttgggcagatcacctggggttgggagttcaaggccagcctgaccaacatggagacacctcgtctctactaaaaatacaaaattagccaggcatggtggcgcatgcctgtaatactcaggaggctgaggcaagagaattgcttgaacccaggaggtggaggttgcagtgagtcgagatcgaatcattgctctccagcctgggcaaccagagcaaaacttggtctcaaacaaaaaaaaaaaagaaaagaaaagaaaagaaaagaaaaagaaaattagcaaagatgagaagaaaccagcaaaaagtactaggtataattatcaaaaatgtcaagaggaaagtaggttaagtgttctagaattctatcaaagaaagttttgaaaaaaaagagggagagatcaactgcattaaatgctgctaatacataaattaagcaaaggctgaggaattacgcttcaattcatcatttaacaatatggataccatttgtgctttgataagagcaattttcttggaatgagtaggtgagaaaccatattggagtggtttctcaaaggaatgcctgatctctgggttcttaaggaaactttttattgaacaggggaggcacaaattggattagttttaattccggggtccggacacactctaaacatgtgcctctgcatgcctcgctttttaaagctaggtatcctattatctttcgataacaaaataatcacctgcaaaaccaacacacatttaatggacacacttgtaaagtgtgtactagaggttgttggagaggatgtgattccacgtgatagcttacgagtcactgatgggcaggtaagctggtaaaatatctttggaaaactcaccatacctgttatacttaaatattcagataccaaacagcagaaaatccatattgtaatatatttccatgagaaaaaacaagagctctgtattaaaatattgattattattaaaaataatcccactgggtttcctgacttttttattagcaagtcagtctccgcctgttttcagtagtacaacctctatttaacaaatgttttgtatttttaatcagccacttagaaaaaatattatattttatatcaattctacgttcagtgccaaaaccagtgttttgtacattccacagaattatttgttgaataaataatgaataacttaaataagttatagtatccatatataaataatatatcatctccgaatacagtgataacatttgttatgtagaaaatgatttcaatctcagttaaaaatattttgggcataggagttactgtcatataaagattctcacattgttttgtttatatgaaaatgtttgcagttaacgtacatttttggtacctaaggcttttgctcttgctgccatagcaaacagtgtgcctattaagaacacgaacctgagttttatttcattttaacagatttcttaataaaatatatgccaccttatttggtttaatacataagcaaagagccatccactccaccattgccccttgtccctcctccaatgcagctccttaagatgttactgatagcagaggactttgtgttcaacctaagcactttatagcccttttattttcaactaggtatgaggtaaaataattcagcaccaataaaacaaacactctttaaacaatgaccctttttcttagcctgttcaacaaaacgcagcaagacagagtacacttctctttcccagcaaatcagtgttgccactacattctctacgttctgaaaacttgtattattgactttcttacaaacaccctttgagcttataatttagatgtcatcaaataatgtacaaaaacacgctacttcctcccccttctcttctcttcttaccagactattgtcagtttgcttttctatccaactcctttcttctgtctacttgatttttaaaagactttctacatatttactatcttggtattgtagagaccaactatgtggtcaaactacacatataggaagaactgaattatatgcaagcatttttaaataaacgattcctcctcagttttctgtgattatttcatataatcaaatgtcttccagatacacatcccaaacgagtggttgtcaagctctgctttgttgtctaattttatcagaattatccaaaattcttatgataaatacagatgaattagcataactccagatttatgaaatgaaaatttccagaacccaggaatatgcattgaaaaaatgtattcctcacgtggtgctgatgtgatatgggatctgagtttagaatccaaggaaaattaccctccttgccctctagttggccagaattacctagttgaccagagttgctctcttgttatctagaggtcctcttcccttttcacattctgctctctctccttctgtaccttcctcctctcctccctccacttctgctcatccagatcccaagcccttctccattgattctcctaaaactccaaatggtcagttgccactaaagtccctctgtcccatgaacaagatttgtgggcaaatgtagaatttaagcttggacagagctgaatcagagctgcaattaaagatttccctaaacccagcagggaccagcaaatacttatagaagattagagatttcttgtgagtgcaaagggctcagagtgacctgatgctatagaccaaatcttatggtcccctcaaattcatgtgttaaaatctaattccccatatgatgggatttggaggtgaggccttggaaggtgattagatcatgaaagcagagactgtatgaatgggatcagtgtccctatcaaagggactgctgagagctccctcatctcttctgtcatgtgaggacacagtaaaaagatggcagtctatgaacaaggaaggaagccctcatcagacacgaaacctgctgacgagttgaccttggattttaccatctccagaagcatgagaaatgaatttgtttctctgctacctagtgcagtgcattatcttttggcacccagattggctacagtaccaacatatcaacttgtacacgtaatttttgaaattctgatgccaaatctttgatggcaacaggtgattgatctgctggaggaatggactgacatgatccctctttccacaataaaccagagagtaaaaacaagcaaaagtaggtcaaggtcttctaaaagccgtacctgaaaggtttccagtaacagttgattagatggtaattcaatcacacaaacaaccacggcaaagatacacaactatcagacattttcagaatagcctctaaaacaacatctgacaacattagggagttaaagaaggcacgaactttcaaaaagtcaaactttatttaaatgttattgtagaaacttgtaattttaacactatggatgaattctagggcaggtggtggcatggcatggcgatttgggggcacaagtgctgagttttgaagcttcggttttgataccctttggagatgccccctggcctccacacccctgcccacctgtcaagaagagcctgtcctgggcagcacctcagggacaaacagcccagaagcccagttgagggcagacctccaaggttggaggaagaagccgcctctgggagcaggaggagctgctggatcccctcctcccaggtttcttttcctgccccccagcgcctcttgcaggcaggcaaacaaccccagcaggagcagcagcaggcccttcagccgcagggctgcagctctgctgaatgagagaagcctctctctggcgagtcagaggagcgcaggccatatacccgggtctctacctccatgtctcccactgtgcccaggactgagcccagcgtgggagatgcgggctggggccgtgctggccaccccctctcttccacctcttgctccagccatgctttcagctccagggctgaggccagtggctagagcagatctcatgatgtcaggtagctcctcactgggctggtccttggcaggaccaggacaggggcaggagggatctggagctgctgatagctccagttctgtccctgaaggggggtcttcccctggtgctggcactggctcatcagctggcgctggaatttcctgtgttgctgcacatggaacaggagatgaaaaagaagaaagactcaccaacgtcagtcactttccactggaattttcacacacagaatcaacctcgctgaatgtaaggtattccagcccgaaaacactgcccctgcaaaggctcatagactataggccacctcaccgtgtgcctgtgcctcgatgaactccagaggctccagctggacaagaacaatgtgcagatgtggccgcgatgggatcaccggtggggcctggcctggtagggcctgccctgggctgccctgtggtacttgggggcgcctttgcccaaatggccagaggcgcctggagtgagagatgagtgaggtattgcccctcacaagagggcattagctgcggggatccgcccacagaccctgacccaaatgacggatgaataaaacgtacactgacacagagttattctgctttgccagtcctgctgagtgtcccactgcctgcacaccaagagaggtttgtcactgcagctggccgtgaatagctcgcactgcaggcatttatttagtatagaatttacaacggaagctttgagtaaatactcttgtggataattaacatggttaagagagtagttctaccaatgattaaagctcaggtaccatggtttaaagtaaataccactgggggcaatttcccgggtctacctcccccctcctccccaagaggactatctggctcaaaggctagttaatggaagtagggtaaacagacttaactggggaagcctctattgtccctaacatttaccctatgagctaatgctctaagataagaagcagctgccttcagcctgttcaattattacaagctatgtaacctttccgccttccaaaaggtttgtgactattccctgtaactttccctaatatttccctttaatatttctgccaccatcctgagtgaatcccaatagatgagcctgcgtcagcattgtgggaaaaggctctcgctctgggccctcctgaagcaggagactcgagatgtgggaatgcagcatgagaacatcttgctctcctgagcatctcccaccaagggagctggctgcgggtctgtccctaggatgtgggtgcctgattaccagagttctaagttctgttagagtccatcaccaaggaagtgaagtcacttctttaaggttccgtaccctcggctccttccttcaaaacctactcagaaccccctgggctgctggctgctcaccctccccccaggtcagctccttacctgtacacaggtaagtccacccagtgtctgcttgtacacctgtgcctgatgtgcacctggggcctgggaatccacttagggcctgtgatccaacaggggcctaatgttgattaaaactaattttgattattcctatggagaaggaaaggccttctagcaataagaagcagagttccaaatcaaatacgtaaaaatgatcaaaaccttgtaaaagaaaagtatcttaattttaatcactgaaatgttaactttttgataaatatttaaggttataatgaaaaataaaacaatactaataaaataacagttgcaggaaatgctattgagtttcttgtttgtggtttgaacactgaaaggtcccacctagttatggtcataatttcctaccttaatcttcttgttcttatgagtaatagaaaaaaacacaatgacgatgaatgtgatgatggttcaaatacacaactgaagtttagtggcagaaacatcaggtgctcccaattacagtgcagctgttcttactgaggtgagaaaaaaaatcttgttttcaatacacacgggaagcaggagtgcacgcggatatgaccgcatttctctgaacttatgtttttcacagaagagctacagtttatcctgcattctccgttctgtgatcaaaaaccatggaacagagaagagcatttcaacctgagactcaattataagaattgcgtctgccccacctccctgcaaccatatatgccacctctctgtgctgagcctgaggggttcacatatggcacagactgaggctggactcaacagtccttaccctcgcaggtgacaggcgttctggggtcacttggaggagggaagctcctgggctctgtcttctccaccagcagggggcagcacagctgcagacagaagagaggctgaggctgcccagaaggagcctaagagggaggccagccatgaaggctcaaaaggtgtccaaggatcagtcctcaatttggaagtccagtaaagtgcatcctatcccctcgggctgcagtaactccgtcctgactgtaagactcatgcagcgtcactcagggcactgacaggagcccagggacagtgagagcctcacctgggaaatgtagctggaggcgcctgggccccggtgtcagcctggggagcttccacagggctgggattccctgggagacgccccgaggtcaaggtgctctaggagggggccacagtgtgagaggacagggtttccagggcccaagcccttcacctagtattgctgcctgagcctcctgccactctcatggtcttgtccctctctgatcagcagcattctggggagctgagccctcagtcctgggcacttccagagacctccccccgccaccccttctccctctgcctttccttccagctccaggcatactgtgactcagggggcagctcctgtgctcaggggagtctcacgtgggtggggtggtgcactcaggaccctggctccaggatgtggcatttccagcctccttgaggagatgctctccacagggaaggggattctcacctgcctcaggccagagctctggccacgaggctgtccttggctcagggacaggatacacctcattgcaggaaccaaggaccacccaccctgcagaccccacaccctgtccaaaggctgtgtccctgggatgcttacagcgaccatggggcttaaagttgaatttcccatcaatatttcatgtaaacttgcaaaaagcacaagaaaaccacactgggctgagaactctggtgctattttgctgttttttacaagtttacataaaatattgattggaaaaataaacaatggcagagctgaggatggcaatggctggtctactgtggggatggggatggcctagaagtatcagccccatgggtgaaatgagaccagacgtcctgatgactccacatgggtgagtggttccttaaatgactcaactattctcactgaaatagttaactagtgtcctaatgacacaatccatcatttagatgaaatgaccaggatgggacatttcctccagccaggaagactgtggacaaattcatgaactgggctggcccagttcacctgggtctgagaccccctggatctgagtccctccagccctccaggcaggctctgaagagggggcgtcaagagtggatttagacttaggtgaccaggatgtattggggtttgaggactcagctgtgacttagggaaatggggcctgattgaatcatcagactgaggtagacatccatcagctgggctctggatttccattggtcatgacaagccagtccttggcctgaatatcctggatcagtccccagaactgcccagctcaggctcaagtcattctctacagaaaaaccagtggagtggacactgtaggatctgcccagattctttcttctgagctcacccacccagcactgctgggagcttgtggcagctgagagctgtgcctttcctgggaagtgtggctcagcgcagaaaactgcctcctccaggtttatgcccttcctcagcaagattaggtttcatgactgcctgaggccaagttctcaagactctgcctcaatataggaggaaatgaaaatcctcccagctccacagctccctgtaggaaagactgagacctcaatgtgcgtcagggtctctttccgcccagtgttgcctccctcacatcctctgtgcatgaattcctcatctcagagtctgcttccagggaacccaaattaagatcaccagccatccccaacatgggccatgcggaacctcaggaggccactgcacactggaaagcgcccatttattcctaaattagcactgtgagtatccaaatgcccaatgagatctgagtgtttcttgcatttgtatggaatggaaagggagcctgacttgccaggtgctctgggtctgagggagagttggagtcagatctccctgcagggaaacccgggacaggaggagaagcctcaccccatgcagggaccacagatgcacccacagggtgagctgcaggatggacactgcccacagggtgagctgcaggatggacactgcccacctccaccctccatgccctgtagaaaaaatcattctttccacccctccttcagcctatcaaagttgacacttaaaaagccaccacaccccacccttgtcaacaggaaacccattcacatctccatcagccacacaatctccaagattcttcaaaaaataataacactagctatgcaaagtatatgatatatatcataaataattgtacctagattatatatgaaaatgatactttttgatatgctaggtaaataaaatatattatttaaactcattgacttcttctctttgtatttataatgcgatgactagacagtgggattcccatgaggctcacatcatattgtgattgaacaaggctggtctgcagggcttcaggttacaggggctgtggagtgacctggtgcaggaaaccccgtctccatccataggacatcagtgtgaacccagggagaggcgctggtatgagagatgagaacacaggtgtgaaccacctgcttgtgcaggggactgagccttcactttgagccaaagaagtttcttttcctatcttcaatcctgaacaagagggctttctggacttctttttgttttcagatttgtgccccttcaggtttggggctgtctggagtcccagccagaggacagtgaggaaatccaggagtctcacactgactctgttatatttcatctgctggggccatcccaaactgctgtgtaccatttcctttcctggtgctcaaatagctgctccattcacctgtcatggtttcagagatgaatctaggtgggaagacaggacagtgtatgttataatatttaaatggaagctgattccattaatatttattttaatatgaaacattaaaagaattttgttataggctatagggaaagatgaaaagagattaaaagtattttgaaaaaatgtatttatcgaatgtctgtgtgtcttcagtgttgcagggttgagagaggtcagctttaggttggatgtgctcagatgaggaaaagcaagaaagcaggaaacacgcggctctgtgacctgacacataaatcacagtaaaatggaaataaatctttcaataaatgaaacattcaaaataaacgtcactctggtgcacacagaaaggcctattagcaaactttccctttgtcctgctggctcatatccccatggatcacctgtgtgcagagtggacactgtagtccccatttctcaggctgagaactagaggctgggaaggacaagtcacctgcttgtgagtgggaggggcaggattgggagcagtggactcgggctcaggactgcggccctggtcggtgctctgtgttccctccacaggatccctcccacatgtgcccgtgtggatgtgggtgcactgcctggggtggctgatgtgctccagggattcgatggtgcagatgcttcagcacaaagcttgggggtggggatgggatgaggctgcagctggggagaccagggaccaatgccacccagcagaggtttccacggggtgggcagccccatttcctggcagtagagacagcctggaggtgggtgccaagcagagggcactgcagggtgtgcccaggcctggagggtcacaaagacacaggcaccacacagcagagtcactgaggaccagaagctcactcaggtaagggatttcagcagaactttctctcctgagcaaatcaggtacaaaaaaattaagatcctgccatcagaaaagacaaacaagaactttttatctcctcagctgagccccactgtccagggaagcagaagtctctgagcccagcccaggtgagggtggggtgaggagaggagctcagggtggagatttgcatggaggccccaccctcctctgaggcagaggggataagacagggctgggggcaggcccagtgctggggtctcaggaggcagcactctcgggacgtctccaccatggcctgggctctgctcctcctcagcctcctcactcagggcacaggtgacacctccagggaaagggtcacaggggtctctgggctgatccttggtctcctgctcctcaggctcacctgggcccagcactgactcactagagtgtgtttctccctctttccaggatcctgggctcagtctgccctgactcagcctcgctcagtgtccgggtctcctggacagtcagtcaccatctcctgcactggaaccagcagtgatgttggtggttataactatgtctcctggtaccaacagcacccaggcaaagcccccaaactcatgatttatgatgtcagtaagcggccctcaggggtccctgatcgcttctctggctccaagtctggcaacacggcctccctgaccatctctgggctccaggctgaggatgaggctgattattactgctgctcatatgcaggcagctacactttccacagtggtccaagttcctggggaactgagaccaaaacccaccctgggctctcaggctcccttttgctctgaagatgcttcctcaccctgtgcaaggggcttcctgcagcacggccttgagaattcttctctctcagctcctctcctttcccaccatgaaatccaacaggaaacctgccctgtggtttctcatcccggacagggacagcttcctggtgcttgtgtgctgtggtccctgaatgtgcagctcttcccagctcttcaaatgcagggacagtgacaagcagctgcctgattggtgcagtcactgcttttttttcagagatgtcttcaccctacatgcatcaccatctcccacactgtgggtagaattttagccaaatatggctgggcgcagtggctcacacctgtaatcccagcactttgggaggccaaggctggcagatcatgaggtcaggagatcgagaccatcctggctaatacggtgaaaccccatctctattaaaaatacaaaaaattaaccgggcacggtggcgggcgcctgtagtcccagctacttgggaggctgaggcaggagaatggcatgaacccgggaggcggagcttgcagggagccaagattcgtcactgcactccagcctgggtgacagagcaagactccatctcaaaaaaaaaaaaaaaaaaaagaattttagcaactacattctaatagttatcgccacaactttgatcttaaataacagtgcagtgaacatccctatgcagcctcctttgagttcctgtgtgaatatgaccataggatacatttctaaaactgaaattgcgggtcagaaagatgtgtgtttgtaattttcacccattgttgtcagattcccctccagaggggttctaccaacttacaatgccaaccataagtatttgttcagagtacattgttgaaagtgtaaatttttgccaacctaccagactgaaaaatgttatcttgttacagttttatttttgagtctcccattctgcttaaggttgggccttttcacaaatagttcagtactctttatttttttagtatttggtaaactttttcttgaatatccaaataagaagaattttagtctttgtggcaaggcacagtgggtcatgcctgtaatcccagcagtttggaaggcttagacacgtaaattgcttgagcccaggagttcgagattagcctgggcaacatagtgaaccctcatctctattacattaaagaaaataaacataaattttaaaatgaagtattttagtctttgtggcccacgaatcaactttggggatattacataggtacttacagcaccatttataaagtaaccatttaaaatgataaaaaccactgtcagctctgggccacacaaaaacaggtgtcaggccagttctggcagggtgagggctactatggtgggaaagggaaatggaagccagtagagcttctcctacctagaaaaatagtaaatcaaaaacagtgtcatatccctggagggattgcagagattagtgccaccatcaaggacttgaaagacacagaggtggtgatcagcaccacatccctgttcaactctcccagttggcctgtgcagaagacagatggatcttggagagtgacaatggattatcataagcttaaccaaatggtgacttcaattgcagctgctgtaccagatgtggtttcattgctcaatcaaattaacacatctcctggtagctggtatgcagccattgacttggcaaatgcctttttctccattccggtccattaggcccaccagaagcaatttgccttcaactggcaaagccagcaatatacctttactgtcctacctcagagatttatcaactctccagctttgtgtcataatcttgttttttttttcttttgagacagagtctcgctctgtcaccaggctggagtgcagtggtgcaatctcagctcactgcaacctctgcctcctggattcaagcaattctcctgcctcaacctcctcagtagctggggctacacgcgcgcaccaccacgcccagctaatttttgtaattttagtagagacggggtttcaccatgttggccaggatggtcccaatctcttgacctcgtgatctgaacgcttctgcctcccaaagtgctgggattacagacctgagccaccatgcccagccctttgtgtcataatcttattcaaagagatcttgatcacttttcacttctgcaagatagcacactcgtccattacattgatgacattattggattggattcagtgagcaagaattcacaaacacaatggacttatcggtgagacatttgcatgccagagaatttgaaataaatctgactaaaattcagggaccttctacctcagtaaaatttctacgggccaagtggtgtggggcctgttgagatattccttctaaggtaaaggatacgttcctgcatttggctcctcctacaaccaagaaagaggcgcaacgcctagtgggcctatttggattttggaagcaacacattcctcatttggttgtgttactctggcccatttattgaatgaccctaaaggctgccagttttgagtgggttccagaagaagagaaagctctacaacaggtccaggctgctgtgcaagctgctctgccacttgggccatataacccagcagatccaatggtgcttgaggtgtcagtggcagatagcaatgctgtttggagcctttggcaagctcccataggtgaatcacagtgcggtcctccaggattttggagcaaggccctgccatcctctacagataactactctgcttttgagagacagctgttggcctgttactgggctttggtggtaactgaacattgactatgagtcataaagtcaccatgggacctgaactgcctgtcatgaactgggttctttctgatcaatgtagccataaaatgggtcatgcacagcagcattccatcatcaaatggaagtggtatatacatcatcaggctcgagtaggccctgaaggcacaagaaaattacatgaagaagtggctcaaatgcccatggtctccactcttcccccctgctttctctcccccagcctgcaccgatggcctcatggggagttccctatgatcagctgacagaggaagagaagactagggcctggatcacagatggttctgcaagatatgcaggcaccacctgaaagtggacagctgtagcactaaagcccctttctagaacatccctgaagaacagcggggaagggaaatcttctccgtggacagaactttgagccgtgccactgggtgtgcactttgcatggaaggattttagccaactacattctaaaggttattgccacaactttgatcttaaataacagtgcagcgaacatccctgcatccctgcatggaaggaatgccatttcccataaatcaccaaatcactcagaatgactacgcataagcccttaatatacgccagatgcattggttattgttttacaagcgggacctcaagaagactttcataatacggaataggatgatgcaaagccctatgctcaaggcccgatctttactagaaaactagtattgggaggttacatgttttccccaaacagatctttgaggaatcccgcagatgccaaagacctgctggcctaagagtagacacttattttctcacagttctgaagctggagagccaagataaaggtgtttataggtttggtttcccctgaggcctctctccttggcttgcaggttgctgcctccttgctgtgtcctcacatggtctttcctctgcacactcatttctggtgtctcacttctgcgaatgcaaatttttattagcctgggttaataatttttatatcagcctggcagattctatcactgatttacttgattatcctatttacttgattattaaactccttctctgctgaggtcacccattggtgagcactcgcatgggatacaaatatcttcacagtttttgatcactcagagggatccatccacatagctcttccccaaatttctttgtcatcaattttccaatcatgcttcttccaagtccctgatcatccaaccaaaccattggctacagcctatgaatcagtataaaattgcatatctggacatttctccttccaggcagtgctgagaaaagtggacatccacatgcagaacaatgaaactggacccatctctctccaaataaaaaatcagcccaacaaggattacaaacctaaggataagacctgaagctataaaacaactagaagggaacatagataaaattcttcaggaccttgggatacacaaaaatttttatgactaagacttcaaaagaacagacaacaaaaataaaaatagacaaatgggagtttattcaactaaaatgcttctgcaaagcaaacaacagattgaagacacccttagaatgggagaaagtattcatgtgaataggtcctaatatcctgttcatctgaaaaggcataatatccagtgtaagaatagaggacaaggctctaaaataactgattagcattaaaaaaaaaaaaagtgggcaaaggacctgaatagacttttctctaaagaagacatacaaatggcaaacaggtatgtgaaaaaatgcttaaggtgactaataatcagggaaatgctaactaaaacccaaatgagatatcatctcaccgctgctggaatgactatcatcaaaacataacaaggctaggcgcggtggctcacgcctgtaatcccagcagtttgggaggccgaggcgggcggatcaagtggtcaggagatcgagaccatcctggctaacatggtgaaaccccatctctactaaaaatacaaaaaattagctgggcatggtggtgggcacctgtagtcccagctacttgggaggctgaggcagaagaatggcatgaacccgggaggtggagcttgcagtgagccaagatcgcaccactgcactccagcctgggcgacagagcgagactccgtctcaagaaaaaacctaacaaacacccgtgacgatgaagagaaaatagaagaaaaaatcacatgactgtctcaacagtcagatcaaatgttttctttcaaggaaacatttttgttggttgttttttctagtcttgttagagcatcacgcatgataagatttgtggtacagaagttagaggggatgttgttccatgcaaaatatctgaatatcccatacccaactcttcggttacttactgataaatgctaaaaggttacaattttgtattttcaaatattctggtggccagaaacctcttccttgacaagtctggagtacaggtatctgactccagatgattagaatttaggcaggtattgtgtgagcagtgaggtcacacacaggaaacgttccagtcaaagagaaaaacagacggaggctgaaacacagagatcatatgtctgagaaataaggaaattccatactaatgggagctgagtgagaacaagatatgaaccatctatttctctctgaatatctcattgggatcttgtccctttcccagcataccactcatgtggattttaaaattgtctgctcttaaaacatttcttgcacatcattagagagtccagcactggaatcaagctcagtttgatgagaccagggcagttaagcaccaaacccaggtgttcttagaagggcttgtagaagacaaaggtgtgttgtcaaaagcagagaaagtgagactttccattgtggtttaaaccacagcttctggaatttcattgggcacacaaatcccctgaggattctggttaagatacagctgtgccctcagcacatctgggtatggccccagattctccatgtctagcagcttccaggtgaggctgatgctgctggtcctccaaggacattttgagtggcttagctcctattcaccctcctcacgcaggcacaggtaagactcacctaatgaagaaacctgagaagcacaggtgaactctccctcccctcctggtgtcttagtaccttttgtgttgctataaaggaatacctgaagctggatagtttgtaaagaaaaaaaagggtttattggggtcatgcttctgatggctggaaagatcaagattgggtatctgcgtctagtgagggcctcaggctgtctccactcatgatagaaggtgaagggaagccggtctgtgcagagatcactgggagagagaaagcaagctttttttcctaacaaagctgcagggatgtaattgagtcatattcataaagtgctcaatacagggcgtaacatattcaagtgctccttagtggacagcaattattactgaccttgctcatgaaaattagacctcagatggaggaaaggcagtgccgagggttttagattgttcgaaataagagagattaaaatgatttaaaatagaggcccaggagctgaggcaagcatccccaggtgttctcctgccaactccccccatgtctcagaagctgttttcaggcaagtcagccagggaggaaagtgggggagtttgtagaaccaaggattgcaacttcatccatgaggaggaggtgtagccagccaggtggggagaggctgctaagctcatctgaaggctgttgaaggctttctggccccatggtcctgggccatccctccctgcccagggccgcattcctcagctgacagccacaaccttgagagaggcctgtgagtctgatcagaaatcctgccagggccccgagggggcaggcatggaagggaggtgtctaaggtcacaggagacactatttgctgcctgtggggctgggacaggctccttgagaggaaattcgggcactgtacgggaggaaaacacaggacagggaggcctctccccaaaggattgtgatgatagagaccaaagcatctgcaaagagcccagccctacaggggattctctgaacacagcattcctcggggcgtctgtgttattttgccagggttaccataataaagtagcacagactggatgctcagagaaaagaaatgtcttctccactaatctgtaggtgatgttagaatctgagatcaaggtgttggcagggttggtttcttctgaggctgagcgagggcctgttctgtgcatctccctggcttcaggtgcttctggaaggatgtgctgttccctgaattacagacaaacaccccaatctctgcctccatgttcatatggcattttccctatgtgtgtctctgaccatgtttcctcggttttttgtttgtttgttttttgctgttgttgttttgttttgagatcgaatctcgctctgtcgcccaggctggagtgcagtggcatgaccttggctcactgcaacctctgcctcccaggttcaagtgattctcctgcctcagcctcccaagtagctgggattacagatgcctgccaccaccttcagctaattttcatatttttagtaaagatggggtttcatcaggttggccaggttggtctcgaattcctgacctcaggtgatccacctgcctcagcctcccaaagtgctgggattacaagcctgagccactgcattcagccatttcccccttttataacaacaccgctcctgttggattgggagcccactctacttcagtatgatgtcatgttaacccattacatctgtaaccaccccattcccatataagatcccattttgaggttctggggctgaggacttcaatatcaattcggcgggggggagcctacaatgtaaatttgtaacattgtctctgtcatgggccagctgtcaatattccctgaatatccaggatccacccatgctctctggccatcaccagagtgagcaaatccctgacacatggataagagttgcttccatgggctcccagccaggctggaaattcttgattcatggaatcaagaatctttctccagtgggtggggctaaatgcagctgcctccctgacagtctccctgggacactaggcttatcagcttttctcctaaagctgcaggtcctgactgtcctgagccccagctctgctgtggtctttgcatcttaagatcttattcaactcgcttttgtgcctcagtggactgacttacaggaaaacagtgggagatgcccctgctctctctccccagggtctcctcccctcagtggcacaagacctgccctattgactggcagtccccccatgcccatctcaacctccacactgcccactgtgcacggtcacaggtcacaaactgattgttcactttgggcagatcaccttgacagtttctgcagaactgggtgcttcttcccagaatcaggaatttacaaacaaggccagttctagagatgcaactgggagagtaatgtgcatcacagcgaatctggacaagacaaagtggttttgctgtagttctcctggaacacattctggtgatgtgtccatctcccaggatagtcttagcaagttacatccaatgctgcatcaggacccacaagaaaaggaactggcctgcatgagtggccggcagggtcctgggaggagaccctgagatgcccagtgacaggaggagtggattcttaggttggtaagcgtgtggaggaactgcgagtgatgtgctcagccaggtacaggagcaggcgtattggtgacctgtggcctcatcttatctcagttgtctctttagaccaaactccaggaaatcagcacatagagacttctgtctgtctccgagatcatcgcaggacttcacacgtcttttctatttataatacaacatcatgttgtgattgaattactttcatcacagcctcaacagtcctaggtctgaaaactaatacatatacttagaatattaattaaggaatactttcttgtcaattatgtttattaaattaaaagacttcagtatctagtgttacagctgtcctaattcaacagccttgaccttcttagaaataaaatcctgatcccaaatttttctggggatatgactggcacaaggagccaagcagacatctggatgtcccagtgtcactgctgacatgtgcttttttgttatctgtcatggggtgaacagaggaagtgtccctacctctgtccacagaacccatcaaagacagtgcacctgattaaagaagagagggttgtgatcagaggggtccggggtcctgggatgaggtgggaggaggagactcatgggaagaaaggaagcagggcaggaagaagctgaagttcaggctctgaggtgcatctcctgcatggaatcttgactccactcacttctgtcattgtgtaatctttcaatgttggttctgtcatcagtaaacttgaggagaggttatgccataagcatagggctgaggaagggttattataaatatccagtcatggttgtgcctataaaacactcaccaaagactctgaatatattaaggtctcataagtagttgttttgcataatctagtgatacatggaggatggcattcctcctgtggacagcaggaggcactgtgggtgtatcgtttggggatgctaatagctccaagtcccccagtagagctcacgtgcaaagggtgtgactgatgtttcctttcaggtccagtctttttgagtacaatccactctccactcctgacacccacttggcccttctcctgcctttgagaaatgactaccctgaggccatcagctccagggctcagctatgagctcagacagacacgcttgggaatagagaacagatttggattcaatgctccttccttcttgagcttcaagaagaggataagataggagctggttgtgtccaggctccactgggcagcctcgatcagagctctcggaagtgcctcccaccacggcctgtgtctccttctacctcctgcccttcatattctccacaggttggagcatccagagaattcagggaaaccctttcactgctatttccccccagcactggtcctcagtggcattctttccagttctcctgtgcattcagcatcattcatgaaattatatgtttccaggtctctgtgctctgtctgtgctgacccagcccccgtctgcatctgcctggctgtgagcctcagccaaggtcacctacaccagtgaatagtatcaacagagaccaaggaggtccccctagtgtataatggaggttaagagtaatggcagcgacagcaaggggaacaggatccccagtcacttattgggctccagccctggggctgaatgctacttaattatcttcaacctccaatctgaggatgaggccgagtatcactgtggagagagccacatgtttgatggtgaggatgggtgagccacagtgacacagaccaagaagtgaggccaaaacataccccctccccttcctcttcaaggactgagagtgagaagccctatgtcatctccattgaccctgagaatgttgactctccccctttcaaatttcatcatcccagatgtcctccctcaagacacccttaggcagaggcagatgcaggccatgattgaggccattttgataagtcatcaatctgtttccaccacaccagcctgtggggactacactgggagagaccagaacagcccaggcaggaaaacggccctgagagaggggtcgggctgagatgactgcatccagtgagtgccattgcaccctgcacccctgcctcaggggactgtcatggggctctgcctgaggaggcaacatggatcttgacatgtccccagccatttatgagaactgtagttgtgtgcatcctcattaacactcaatattattgtcagtttttgtttaaagccactctaatagatctgtagcgattcttattaattttttaacttgtattttcttagcaacatcaggctgagcatcttttcaggtgcttgttatctgtatatcttctttggtgaaaagcttaatcaaatcttggtctatttttaaaattcacttttccccatattccccttcatgcagtatttttcaaaaatggtgaataaatgaaagttttgctgacatttaaaaactcacagaattgttcaccaccagactgttgctattagaagggtaaaggatatccctagacagaaggaaagtgatgtcacattgaaatgtgaatttacacaaaaaagtgaaaacatcaggctgggcccagtggctcatgtctgtaatttcagcactttgggagactgaggcaggagtattgcttgagcacaggagtttgaggctgatgtgaggtatgatcataccactgcagtccagcctgggcaacatattaagaatctgtctctattaaaaaaaaaaaaggaaataaaaaaattaaatatcaggtacagtaactacatagatacttgtgaaaacctctgtattatgttaatgccaataaaatacagttcactgatcaaagataaattaataaaatacattgtgatttataatgaaaataaaggcaaattatatgacaaagacagcacaaaatctgtggtgggtgaagaacatgttatcaaggtctcatatgggaatgtgtaacaactgcaggtagattttcataagatctctatatacataaaccttaaagtagtcattaaatcaaaccttttgatcaaaaaagaattagagcgaataagctacattagggttatccacagaaacaaaattggtaagatatatatgtgtgtataacatacatatgtgtatatacacatgcatgtatgtgagcatatcgagagagagagagaaacttaaaagaagaaattggttcataggattgtcctgtctgacaaggataaaaatctcttgggcaggctgaaggctggaaatgcaggtaagagttgatgttgcgtcctgagcctgaattcagcaatacaggacttaagaaatcctcactctttgctctaaacacctaaacactttcttttttttttttttttttttttgtgagacagagtctcactctgtcacccaggctgggttacagtggtgtgatctcagctcactgcaatcgccacctcccagcttcaagtgattcttgtgcctcatcctcccaggtagctgggattacaggtgtgcaccatcacatccacctaatttttgtatttttagtagagaccggctttctccatgatgaccaggctggtctcgaactcctggcctcaagtgatcctcctgcctccttggcctcccaaagtgctgggattacaggtgtgagccaccaggcctggcctgctctatacactttctactcatgaatgaggcccaccgcattgtgatgagtaatctgcttatacaaagtctactgagttaaatgtgagtcacatctggaaaatatcttcacataaacttctatgtttgtactggacaaaatcaacctggaaccacatcctagtcaatgtgccacttaaaattaaccatcacttaagccggcatgaagatagaaaggaaccattttttaaagcaatcaaaaacagagacagagaaagggaaagaaaaacaaggaacatatccatagattgtattttttaagtcactttttgaggttttctgttgttttcctgttttctatttcattgatatttggctcttaactatattaataccttttctctatttaaattgaatttcaatgctctccttttccttagatttatgaggtagaaccttagtttattttagatcttgcttctttccactgccaaacattcaatccaatagatttatttaaaactacttacttatatctattttttaaattttaatacatttgtttttgtgttttaaaagttcagtattttctaattttgttgtgatttttttctttgacttatgaaatatgtagttttatcttctttcatttccaaaaaattgaagatttaccacagttcatcatgtatcaattccatttaattagttaattctgcattaaatcataccttgcatgagcttcatattttcaaatttgttaacatttgttttgtggcctagaataggaagtatcatgaaaaatgttccctgtgtatttgaaatagcaatgtttattctgctgctgtgggtatagttttctacgaattcaattagcctaagttggctaatagttcaaatatatattcttactgtttttttgtgtatttattttgtaggtctgtgagagagagagctattgaaatgaacaacactaattgtagaatttcccattgcttcttttgagagaggaaaatttccagtcatggttcttaatactttattctcctgacaaaaggtcacctatgattttccaacactaatcaaggaaaaaaaaaaggcagagttaaagccacactcatggatgccacgggagcagtgggtgaccacatgatgtccctccactggttcagtagatttagcgagacattatattttggcttttaaaaatcataaatctggctaagacatccatgaacaaatttgaagacatacacattgaataaaatatgaaaattaaaagaaaggtaactgcatacgtaaaacattgctatcacagcacctgactcatgggaaatggataaaaagtattataaattcaattacatttacttacacattaaacaaatatgaatttaaaccagttcactaaactgtctcatatactgtttaggtgatggagatttattggtgcacaaaaaagacaagaatacctgctctcagagtggcatcatggaagatggtggagtacgaagctccagcaaatggtccctcctgtgaaattacttgaagtggcaagagtcatgacattaactctcataaaacaacagaatcttgtcccacatttgcagtattcagggatgtgccgatgaagagagagacataaaataatctctgtcaggtcaatttctggccatggaaataattgaacagaaactgcatggatcactctgacaaggaagctggtccttaccaaaatattttggaaatgtcaccacgcaattgaataacagcacctttcagcaagcaacatcagccaaggcagagaagagagacaatctgatttcgagagtgacaatatcataacatccaaaatacccagatctcaagaaaagtttacaaagcagacaaacataaaagaaagcaagacccactaaaaggaaagaaataaatcaactgaatgcattcctcaggaagcacaggcattgcacgtgctacacaaacacttcaaatgaactgcccgtatatgctcaaaaagcaaaaggactccatggaaacagaactaaaggaaagcagggaaatgatgtttgaacaagcatgaaatatcaataatgacaagttttataaaggaaccaagcagaaatactgaaactgcaaagttcaatagctgaaatcaaaatctcaccagaggagttaagtagtggtgtgagcagacagaagaataatcggtgaacttgaagatacatcattgaaattccacaggatgagcataaatttttttagaaaagaataaatgaacaaagcctaagagacatatgagacaacatcaagcatatcaatattgctttatgggagtttcagaaagagaagaaaaacaggaaaggaaaaataaaatacataaagaaaaatagctcaaaacttctaagtttgatgaaagattagaatctatactttcgaggagctcaataaactccaagcaagttaaactgaagtctgcagtgagacacattctgatcaaagcatcaaaagccaaatacaaaaggaaaagtgtaaatagtaacaaaaggagagttggggtagctaaagcaatttcagacaatataggcttcaagttaaaaatgcttacaagagacaaagaaaggcgttataattgatgaaataaccaactagtcaagaagacagaataattatgcaccaagggatagcacttcaaagtacataaaggaagaccaatttgaaaaaaaaaatatgtagatctataatataacttggagacttcacttctccacttttactgaccacctaggccgggcatggtggctcacgcctgtaatcccagcactttgggaggctgaggcgggtggatcatgaggttaagagatcgagaccatcctggctaacacagtgaaaccccgtctctactaaaaatacaaaaaaaaaaaaattagctgggcatggtggtgggtgcctgtagtcccagctactcgggaggctgaggcaggagaatggcatggacccaggaggtggagcctgcagtgagcagagatcacaccactgcactccagcctgggcaacagagcaagactccatctccaaaaaaaaaaaaaaaaaaaaaaaaaaaaaaagataataagagaagagacacaaataagtaaaatcagaaatttgggacaatagtacaaagcttatggaaatttaaattataatagaagaacacacaagcaattgtatgccaaatcttagaagatatggacaaattcatagtaaacacagattgccaatctgactcaagaaaaaagagaaaaaaatcaacagaaatatagaaaataagggatgtaaatcagcaatggaaacttccgaaaaaagaaaaactcaaaaccagatggcctcactggtaattctgctaaatgtaaaaaggagttgatatcaaccataatcaatctcttcccaaaacagattaagaggaagtacttcccagcacattcgaagaccctagcattagcctgacaccaaaggcaaacaaggatagtattttaaaaaaactaaactaaaggctaatattccttaagaatgagcatgcaaaaatcctcaacaaaataaaagcaaaccaaatccaacgttaagttaaggggaataaaggatttcaaagatggttctacataagaacatgaatcaacgtaatatatattaacagagtgacagaaaaagtgtatgatcatctgagtagatgcagaaaaagtgtttcacaaaattcacattttcctgattaaaaaaaaaacacacactcagcaaactcggaatagaaggaaacttctacaaactaataaaggacctttatctaaagccacagtgtacatcacattaaatggtggaagagtaaaagcttccctactaagatcagggacaaaacaaggactcctgcctccacaactactatttgacattgtacagaagttttagtcaaagctcttaggcaaagaaagaaataataggtatctagaatggaaatgaaggagtaaaatcatccctatttgcacagaacccgattctaaacgtacaatatcccaaagaatacacgcacagaaaaactaacaaagtgaataaacacattgaaccaagtttcaaggtacaggaacaactggacttgccacaacttttctttgttatcctgggcattagttctcttggcctcaattttatctttaaaactgggaggcttatactgcagttgagaaaaagacacaaaaagaacctgttagttaaagatggaataagtgaatctcagagggtggacataggttggtgaggtcctgtccatctctgggggcatttttctggagtgtgggaaagcatgttcccagatgtgttagcaagatactcgcaattttctcaaaacaacagacaaggatagtgtagaaatcctcccaccacaaattgtgaacagtgtgtgatgaaataaaaataacagtcatagaaaaagatggcgatgatgatgataatgacttaagtacacaactaaggtttagtgatagaaacatcaggtgttcccaaattcaatgcagcttttcttataaaatgggggcaccagtcttagttcccatatatttaggaattgagggtccccatgaggtgtcgctgcatttctctgggcttttatgtttatcacagaagagctacagcttaccctgcactctccagcccgcaatcaaaaatcatggaccaaagaacaacatttcagcacaagactccattatgggaattgaatctgcccaccctcccgaaaccatatacacctttctgtgctgacatgagaaaaccacagtggatcacactggctcaaagtgaggctggactcctttgtccccaacctcccagatgacaggtgctgtggggtcacccggaggagaaaagctctcctaggctcagtcttgtccaccagcaaggggcagcagagctgcagccaggagcagccagaggctggggctgcccaggtggagcctaaggggtaggcagccctgggaggtctacaggtgtccaaggttcagtcctaggattggaagtcaggacagtccatcctattgcttctggttacagcgaccatgttctgagggtcagactcaaacagcatcacccaggacaccgacaggagccggggcacaatgagagcctcacctgggaaatgcagccggaggcacctgggcccagatgtcagcctgggcagctcccacagtgctggaattccctggaagatgccccaaggttgaggtgctctaggagggggcccagtgggagaggatggggctcccagggctcaagtccttcacccaggatggccatctgagcatcctgccactctcggggcctcgcccctccctctccagcagtgtcctggggagctgaaccctgtcccaggcacttccagggacgcctgacccctcctccctctgcctctccttccagctcgagactgactctgactcatggggcagctcctgtgcgcaggggagtctcaggtgggtggggcggcacattcagggccccggttcctgggtggggcttcccgggcctcctagaggagatgctctccagagggaagggggttctcacctgattcaggccagagctctgaccacaaggctgtccttggctcagtgacaagagtctgctgcattgcagagaccagggaccacccaccatccagagctcacactctgtgcaaaggctgtgtccctgggatatttgcagagaccaccgggcctaaagttgaatttcccatcaatatttcatgtaaacttgtaaaaagcaccagaaaaacacactggactgagaaccccgatgcttttctggggccttttacaagtttacacaaaatactcataggaaaaaataaataaataatggaagagctgaggatggcaatggctgatctatgtggggatgggggatggcctaaaaggagcggcaccatggctgaaatgagagcagacgtccagatgatgccacaagggtgtgtggttgcgtaaatgaaccacctactcctactgaaataattaacaagtatcctgacgacacagtacgttatttagatgaaatgaccaggatgggactaagtaatgctgggggacccagagaggagggggaatatggtgggttcttggtccacctgctgctgagtcaggtttcatcaatgatctctcagcagggccaaactcagccccaagccaggtttctagaaggcccgcagccctgctgagcctggcccaggacagaccacaggtcagagaggtttgggacagtggtcatatggccagtccccaggaaggtgactgtgatcacaggcctcagaggtcgaggctaattttctgaccaaagacccaactccttcttcagtcacctgtgctgcccccacagctagtttgagtgacatctttcaatgaggagtcccagaggatagaaatttgcatgaacaccaagcacttactgccccatagggcctgggaaggaataagagaggcctggggagcccagctgtgctgtgggctcaggaggcagagctctgggaatctcaccatggcctggacccctctcctgctccccctcctcactttctgcacaggtgcttctcccaggccctgccccaggctcagtgcccatagaccccaagttggccctgccctgaaccctgtgcaaagcccagacacagtcttagggtaggacccctgggaatgggctcttgatcttcaagccccctctcctgttttccttgcagtctctgaggcctcctatgagctgacacagccaccctcggtgtcagtgtccccaggacaaacggccaggatcacctgctctggagatgcattgccaaaaaaatatgcttattggtaccagcagaagtcaggccaggcccctgtgctggtcatctatgaggacagcaaacgaccctccgggatccctgagagattctctggctccagctcagggacaatggccaccttgactatcagtggggcccaggtggaggatgaagctgactactactgttactcaacagacagcagtggtaatcatagcacagtgacactggcagatggggaagtgagacacaaaccccttcttcatctattttaccctctccctccagccccaggaccgctgtggaccaacccataagcaggtctggcagaattcacctggttaggagatccttaagctgcttttccctccactcctctaggcagactttgcaggaatgagtcaggagtggatttgggcctggcagggccagactgccctgtgtttccttgcccacggtttgagttgtgaatggagagtatgagtggaaagacagacacagcgggacatccatgcaggcatgaacagcccagagcgacaggggaaactttcagctctcagttcaatgcagtcattgttttatctcttggaagaagcatttctccagtgcaactaagactctagactcacagagcccgaggttgtgggggaggacattaaattttgctcatggatcactaaggacgtttttgagtggagccactacaatttattcattgattcctggactcatggatcctgactgtgggagaaatagtactgcatattgggcactgctgtacagcgcatgccccatcctcaaagtcattgcccaaccttacatgtttttgccatcctgctgccacagtaactgagtcttcaagcagacactgagccattcatataagccagatgccacattggtgaagatggtaagacacttgaatgccatgaggatgggcccatggttgctgtttatttgctgtgatatgagttccttggtcaaagccccctgtggaataccatcatggtgggtgaagcattctgtagtccagagataaaaggtttggcagaagcactgcagtcaaagaaagcaaatccctgtctatactaagtgtgtattctggcaagagcaaagagctatccctgccatgaaggaacagctttaatgaaattaatatcaaccaggcatcctatagggatcttcctgttggtcttcactgttggcagatggtcactcagcagtagctacagccaggtcagctctagtgagtggtagtccactttgatgagtccatggacagcctccttttctgcaaccatagggcatttgttattgagccaattgggcaatgatggcagtggttggggcagactgccaggtgtccagagagccacccatcctaccaacctgtttagcaaaatcaattccttctcatgtcagacttcacaaaatattcacataggagataaatattctcatgctttctgcttgctcacacatctctccctcagacacagttgtgatcaatattctgattgtatttcctgtgtccctgaacatccttgatcatcttccaagtccctgagtcacagcccatgaactaggaacctctgcccgtctctctttgcagatgacatgaaccaggtacactgctctaagttctgccttaaggagagtgttcctccaccactgctgttcagggaagcccagaggccaggtgggatactagcactgtccacagcagggatggctgcatgtcctgcagaaacctctgtaaccccagtctaagtgcctcctcctaggcagctggtcccagggagcccctcaggaggcccaggctgtaaggtgagaggatggccatggggcaggagttggcccgtgtctatctggccacctcttcatgcaacttatttgtccttgtgacctgatccatcaggtctcaggtacagcccagccatgtgatggggaggccactataaatggccacctcggactgggggtcagataacatccagctcattggcagcttgtgtcccatggtgagctctgtggccacagtcacaaagagcccctgttgaggcccaggagcccccccagtcttcctctaatggagctttctgctcatttagaaaaataacaatggggaggttgctcgcctacctcaggtctagggtcactgggaccacctagaccacatccatgatcttgtctgattattctgattccttgttggcttagctatgcattagtgtaaccaagccacagtgtcttaggcactaaaatgccactacttggcccctgcctaccctggggtcctgtcaaccacatcttggtatccaattcagttttagcaccactaagagaaatctatttttatattgagaacaggaaacattagttatttctattgtggaaattttataagacaatagtgtggaaatgttttaagagacattttacttagagtgaaagaccttccattaaaccactcaataaattgctccataaatggccagcccaaaccctgagttcagaccaggcacagcctcggtgttgggaccttctgggaatgggtctctgtcatcaacccttctctaccctcctgtctgcacagccctgggcctcctacatgcagggacagctcccctcagtgtcggtagccctgggacagatgaccatgatcatatgctctggagataacctcggaataaacacgcattttggaacaagcagaagccaagccagacctcaatgtcggtcctctagtataacatcgaccagccctcagagacctctgcttaatttttaggccacaaactagcgaacatggccaccctgaccatcagcagtgcccaggccagggacaaagctgactattactgtgcctcagattgtgacagtgggggcagctggcagggactcacagtgacaaagacagatggggacttgcaacaaactgtcccacttcagcctgcctctcattcttacctgccctctgagcagctgtaggtcaggcctcagaatcaggtgtcctctctggtcctcacctggtccctgcagggccggagattcgtaacagcttttccatactctcagggcctacatgtgttcaataaaacctgtacgggggaagctcgttgaagctgcaaggaccttttacaggtttgtagaacacatgagaacttcaggaatccatatagtgtcacatggctccatgtgtaattacacgtcacacagggaaggagagagctgtttcacagggtgcaatcctactggaattcgtcttttccttgcgtagaaacagcttagtggaagccgtgtctcctctggtttcctagatgagttgaccccacattgtaatggggcacctgaggcctaaggaggacaggagacccaacccctgtgggccccaggagccttcctgtcctgacatttcacagaaactgcagaggaagtgcaggcccaacctttggttccacctggggactgtcttcagggaacactgacctttcccagtccccaaattcccaggacctgtctgacctgactaggtgtgcctccagctccctgatagcttggattttatctctgggctctgggctgctttctgaggagctcactaagaagtccttggtgccaagtgcaggacttgcccctctgctccatatcccgggtctgcaggcacaggggacaggtcctgctaggtgaggctggcaccctcttccaggagggatctctcatcccaggccctagggacaggttcactgggctttcttttctcacttagaatctcttagtctttttgtttccttctttaagagtacaactgctttttggtgaaatcatgtgtatacatcaaagttaacagactactgtcacaagcgcatatatatacacatcctcttcctagatggggtaaccgtggacactctgccatagtcgtctttttgtttctctctctctaccacaagtgagactattaatagcactcttctatgcagaccataatcatattctccagttgcacaagaacgattcttatagttgctcaatttccttgcctttcaggaccctgaagtttcccatgcccacatttggttgccatgtctctctgatccaacagtattccttggaagccgaggcttatgaaacattttgcaaaaagttccacaagaaaactcaagttccttgtgcacagttggaccatgttcattgtgtgcagtagaacctcgttccagtgttgagtccattttatgttttgaccatcaaagggaagggcattatgacttttggggactgagtcgatggaggaaagatagcagtcgatgatgaccttatgcactgacgtgtatgtggccaatgtctatagatggatttggaacttgaaggagctgttcgttctgcagatggaatttccagtgccgcatctccaccacccagccactagcactcggcaggtgctctgtaagaggaagcccttcactgccaatcagccattacacaggtgaaggtgagtgagacttaatagctattaaccctcaaaacaaactgaggaataaactcaggttcacaaagtgactttgcgggaacagcctgaggaagcaagttaattagtagcagaaggttttgcccagagcaggaggaatcacaggatcactgaggacctagtgataccatggtgtggaggtgctgtgaggcatggtgacattcaagaaaacctgttctctacaaacacctacctacccacaggcacagcagacaccccagctatgccaagggctctgtcttcctctagagtaagagcctggtagcaaacaggtatcctctgaaaggcaggtgccccatcagtcagctctgcacgactgaaacaaaaggaaaattgccagagaactttccagaaaacagtcaacctgcttgtgctggtgcattgatggtgacccaggatcagtggaagtaacagtagcttaatttccccatggctgcatgatggacaccgggagagaagtgtggaggcggattaaccaccactctaagtggcttcagccctaggtaagcaggaacaagtgagggggctgagcccacttgtgtctaatcagtcccagcctcagcgactgcatcctggagaccaacagggagtgtatgcgctcagcccctcccagattgctgagcataagcaagaaatttccctccgcacacctgacgcaccacacacctgcccccagctcctcacttacaagacaatatcaaatcagacagggactggtctgggtcccagatcccctcaggttgccgctgtcctctcagatccccacacacagcagactcttcccctcacactcctgttccaggttactcttctccaatatgatgggggtttgctttcattgtttctgtattttttgtatttttatgggtaagctgagccccttttacctggtcttgagtcaggcaggggccacacagagaagaggaattcctccccaggggccagcagtccacggatcaaggcatcagggacctgagcagtaggttctgttcctatgcctggacccaggaggcccatgagcctccagcagtcagtatggagcagccaccaggggggcagcaaagagtcacctgggaaagccacctcgggatggggtggacctgggcatcagggagatgctgacatgcagggagggtcagtgaccacgacctgacacctggagggaaaataggtccttctttttctagagtgttgtccttgacactgatgtaaaaattctagcatcaaattttatcttcagcttttgtagatgctcctatttccctgacaaaggtccaggcacttgacttccccacacatcctctcctcacacacccagttgtgctaaaatgctgtccctgtcatgcacagtgtccttcctgaggtgacacgtgtccccctccctgccctttgctctgggagcccctgtcctgtagacacagcagcttcttcttccctggctgctccccatctccactgtccctgggctttcccatctgtctcctgggaaagctgccaaatcacaggtctcaatttccttgtgaggcacaaaatagttgctcattaaccttctgttgacttaattaagtttttaattccttgatttgttttccccagcaactgaagacaacttagtcataataaacattcacttccaggggtcttgcagtttgctgacccctctcattctctcatggagcaaacattttcttgacctccttatctgtcattggtcctcacagcaccctggggacactgaggcacagcatgtacgacctgccctggagctcacagccaacgaggaaacttaccgcatcccatggatcttccaacactccatgtgcacttggcaaccaagaaattttattcttctctagcactgaggagctgtgccctggggtggggtctgtacctatccaaggcacatgctgtcacctgtagagtgtggatagagggtccttgcattaggttctggaaagtgtcttcaaaaacggatttaggcctacacccaaaatctcctctctggcacaaattattcatgatcaggatacatctagaggcctagaccaaaattcaccacctccctcctgagccagaatggaatggaggaggggactggggaccccagataatttccccatcaccactgtgactctatggccacctcctgcaacagttagggataatcacataggaagggcttcatgtatcctaggaaaaacacccaaagtcatttatgagctctaccatgaccaagtgagcccaggagtcgggttgagcacagcgtggtgtggagatatctgcagagaccgtggaaccagtttgtaaaggagatcctgtaggctgagggtgagagtgcaaggccactcctccccctctctgcatcctttggggctaagcccttctctggaaaccacaaagctcctccagtagcagcccttgactctgctgatttgcatcacaggctgctctcttcagcaaggggataagagagggctggaaggaacctgcccagcctgggcctcaggaagcagcatcgggggtgccgcagccatggcctggaccgctctccttctgagcctccttgctcactttacaggtgctgcccccagtgtcccagccacctacccagctccaaggctctgggtccagcctggcctgacagtgatctcagcagggccctgcctgtggtgtgcaggatgctcatgatcctgctgcagggggaggggctgctggaggtgaaatccccccacactgttcttctgtgctcatggtcccctgaggacacttctattcctgaaactcaggccaggcaggtgggaaggcattgttgggttgagcctctcagtttcaagtctattctattctctccccttttcttgcaggttctgtggcctcctatgagctgactcagccactctcagtgtcagtggccctgggacagacggccaggattacctgtgggggaaacaacattggaagtaaaaatgtgcactggtaccagcagaagccaggccaggcccctgtgctggtcatctatagggatagcaaccggccctctgggatccctgagcgattctctggctccaactcggggaacacggccaccctgaccatcagcagagcccaagccggggatgaggctgactattactgtcaggtgtgggacagcagcactgcacacagtaacacaggcagatgaagaagtgagacacaaaccctttcgccatctatgtcaccctctttctctaattcaaggaggactatgaacaaagccttacgcagatctggttaaattctctttaatctctgcccccagcctgtccctccctccagtccttcaggcggggtctgcagaaagtgcatcagtagttcatttagggtgatgtgatcaggatggactggtgttttggtgactcagctgtgacttgggaaaatagggcctgcatggaagatcagactgaggtagacatccacagttgtctctggatttccataggtggtgacaggccagtccttgccccaaatgtcctagatcagtccccagaactgcccagctcaggctcctgtggtagcctgtcattctttagagaaacaccaatggagtagacactgtgggatctgcccagatcccctgttctgagcttacccactaagcactactgggagcttctggcaggtcagagctgtgtcctcactggaaagtgctgttcggtgcagaaaacagactcctccaggtctatgccctttctcagtgaggttagatttcatgactgcctgaggccgagttctcgactctgcctcaatataggaagacctgaaaatcctcccagctccacagctctctgtaggaaagacttgagacctcaatgagggtcagggtctcctgcccagggttgcctccctcacctcctttcacatcctctgtgcatgcaattcctcatctcagagtctgcttccagggaacccaattaagatcaccagccatccccaacatgggccatgtgggacttcaggaggccactgtatgctggaaagcacctgtttattcctaaattagcactgtgagtatccacacgcccaatgagatctgagtgtttcttgcatttgcatggaatgagaagggagcctgactcgccaggtgctctggggtctaagggagagttggagtcagatctccctgcagggaaacctggggcaggaggagcagccttaccccatgcagggaccacagatgcacccacagggtgagcttaagtatggacactgcctacctccaccctccacatcctgtgtaaaaaatcattctttccacccctcctccagcctatcaaagttgacacttaaaaagccaccacaacccacccttgtcaacaggaaacccattcacatctccatcagccacacaatctccacataaagattcttcaaaaaataataacaatagccatgcaaagtatatgatatatatcataaataattgtacttagattatatatgaaaatgatactctttttgatatgctaggtaaataaaatacattatttaaactcattgacttcttctctttgtatttataacatgatgactagacagtgggattcccatgaggctcacatcacattgtgattgaacaaggctggtctgcagggcttcaggttacaggggctgtggagtgacctggtgcaggaagccccgtctccatccataggacatcagtgtgaacccagggagaggcgctggtataagagagatgagaacacaggtgtgaaccacctgcttgtgcaggggactgagccttcactttgagccaaataagttttctttcccaagttcgatcctgaacaagagggctttctggacttctttttgttttcaggtttgtgccccttcaggtttggggctgtctggagtcccagccaggggacagtgaggaaatccagcagtctcacactgactctgttgtatttcatctgctggggccatcccaaactgctgcgtaccatttcctttcctggtgctcaaatagctgctccatgcacttgtcatggttttatagctcaatctagatgggaagacaggatagtgtatgttacaatatttaaatagaacctgaatcccttaatagttattttaatatggaacattaaaagagttgcatcataggcaatggggaaagatgaagaaagattaaacgcatttggaggaaaaactaaaaatgtctttattgaatgtctgtgtgtcttcagtgacgaagggttgagagaggtcagctttaggttgtcctgaggatgtgctcagatgggggaaagtaagaaagcaggaaacgtgcatctctgtgacctgacacataaatcacagtaaaatggaagtaaatctttcaataaacctttcaagataacatcactctggtgcacatagaaaggcctgttagcaaactttcccttttccctgctggctcatatccccatggatcacctgtatgcagaacggactctgtggtctccatttatcaggctgagaaccagaggctgggaaggacaagtcacctgctcatgagtgggaggggcaggattgggagcagcggactcaggctcaggactgtggccctggttggtgctccttgttcccttcacagggtcccacccacatgtgcccgtgtggatgtgggtgcactgcctggggtggctgatgtgctccagggatttgatggtgcagatgcttcaggacaaagcatgggagtggggatgggacgagctgccgctgggcagaccaaggaccaacgccacccagcagaggcttccagtggggttgggcagccccatttcctgagaatagagagaacctggcaatgagtgccagaaagaagttacttcgaggtgtgcccaggcctggagggtcacagagacacaggcaccacacagcagagacactgaaggccaagagctcactcaggtgaagggcttcaacagatttttctctcctgagcaaatcacgtgcaaagaaatcaacttcctgtcatcagaatagacaatcaggactttagtctccttggctgagccccgctgtcaagggaagcagaagtctctaagcccaggcccaagtgagggtggggtgagaagaggagctcaggatgcagatttgcatggaggtcccgcccttctctgaggcagagggataagacagggctgggggcaggcccagtgctggggtctcaggaggcagcgctctcaggacgtcaccaccatggcctgggctctgctcctcctcaccctcctcactcagggcacaggtgatgcctccagggaaggggccacagggacctctgggctgatccttggtctcctgctcctcaggctcacctgggcccagcactgactcactagactgtgtttctccctttccagggtcctgggcccagtctgccctgactcagcctccctccgcgtccgggtctcctggacagtcagtcaccatctcctgcactggaaccagcagtgacgttggtggttataactatgtctcctggtaccaacagcacccaggcaaagcccccaaactcatgatttatgaggtcagtaagcggccctcaggggtccctgatcgcttctctggctccaagtctggcaacacggcctccctgaccgtctctgggctccaggctgaggatgaggctgattattactgcagctcatatgcaggcagcaacaatttccacagtgttttaagtcaatgaggaagtaagatcaaaacctgccctgggctctcaggccccttcttgctctgcagatgcttcctcacgctgtataagggtttcctgcaggatggccttgacaattctcctctctcagctcctctcctttcccaccatgaggtctaaaaggaaacctgctcgtgatttctcgttcaggactgtggcaacttccttttgcttgtgtgctctggtcccttaacgtgcaactattcctagctcttcaatgcagggacgtagggacaaggagtttactgcttggtgcagtccctcctgttttcaggaacatcctcattctaaatgcatcccccatctgccacactatgcagatcaatctggacagaagccatcagggggatggcttccagtttccaggaattgcatcttgttccactctgtgtccaccacgctctaatgaagatggccctcctagctggtctattcctctgcacctgggtcctgaagcagtgaccactttaagaagacttgaagatgtttttgagggattaagaacaaagaggatgctgctgtttttctttttattgctcctgctctttgccgaaattcctcaggttgctgagctggggagattttgagtgacaggctcagtgctctcgcagaattctcctcccctcacatcgctgaggccctgtcctggaaactcctcacaagtggacggtcttcccataggatgggggattccaaaatggctccacaggaaagagttaacctgagtccacctcccttcctcatggacatcgagcatttctaattttcatggctgtcaatacttttgtacctggaatccctaataatctaatggtgagaattgatttagaacacattcggacattagctgggtccaatatttaaattttctgagccagttgttaaatacagctattatcatatatagtttaggctccttaaacttcgattatacagattatatttaaaacaaagtaactagtttactatatatatttacaaagtaactactatataacatcatgttgtgtacctgaaatataaacactaaaatttatttcaaaaaccaaagtgtattgtctattgatgcataaaaaaacactcacaaaacttagcacactaagagaacacatgtctgtgaccttgtgacttggatgcacctagaattgggagtagcttagtttggtcattctcgctcctggttaatcacgaggttgcagccaagctgtcaggccaggctgcattcaggctacatctgccaaagaggttaggaactgtggaagcctccctctggctgtggaagcctccctctggctgtggaagcctccctctggctgggagacttccgcagttcctaacctctttggcagacgtagatcatctcaaggataaaggagagagtggagtgaaggcccctgtccttgtcctccatgtaaaaggccatcccatgcatgcactattttttattctttgctgagacatcctaggcatagagcactgccccattcattcaaaggttgtagagtattctatggtagaattttagccaactcacttttaatggttattatcactattttgatcttataaataacactgcagcgaacatccttatgtagactcctttgattttatatgtagacatgaccatagaataaatttctagaagtcaaattgctgagtcaaaaggatgtgtgcttgtaattttcactcactgtcctcagattctcctctagaggggttatctacaaattcgcaatgtcagccataaatattcgaacagagtacactggggaaagtttaaatgtttttcaacctagcagatttaaaaatgttatctttttttagttttgatttctcctgttctgcttgaagttgagcattttctctaatacttcagtgctatttatttttataatttggtaaacattttcttaaatgtccagataagaaggattttggtctgtggttcccaagagtcaactttgaggatattctgtaggtatttttagcaccatttatagtgtaaccatttaaacctataaaaaccactctcagctctggggccatggaaaaacaggtggcaggacagggatggcccacaggatgtggtttaacggtccctgatttgtagggtaatttgaagtttgagaattccaccgcatatgttctaggtggagatctctatttgaaggatactgtattttacctcctatagtggcctgaggcttttggataagaacatacttgtatcatctatttaattggatcttgggtcttcccaggacagccctgtgtcacagtctcatgtttttcatctcatccatttgctctgagttttcagaaagctttagtatatcagaaatagactgaccctaggtggaaaatcagaggtaccgggagcagcaaatggtcagggaagcttgcaccaactctggaataaaccagtacaggctcagagaaaaacatcataaaatcagcattgtagctgaaaccaaaaacatgcatgatctttgaagttctggggattataaataaataaatgaagtttaaggtttaaatgtgttgcaaatttacataaagcatgtagattttaaaactcagaatgcagcaatgaaatatggaagcttgagattttaagctgttaaggccctacaacaaattgccaggaacagaacaggaacttgatagtcataatgtcttatgctggaaattatcattttctctaaatgaaatttttttcccttttttcttagacataaggaaacatctcattgaacacccttcttttccactgtcaaacacccttacccagaaaggaactgtaacattaagtaggaaacaactgctttttttcataactattgagagatttctttatttgcacatcaaaatgttgattgtcaatgctaaaattggaattagtagtttaatatgcacacaagagattaattttgtttggattatcccatttctgtctattatttgtcttagttaactcagacatattctgcttttggtattttttgttttattttctttgccaactacatgtaaaccaaaaataaaattctaatgctcccccaacaaccccaccatctgagtggactctcttctcttggtgggggcactccaaagttaatctgaaagactggttcaggccatggcagaaaaggggtgtcagacatgtctcattaagcccttttcctttttggaattcaggaaaagccaacctgcacttaacatcaatacaaatcttaagtctgataagaaacatttacaatctattctctctgaagcctgctacctggaggcttcctctgcatgataaaactttggtctccacaacttattataacccagacattcttttctattaatactttcaaccaactgctatcagaaaaatttaaaatctatctataatccagaaggccccacaaccctgcctcccatcaccctcttgttttgacttatcctgcctttctggactgaaccaatgtatatcttgaatgtatataattgatatatcttgtctccctaaaatatataaaaccaagctgtgccccaacctccttgagcacaagctctcagggtctcctgagggttgtgttcaccagtcatggtcactgatacttggctcaggataaatatcttaaaatattttacacagtttgactctttgtcaacatatggctcttttcaaaacaccatttgacacccagacataacccgctgctaatgattacaaaattcaattttattagcatttaaattattactttaaattatttcaagaatgcatggatgtgatttcccccacatctaactcacaaatgttgctgatgctgacttgctcttttctttcagtcttagcaaataaagagggagtttacttttcttgataccagaagataacaggagaaagtaggtgaaactcccgaaagctgttatcgtttccaccctcaggatgaatcacacaaggagtcacctgcacttcatttggatgataaataaatgagatggatcttagagttggtgctgatctagtcaatgatttgggatgttgggctgaggtgaatgtgtttcacaggtgagaaagacatgagttttagagtccacagtgtggagggttattggctgaagtgtgcccgagaattcatacaatgaagctctaatcacagtgcatgaatgaattggaacataggtctttaatggggtgattaagtgaaaatgaagccagtaggatgggttcttttccatctgacaggtgtcctctgaagatgaagaaatttgagcacacagaaatgagacaccatagatgagcatgcagaggaaagatcacgtgaggacacagaagaagggagtgatttgcaagccaaggagatgttacagtagataactaggcagacgtgacagggcaggagaccccctgccccaggaatgtcacgcaagcatcagatgatggtcaggtagttgttaaactgtctctgtgaattaataattagtcacagccggcaccaaggaaaggcggtctcccaatagatagaaaatacctgaagctggtgatcagcagctttctgataagatctcaggccttgggtgagtgggctcaagcaggcaaactaaaaggcaaaacagaggccaggcatggtggctcacccctgtaatcccagcactttgggaggccgaggtgggccaatcacttgaggtcaggagctctagaccagcctgaccaacatggtgaaaccctgtctctactaaaaatgcaaaaattagccaggtgtggtggtgcatgcctataatcccagctactcagaaggctgagccaggagaatcacttgaacctgggagatggaggctgcagtgagccgagattgcatcactgcaccccagcccaggtgacagagcaagggtccttcaaaaaaaaaaatgcaaaatagcagagtttaacctggatctgagactcccatgctgcccttccctccagccctacaggcaggctctgcagagagtgaatcaccagtaaatacacaaacaaatatgattacgttccttttgtttaagaagtagaggaatgattgaatatattaagtgaaaataaggaataccaacacaaagaaaaatttaactgtaagtatggttaaaaatacactgggtgagatagacaagttagatgtcgcaaaacaagagattagcaaactgtatagtgtaacactagaaactattcaaaatgaaacacatagcaaaaaataacgataaaaataaacagcatcaatgagatgtaggagaacttcagacaggctaatatacgtgtaattgaagtcctcagaatagaagatggggtaagaatgaaaagaaaaaatatttgaatgaataatgacaaaatatgttccacatttggtgaaaaccataaactgatataacccagaagctcgataaaacttaagcataggaaacacaaagacaacaactccaaaacacatcataatcaaattaataaaatctagtgatgaaaagtagtcatttaggacaaaactacaaagagcagatttctcattaggagcaatgcaagcaagaagatagtgaagcaatgtcttgaaaataataacatgcaaaatccaacaaccttgaattctttatccaccagaaacatctttcaaaactggaggcaaaataagactttttcagacatgtgaaatcctacagaattgatcaccattagactctcgctattagaaatgataaaggacacccctaaacagaaagaaaataatcctacattgaaatgtggtttgacacaaagaaatgaaaaatcagatatggtagctacctggatcaattagaaacctctgtattatgtaatgtctataaaaagaacagtaatgtctataaagagaactgttcagagaaaaattaataagaatacactatgatttgtaataaaaataaaagcaaactatatgacaaagcagaaaagcgaaggtgggtgaagaacatgtaataatggttttgtactatatgtgaatatataatagcacctgaaggtagattttggtaagttatgtatttactgtataccctaaaacaaccattaaaataaaaccctcaacaaaaaagaaatatggctagtacgctatattagacttgtccaccaaaaattaataggatatgtatggatatgaatatatatgtataatgtatctatatggtgagagagacagacagaaacttattttaagaagctggttcatacaatagtggtggctgatggacaaaatctgttgggcaggctataggctggaaatttaggtaagagttgatattgccgtcctgagttcaaattctgcaagaagctaatgtttccccaagacagcatcagctgttattatgcacactggctccaaatcgaggaaagtgtcccccctgaccattagcagagctcatgccaagaacaaggctgatcattaacatcaatcactgggaaacttcagtatttattctaaaaaccttgaactcattaatgagactcacacacattgtggaaagtagtattgatacaggagacagaaattatttaggcagatagtgagggtgacagggtcctcagcagagcttctcatctaacaaaaagcagccctaaaaatcatttcttttataacaaagagcagcctgaaaaaatcgtgctgcaaacatagataagcaagctggaagcttgcatggggcaatgccagcagctatgccaatagaaaagtactacctgggggtcagccatgtccaacatggaggctccatcttccctttttttgtcaccatgtgtatagcaatagagaaatgggcaacatggagcagctcaggcagataacccacctgcgtaataacagattagggcagggttggccagaaatgtgcaccctatgcaaatggtacacctagtcctaatcagtttttcatgccctgtgcaagtagcacacctggtctaaccagtctttgacacccaccttatgtagatcagatactgcctcctcaccagctcatctataaaattccctacatttcactgcagatccggcaacccatttttctgggtcccctctctgcagcagagagctattatctttctttcacctattaaacttctgctgtcaacctcatttgttgtcagatcatgtcctagttttccatggccctgagacaatgaactttgagtattcaccccagacaatgaggctatttcaatatgcttatacaaagtctactggtttgaatatttatcacatttgaaaaatatcttcatgacaatgtctacactggtgcttaacaaaatcaacctggtaccatgtcttagccaatctgacacttaaaattcaccaccacttaagccaggagctaaagaaaaccaatttttaaaaataaatttcaaaagagagaaaaaggaaagaggaacaatgaacatataagacaaatagaaaaaaagagcaagatggtatattttaacaaagtatattcctaatcacattaactataaatggtctaaataccacaattaaaaggcaggtattatcatctatattctaaaggagttcaggtagggttggtatgctttcttccataaaaatgtgataccagtgaagctatttgggtataggtgggcttttcttagcacggagattttaaattgctactttaatatctttaagtgtcatagacttattcagattttctatgtattcatgagtcaattttcataatttatgtctttccagaaattttacttcatttatctataattttggcatttactgttcataatattccctataaccattctcacccttttagtgtctatagtgatgtcattattttagccatggttttggcaacttgtgtttctttttcttttttttatcatggtcactttacctaaagataaaaatctattgattttattaatctttttgaagagccaagtgttttttttttttttttttgaggttttctattgttttcctattttctatttcatgaatgtttggctgtgatccctattattaccctctattcacttagaatttgaatgttcaccttttttaggtttatgaggtagaagcttagattattttctttaattctttcttctttccaatactaagcatttaatgccatagtttttcttcaaagcagacttagctgcattccttaaattttaatatgttgtgtttttatgtttaaaaaggttcagtatcttctaatttatgttgtgatttttctttgattcatggattacttaacagtctgttctttcactttcaaataattgaagatttcctatggttcttccggtattaattcaagttaattagttaattctgcattaaattatatcttctatgattttcatcctttcaaatttatcaatatttgatttatagcctaaactatgaactatcatgaaaaatgttccatatgtatttgaaaagataacatgtattctgctgttgtgggtgcagttttctacaaatttattataattaagataacttggcaaatggttcaaatctatattcttactagatttctgtgtagttattttgtagatctctgagacagagctattgaaatgaacaacacaaactgtagaatttcccaatgattattttgagagagatcatttttaaaatcatggatctaaataatttattctcctcacaaaatgtcttctatgatttccaaatactaatcaagggaagaaggcagagttaaactcacacttgtagataccacgggaacagtgagtgatcatgtgatgtgcctccagaggttaggctaatgtagttagagtggtttatatttatttatttatttatttatttatttatttatttatttagacagagtctcgctctgtcacccaggctggagtgcagtggcgctatctcggctcactgcaagctccgcctcccaggttcatgccattctcctgcctcagcctcctgagtagctgggactacaggcacccgccaccacgcccagctaattttttgtattttttagtagagacggggtttcactgttagccaggatggtctcgatctcctgatctcgtgatccgcccacctgggcctcccaaagtgctgggattacaggcgtgagccaccgcacccggctggttttttttttttttttaaacacacagttgggctaaaatatccatgaaaaaatttgaagcatgtaccttgaataaaatatgaaaatcaaaaaagttaattgcacacgtacaacattgttaccacggtgcctgccgcatgggaaatgaacaacaagtgttattaattcaattctattttcttacacattcaatgaatatgtattgaaacaaattcactgaatggtcccagatactgaataggtccttgagatgtactggcaaacaagacaaaaaaaaaaatacatgttctccgggtggcctcatggaagatggtggagtaagaagctccaagaaatggtccctcctgtgatataactattgaagtggcaagaaccatcagcattcactctaataaaactatggtatctcatcccatatttgcagcatccagggaagagctgaagaagaaagagacaggcttaaggaagtctctgtcaggtagatctctgaccacagagataactgaacagaaatttcgtggatcactctgacaagaaaggtagtccttgcgaaaatattcaggaaaagtcacaacacaaataaacaactgcacccctcagatgaacaactgcacaatatcagccaaggggcataatctgataatctgatcctgggagttaacaacatcacaatattcaaaatactcagatctcaacaaaaatttgcacagcatacaaagtcacaagagagcacgactcattcccaggaaaataatcgactgaaaatcttccttaagaagcattcatttgctcccatcttctcccttggttatataacacgtccttccacatatacttgattagagcttgtgccccacaaacatgcctggcatgtacattagtgacttctgagagggaggtgggggcaggaaacagtccctctggatacatttcgcatcacatgaaccagtgaacacatctctgcaaggtcctgcattctaataaacaagatttttctgtttaaaagaaaacttaagtctttcagaaaactgcatttcaaaagggaaccttgtctctgctgcttgggctgcagtgaggacagatttactaagtgctggttgctgtgttttgtcttctagtgtgggtacacacatctagaaaagttttaaagaagattggggaacccccacccagcactggtgggactttgagtttgctacggttgtgaacagaacatggaacagaggacaaggtggcccctcctgaagatgagagttttgcttcttgctggaagtccctggactcctggagtgttctcaggggacctcttaacaggatctcaagggaaagaatccagggtactggatccacacaatcaacctcacggatttctgagtaggtcattaacctatcatgcctttagcgttatctcaaattatacatggtatcatctcaactaatgtctaaaacaatatacggcatagatatctaaagaactagtggtacatggaggatggctttctacctctgagccctagaagggactgtgggccttggtttggggactctaatgactctaagtcccctggtagtgctcaagtgcaaagggaatgactgacgctttttttgaggccccttctattgtgtaaaatttattctgtacttgtgacacccacctggtccttcttctgaacatgggaaattgccaagatgaagtctccaggctaacggctcagacaggagctcagataaacatgctgggaagtggagagcaaattgacattcaaagctcctcccaacaagcttcaagaagagggtaacacaagaagtccttgtaaccaggttccacggggcagcctcaagcagagctcttggaagtccctcccaccacggtctgggtctccttctacctcctgcccttcattttctccacaggtcagaacatccagggaattcagggaaaccctttcactgctatttctccacaagctccaatcctcaggggcattctttccagttctcccgagcattcggcatcattcatgaaattctatgtttccaggtctctgtgctctggctgtgctaactcagcccccgtctgcatctgcctcactgggagcctcagtcaagctcacctgcaccctgagcagtgagcacagtacctacatcatcaaatggtatcaacagagaccagagaggtccccctagtatataatgaagtttcacagcgatggcagacacagaaaggaggacaggatccccaattgcttctcgggctccagctctggggctgactgctccctcaccatgtccaacctccagtctgaggacgaggctgagtatcactatggagagagccacaagattgatggccaggatgggtgagccacacacagtgacacaaagggaaagtgaggccaaaaccccccacctcccctttctcctcagggactcagagtcagcagtcacatgtccccttccaagtccctgagacttctgactctcctcctgcagagacacccctaggcagaggcagatgcaggccatgatttaggccattttgacaactcatcattctgtctcctcaacaccagtctgtggggaccatactaggagagaccagagcagcccaggcagaaggaccctgagagagtggccaggctgagatgaccgtgtcccagtgtctcactgtgccctgtgctcccttaccgggctctgccccaggaaaggacatggatcttgacctgtcaccccccatttatgagagttcaatgtgtgtgcatcctcgttagcacttgatattgtcagtttttccttaaagtctttcagatagagctgtagcgatatctaattatgtttttaacttttatttctttaatgacttattatgctaagtatcttttcaggtacttatctgtcctttgtatgtcttctttggtgaaatatttaatcaaatctttgcatttttaaaattcaggtttctcaggttcacatttcctcatgtatttgtatgagtttatatgcatgcatgtgtgtctatgcattccattctgtgtgatttcccaacatgtatcagcacaggtatccaccactacaatcaagacacaaaccaggtccatcacaacatttcctggtgtttccctttgataatatctacctcctcccacccagttccctcccttgcccaaccctggcaaccactgatttggttccctattcctaaaattttgtcttgcaaaaacgtgatacaaatacaaccctattgtagtagacagactttggggttggaattttttacttagcatcattccctataaagtcattggaaaggtgtgtgtatcaatagtcagttcctttcaattgctgagcagtatctcttggtattagtttaacaaaacctgatgaattactcacccaccgaagggtatctggattgttttcagtttggagctactacacctgagggtgctacgaacatcagtttgtatgtttcttgtgaacataagtattcagttctttgaaatgaaggtccaatattataattgctgtgtcatacactaattaggtctttagttttctgagaagctgacaaactgttccctgaagtgaatgtaacatttttttctggccagtaatgaaggaatgatcaaatttctctgcttctttgggaattgtgtgtttttactctttttttaggtaactattgtgataggtgtgtagtgatattccattttttaaaatttcatgtctctgatcgttaatgatgatcaccttgtcctgtgcttatttgccatctgtatgtcctctttgatcacgtttgtgccctttgcacattttctaattagattgtcttttgttttgctcttaactggtattcagtgttgggtgttttgtttttttgagacaggattttactttgtcattcagcctggagtggagtgatgcaatcacagctcactgtagcttggactttcctgactcaagcaatcctcttgcctcagcctcccaagtagctgggacaacacgcacacacactgcctcactaatcgtttacagaattttctttgtagagacaagatctccctatttgcccaggctggccacgaactccttaggctcacgcaatcctccctgctcaacctcccaaggtgttagaattacaagcatgagccaatgcactcggccagttttcactgttctttatgtattttttatactagtcatttactggatatgtgattggcaaatacttaatgccagtctgtagcttctgttcacatcctctcaagagagatttttgcaaagcaaaaattgatggttttgttaaggttcaatttatcagtctttcatttcatgacttgtgtacttggtgaagtctaagaattctttgcatagacatagatcttgaagattttctccttttttttttctttttttttgacagagtctcgctgtcgcccaggctggagtgcagtggcgtgatctctgctcactgcaagctccacctcccgagttcacaccattctcctgcctcagcctcctgggtagctgggaccacaggcacccgctaccacactcggctaatttttttgtatttttagtagagacagggtttcacagtattagccaggatggtctcgatctcctgacctcatgatctgcccccttcgacctctcaaagtgttggtattacaggcgtgagccaccgcacctagccgattttctcccatttttaatataaaaataatagtatcgctgggcacggtggctcacgcctgtaatcccaacacgttgggaggccaaggtgggcagatcacaaggtcaggagattgagaccatcctgacacggtgaaaccccgtctctactaaaaatacaaaaaattagccgggcatgatggcaggtgcctttagtcccagctacttgggaggctgaggcaggagaatggcgtgaacccgggaggcagcgattgcagtgagccgagatcgcgtcactgcactccagcctgggtgacagagcgagactccgtctcaaaaaaaaaaaaaaaaaaaacagataaataaaaaataaatctgagagatggctgagcaatttcactgagtttcatcatggaattctggcctcccaaacaccagcatggcccctgttcctacaatctcctgcttcaagatcaacccaaccctgctacccagaccagatgctagatggtcaagacagggctgtgagagctaaagaatcttcagggtccacgatgaatttacattggagcttccttttccacggatattcacatcaatagagaagatgactgagttcttgcctacctctgtgaatacctgagacatgaactgagatgtgtgtgtgcatatggtgcgggcagcacttcctcactcaatactagggagagtgtgaggaaactggatacagacctggagatagggcacatttttacactctctattaagccctgtccttctgtgctcaccaaggagtcacccaacaaggccacaacaggaagagaagcaggtttctatgaagagacttctctttttgtgatgagggcccaggaagtccactgtctagctatgaactcagaggcagaactctgatgcatctccaccatgacctgaatccctctcctctactcacccttcctgctgtcggcacaggttctgccttccagggctcagccccataagactagggatcagcctggccctgaccttcagctcagcacagggagtgacgcagtgtgtggggctctgagaatgagaccctcatcttcagactcacctctcctgtcctatcttgtaggctcagtggcctcctctgagcggactcagttgcctgcagcgtctgtggctttgggacagagggccaggatcacctaccagggagacagcatagaatacttttatgcaaacttttgtaccagcagaagctaggacaggtccctgtgctggtaatctatggtgacagcaactggcactcagtgattcctgaacaactctctgactccatatcagagaacatggccaccctgataatcaatgggccccaggctggaaacaaggctattactgtcaatcatgagacagcactgatactcatctcacagtgacacaggcagacaggaaagtgagacacaaaccccttcccacctatgtcaccctccccctccaacctcaggaggacagtggtcagagctataagcaggtctggcccagttcactcagatttgagacccccaggctgcccttccctccagccttccaggcaggctcagcagagtgtaaattaagagtggatacacaatgaattattagaattgtatttcagtttttcaagaagtagaggaatgattgaacatgttaagtggaagtatagaataccaaaaaaggactaattgagcttgtactgctaataattacagcatctgagacattaaaaacacactggatgtgattaacaacagatgatgcaacacaaaagattagcaaactcaataatgtagcactagaaaatattcaaaatgcagcacataaagaaaaaataatgatgaaaatgaagagagtgttacagtatatttatagaaaaaatgaagagtgagttataggacaacttcaaacagcctgaggttggctgggaggggtggctcacacctgtaatcccagcactttgggaggtctcggagggagaatccttttgagactagaagctcaacaccagactagacaacataacgagacttcatctctacaaattttttttaagaaaattaactaggcatcatagcctgcagctgtagtcctacctacttaggagcctgagacaggaagattgcttgagcccagaaattcaagatggcagtgagtgaggtacgatcatgccactgcactctaacctaggacacagagcaagttcctgggtctcactctgtggttcaggctggagtgccatggtgcaattacagctcactgcagccttgacttcccaggcccaagagatcctcccagctaagcctcccaaagtttctgggactacaggcatgcatcacatgcctggttaattctttgtattttttgtagagatggggttctccctatgttgcccaggctggtcacaaactcctgggctcgagcaatcctcccgactcagccccgcaaagtgttgggattacaagcataagccacgccacctgatgtgaagaaatatttaaatacaacaacctaaagtatgtataattgacatccatggaatagaaaagatgaggtggagggtcagtagaaaatatatttgaataaataatggccaaatatgttccacatttggtgaaaaccaaaaattggtatatccaagaaggtcaacaaaactcaagcacaggaaacatgaagaaaacaactccaaaacacatcataatcaaattataaaatctagtaatgaatacccactttaaagtttaattccaagagcacatctctcattagaagtaatgcaaggcacagtggaacaatatttcgaaaatgctgaaaggaaaaacttgtgaaccttctgttatttatctaacagaaataacattcaagagcggagggtaaataaaatgttttcagacacataaaaacttacagaattgatcactatcacttttggcattagaaatggtaacagacatccatagacagaaggaaaatcatacccagttgaaaagcaaattcacacgaagaaatgaaaacttcagatagggcaatgacatggatacctatagaaacccctgtattatgttaacatctatgaaagataactgttcaaaggaaaattagtaaaaaaatcactgtgatttattgtgaaaacaaaattaaattatatgacaaacagcacaaaagcagagaggagtgaagaacatgttataatggtcttataccctgtatgaatatctaatcacacttgaagacagattttggtaagttatatatgtaccattaaccctgaagtaattattaaaataaacccttttaacaaaaaagaattatgactagtagtaacctgtattaggattctccacagaaacaatatcaatcagatatgcgtgtgtgtgtgtgtgtgtgtgtgtgtgtattgagagaaaaaagagtgaaagaaatgtattttgaggaagtggatcatatgattgtagtggctgacaaggattaaatctgttgggcatgctgaagtctggaaattcaaataagagttaatgttgcggtcatgcatgcaaatttagcaagccagcacatcaggaaatctccatatttgttctaaataccttcaactcactaatgagtcccacctacattgtgcagagcaatctgcttatacaaggtcaactaattaaaatgttcatcacatctgaaaagtatcttcatgttaactcctatactggtgtttgacaaaatcaacctggcccatatcctagcctatctgacacttaaaattaaccatcatttaagccagaaagaaaattttaaaaatatttctaaaaataaatcagaaaaggaaacaatagaaggggaaaaataacgaacatatgggatgaataaaaaatgaggagcaagaaggtatatttcagtaggattatattactaatctcattaattgtaaatggtctaaatatcacaactaaaatattgtcaaattgaaattaacagcaagactcaactatatatgctacctagaataaacctacttgaaattttagaaccacaaaaagccaaatacaaatcaacgacaatcttcccaacccctggtttcccaacaaagcattacaaaccgaattcacagggattaacacatagttaaaaaatatgtctcacttccaccaacactcttacctctcttcagcctctaatgcctagatcccagtaccagagttgcaagaaaacagggcacacaaatgttaaatcaaggttactaagggtcaccctcaagaggtaggtgaaaagagaatgagggaattgaagccacaagggtcccacttgcatggggcagctcctgcatcacaatgttgattgatacattattgatgagtttttgtccatgttcatggtggacataggtctataactttcttttcttgtcatgactttggctttggtattggagtaatgcaggcctcaaagagtaagtagaaaaatgtttcccctgctgtataatctgaagaagttcttgtaggattggtatcatttcttaattaaaaatttgatagaaatttactatttaaaactgggtgagcttttcttagcaggaagacttttaattgccaattcaataccttcaaataccatagatctatttggattttccatttcttcctgagtcagttttgatcatttatgtcttttaaggaatttttccacttaagtcatttatacttttggcattaattgcttgtaataatttccctaaccattttaacttttgtaaggttggtagtcatggcactcttttatcatggttttagtactttgtgtcctctttcatgttttcctagtcagtctacctaaaagtaaaatcaataggttgtatttatctttttgaagagccaagttttgttttttagaggctgtctattgtttttttttgctatttcattaatatttggctctgatctttcttattaacttttcttttttttgctttgaatttaaatgctcacctttagcctaaatttatgaggtacaagcttagataattcattttagatctttcttctttccaacattaagcattaaatgcaatagatttccttcaaagcactgatttaagctgtatttcttaagttttgatatgttgtctttttgtgttttaaaggttcagtatcttctaatttatgttgtgttttttctttagctcatggattacttagttgtgttctttcctgctcaaataattgaagatttcccatagttcatcaggtattaatccaatttaattaattattttggcattaaataataccttctatgatattcatccactgaaatccactaagatttgacttgtaacctagaacacagattatttcaaaatcatttaaaaatgtgctaaatgtatttaaaagcataatgggtattctgctctcatgtttgaaagtgtaatgggtattctgccattgtgggtgtagttttctacaaattcaattaggataaattggctatttgggaggctgaggcgagcaggtcatctgaggtcaggagttcaagaccagcctggccaacatggtgaaaccccgtctctactaaaaaataatacaaaacttagccaggcgcggtggcaggcaccttaatcccagctacttgggaggcagaggcaggagaatcgtttgaacccaggaggcagaggttgcagtgagcctagataaagccattgcactcaaacctgggggataagagagggacttctctcaaaaaaaaaaaaaaaaaaaaaaaaaaagataaattggctgatcattcaagtctgtatcttgattgaatttctgtatagttgttgtgtggatcaatgtcagggagctactggaatgatttaacactaattttagaatttctgattgattttttgagagaggaaattttcatgggtctaagtactttattcttctgacaaaaggccttttatgatttcccaagactaatctaggaagaaaaggcagagttcaagccacagttggtgataccatgggagcactgaatgatcatgtgaggtgcctccactggttaggtgtatgtaaatgaagattttttaaaaaactaattgggaggccgggtgcagtggctcatgcctgtaatcctagcactttgggaggctgaggcaggtggatcatgaggtcaggagatcaagaccatcctggttaacacagtgaaaccccgtctctactaaaaatacaaaaaaaaaaaattagccgggcatggtggcaggcacctgtcgtcccagctactcgggaggctgaggcaggagaatggcgtgaacccaggaggcagagcttgcagtgagccgagatcgtgccactgcactccagcctgggcgacacagtgagactccgtctcaaaaaataattaaaaaattaaaaaatacaaaacaaatctgggctaatatgtccagaaattttgagaaaatgtatgttgaataaagcatgaaaatgtaaagcaaggtgattgcatatgtataacattgctaccacaaggccaacctcatgggaaagaaacaaaaactgttagcagttcattatgtttacttacacactgaacaaacatgaattgaaaccaattcaatgaactgtcccagatactgtttaggtacttgagatgtattggtgaacaaaagagacaaaagtacctgatctcacagtggcattatgaaagatgatggagtaggaaattccaggaaatggtcctttctgtgaaataactactgaagggtaagaaccatcagaattaaccataataaaatgaggaaatctagtcccacattcgcagcattgaggcaagtactgatgaagaaagaaacaggcataagaaaatctctgtcaggttaatttttgcccatagaagtaactgaacagaaactttatggatcactctgataacaaagtccttgcaaaattattttggaagagtcaactacacaaacgaataactgcacccttgagcagcaacatcagccaagaaggagtagggagacaatctgattttgagagttacaacatcacacattcaaaatacacagatttcaacaaaaacttaaaaagcagacaaagttaaaaggaagcatgacccatttacaggaaaaagtttaatgaactgaatgtactcacaaggaagcaaaggcattggacaaatgacacaaatacttcaaataaccatttacatatgttcaaaaattcaagaaaaccatgcgagtaacaaccaaacaaaactggaagaataatgttagaacaagtgaggactatcaataaagaaaaagaagttataataaaagaacccaagcagattttctagaactgagaagttcaatagctaaaatcaaaatttcatcagataagttcagcagcagtttgagcaggcagaaaaataatcagtaaacttaaagatacattgttgtaattacacagaatgagcataaattttaaaagaataaataaaatgagcagagcctaagagatacatgggacatcatcaagcatatcaatatacgcattgtgggagactcagaaggaagagaaaaaagaaagtataaaatacatgtaaaaataatggctagaaacttccaaaattgatgaaagatatgaatctatactttcaaggagctcagtggccttcatcaggttaacctgacacagactcacagtgaggcacaatatgctcaaaccatcgaaaaccaaatacaaaagaaaaatattgaaagcagcaagagaaagagactcatcacaaacagtagattctcatgaaattaacatttggtctttgatcagaaacaaaacagtccaaaaggcagcacaataatctataaagtgatttataaaaatatattatctaccaattctgcatttagtcaaacaaatcttctaaaataaaaaataaaataagataatcatagataagcaaagtttagtagacctggtagatctgccctaccagaaacactacaggaagtccttaagtctgagaaaagacactacataatttgaatacatgtgaagaattaaagatctcttttaaatataaagctagtgctgttgtattgttggtatggagctgctgtgttttccatgttatttatgagatatatggaaaaaaatcaataattataaagccatgtacataggcacaaaatgtttaaagatgttatttgtgacattaacaaggtctaaaaggagaggaaatggaactggataggaacagaattaatggatattattgagactaagttcgtagcaattctaacaattttaaaacattaatcgttactccaatgataactagtaaaaactaaattgagtgtataagggaaagaaaatgaagaaggaatccaaatggacccagaaaaaaattaatagaacacatgggaaacaattattggggtaatttaggaacaacaacaacaaaagataaaagatatgtagaaaacaaacagcaaaatgacagactttctttgttatcagtgattactttaaatataaatggattagattcaccacttgaagcaaaataacaaaatgaaatttttaaaagtaaaaaaaaaaaatagaatccatgatctatctacatggtgtttatggagaaccaatttagacccaaagacacaaataggttgagtaaatagtaacaaaagaactggtgtggctgtcgtgacatgatgcaatattgacgttaagtgaattatagttgtaagtgagaaaaaagggtattccttattgataaaatggtcaattaatcaagaagatataatagttatacacacgtatgcaccaagcaatagcacttcaaaatatgtgaaggaagacacatttaaaataaaagctagagagatctataatataaattggagacttcagtaccccactttaaaaaagaatagaacatatgaacaaaagattaatagaaaatgcagctattgaacactataatccagctagacctaacagatatatacaaaatactgcacaaaacaaaagcagaatacacatctactcaagagcacatggaacattctccagaatggacgctattttaggccttaaaacaattctcaacagttttttaaaacttgaagtcatacagggagtcatctaaaaccaccaggaaacgaagtttgggtaggggaggaacaatatttccttctactcaacttagatttattggccagcagtccctatcacacaagacagattaaaaaataaactcatgcacatttattaaatataatttttacttggcatgggagctttaataaggaaatgaaaactcagagaaatggctgaacctgaggactttacatttaggtatgatgaggagaatacaggtgtggagaaatatgactaagaatgaagtaaatgcagtaaatgggggaaagagcaaggcctgtgttcattcttctcagcacaccttcattttagaggaaacaatgctctcttttcctcttctttctaatcaacaactcaactttacagctcatggaacaagaaagagaaaagcaaacttaaaccaaagtccacagaaggaaagaaataagaatcattagaccagagattaaagaaatagatgagaaaaaaaactataaagaatataaatggcataaaaagttcctacttggataagaagaagaaaattaacaagctgttaggcaaaccaactaaaaccataagagagaagacacaaataacaaaaataagaaatttgggataatacaaccaacgttatgggaattaaaatgattataagagaacaccataagcaactgtatgtcaaatctagaagaaattgacaaattcatagaaaaatacaaattaccaatctaactgaagaagaaataaaaaatcagcataagaaatagattaagtcggcaattgacaatttctctaaaaagaaaagcccagagccagatgtcctcactggtaattctactagagatttaaggaggaagtaataccaatcatactcaatctcttccaaaaatagatgaggagggaacactgcctagcacattctagaggccagcattagcctcgtagcaaaaacaaacaaggatactataatacagaaaactattggctaatactcctgaagaataagcatctaaaattcctaaattaaataagagaaaaccaagtctaactacacattaaagagaacacatggaatgaaaaagcgagatttatcccagaattgcaaggatggttctacataagcaaatgaatcaacgtaataaacaatatcaatagagtgacaagaaaaagcatatgatctcagaagatgcagaaaaagcatttgacaaagttcatccactttcaagacaaaaacacttagcaaactaggaacagaaggaaacctgcacaaattgattaaagaagggcctttatcaaaatccacagtgaatctcacagtaaatggtgaaagagtgaaagcctccccacaaagatcagaagcaaaacaaggactcctgctttcacagctgctattcaacattgtccaagaagtcttaaatttcattaaaacaaaaaaggctagtgctacctcccaccacaagcatggatcagcgttaggaaattaaaataatggtaatagaaaaattataatgacagtgatgatggtgatggttttttaagtacacaactgaggtttagtggcagaaatccggtacttccaattacagtgcagctgtgcttattggggtgacggaatcaatctcgttttcagtatacatgggaagcaggagtacatgtagggtacaactgcatttctctggaactgtttttcacagaagagctacagtttatcctgcactctccattctgtgatcaaaaaccatgaaacagagaaaagcacttcaacctgagactcagtcacaagaactgcacctgccccaccttcccgcaactatatatgccacctctctgtgctgaaccatgaaggccagaggggttcacatgtggcacagacggaggctggactccctggtccgcaccctcccaggtgacgggtgctctgggatcacctggagaaggcaagtgcctgggctctgtcttttccaccagcagagggcagcagagctgcagccagaagagaggctggggctgcccaggaggagcctatgaaggaggccagcctttgtggggggtggtcaacaggtgttcaagggatcagtcctcactttggaagtttggtatagtccctcctgtcacctggggctgcagtgttcatattctgagggtcagacacacagcatcacccaggatactgacaggggcccaggcacagtgacggcctcagctgggaaacacaactggaggcacctgggccctggtgtcagcctgggcagctcccatagggctaggatttcctaagagacgctccgaggtcaaggtgctctaggagggggaacagtgtgaggggacagggctcccggggctcaagcccttcacccaggatggctgcctgagcctcctgccattctaagggtctcattcctccgtgtccagcagcatcctggggagctgagccctctacacttggcacttccagagacaccctaccaccccctccctctccctctccttccagctccaggccgactctgactcagaggcagctcctatgctcaggggattctcaggtgggtggcgtgggacatttgggatcctggtccctggatggggcattcccagcctccttgcggagatgctctccagagggaagggaatgttcacctgcctcaggccacagctctgaccatgggactatcctgggctcagtgacaagatctgtctggctggagggaccagggatcccccaccctccagagctcatgggtgttcagagaccacgacgctggaaccctcacagagaccaaataacctaaagttagtttctcagtcaggtctgggtttctggtgctttttacacatttatatgaaacactgatgagaaaaaataaagaatcaaagagcagaggatggcaatttctagtctattagagagatggggggtgtcatacaaggagcaactcaggtgagaaacgagactagactgtgtaatgaatccacatgagttgtggctgctcaaaggaccaaaccatggtaatggaaatcaagtttaggatataagtatcctaaagacacagaaccacattctaattaaactaccaggacaggaccaagtgagtctgggaaacccagagctgacttggaggaggaggaagatgatgggttcctggcccacctgctgctgagtcaggtgtcattgatgatctctcagcacggcccagctcagccccatggccaggctcctggaaggtccacagccctgctgagcctggcctaggacacagcacaggccaggatggtataaaacagtggtcatgtggccaaactccaggaggtgactgtgatcacaggccttcaaggatggagtctgatcttctgaccagagaagcagataaagtgagctgggacccacttcttcttcctcagtctgctgtgcttcccacagagctggtttgagtgacatccttcagtgaggagtcccagaggatgccgatttgcatcaaacactcactgcctcaaacggcctgagaggcaataagagagagctggtgagcccagctgtgctgtgggctcaggaggcagagctctgggtgtctcaccatggcctggatccctctcctgctccccctcctcactctctgcacaggtgctgcccccaagcccttccttcaggctcagaacccataggatcctgagctgggcctgcccaaacatgagttcatcccaggcacaacctcagggtgggaccccctgggaacagattcatcatttacaagcctcctctcctgtcctctcttgcaagctcctatgagcttacacagccaccctcagtgtcagtgtcaccaggacaggcagccatgatcacctgctcttgagataacctcaaagatgagtatgtttactggttctggcagaagccagaccaggcccatactggtgatatatgaaggcagcaagcggccctcaggaatttctgattttctgagtccagctcagggaacatggccaccctgaccatcagcagggctcagactgaggacgaggctgactattactgtcacaggtacaatagaaacagtgatgagcccacagtgacacaggcagattaggaagtgagacacaaaccccttcccaatctgtgtcaccctctttctccagccccaggatggctgtggacaaagccatgagcagggctggtccagttcacccagttctgtgacccccaggctgctcttccctccagccctccaggcaggttgtgaagagggtgagttaagaagagatttgaggctgtgtgacaggctatcctggggtttttctggccaaggataaagctggtgaaagagagcctgaatggacgggcagacagagtggcccatgcacgtagtggcaaaagacctgggtttccacatgccagcccttcaggcaggctctgcagagagtgggttaggaggagatttgaggctgtgtggacaggctgttttggggttttctaacccaggataaagctggtgaaagagggcctggatgaaaggacacacaaagcgtatctttcatctagtggtaaaggatgtgagttccatatggtgaagcctgggtcaccccttggcccagacgtcctaggttagtcctcagcatttccctagcacttaagttcctgaatctcctggcagccttatattcaaaacggtgtaagctggagtggacgctgtggggtccacctagactccacgttaaggtcgacccacacactctcagagcctacgagtggatacccatgctgtggggcacatgtcacctgacagagtggctgaccacccctgatctcttctttctgaccacttgggtgtttggcactatgtccatcatggacactctatgggctattaacctatgattcaaagtttcttctgtgtggtgcccgtgcccaaagaccacccacaggcttctgcccatactccacttcccccatttccaagtttttctcttgcagtccctggaacacctgcccaggtcatttcccactgccctaagcccctatctgccctggcatccggccactcacctttcctcacaaaatgaatgaccaggcgccatgccctcatgcaggaaagatgtcccctctccattgtctcttaatgccaccccttagtacacccatatagtgcagctgtgctctacttcatggtgatccagttcattgctgggctactctggaaatttttgctccatcagctgagcagagggactgctacccacacaacgtaagtgtaaacccagggagcagtgctagagcaagagagatgcaaacttggctgtggaccacccacaggttactcagctctggggccctgctcctgctccatcctagctgtgtcacatctgtctcaccagggatcgctgctggggtctgcctgagcacacgacgggggaatctggcagttctggctgcttggtcactgaatgtccgatgctgtcctgtatctaccagggaacaagagcacatggggagagttgttttccaaatgaatataattctctcttgtggatgacatggaattgttccaaatcccatgggattggaatcccattgggaaaatctcatgggattttcccatgagagattgcgtaaacatgagttttcagttcctatcataaattcttccattcctatcaccaattctgtgactatggtagagtctgctggattctgtggtcccaacagcaggacactcatacccctgcctgaacctggtgcagaacctccctgctctgggctccaaaacagtgggcgatgttcatggctcctgatatatgagttggagccacatccccaagggttaaatatgctgcctctagacaccagaatgaccttaaagctttgtgtttctttctggtgggaattgtaagatctaataacgtgctctttattttgtgagagatactaagctgctccagagaactcaatcctaaacatttcagctactacacaggatgaatggtcttagggcttgtttcgcactctcaggaatgcgtgggtctcaccaaagcttccaatagacagggccccctcatgcacatctgatccaaatacagaatagagccctaggaggttctcctgggtgttcagatggtcaaagcccctatgacaatatcatgaaaaagaagggagagttaatgaagttgaaaaaataaaagtataaacctatactgctgtctactccttgtatgcacaccgtttctgatcctgttctgagaggaatagaatgagtttctgcattgatggtgcctgctgtgcacctgtagccatgcatggtggtgtgttctatcagggtcttcatctggcacagcaatggcagatggaactaccagctgactgcgtctgtagaaatccacttccatcttccaggatccattcaacaattgtaggaatcatttcagtaaaccaaacacaagagcctcaactataactacaagtcctccaggagaggagaacgctgtctcagagggtgcattcctactggaatttctcttctctttgggacaaaccagcccagaggaggcacaggggctgtgtgtcatctggtttcctagatgaggtgtctcctcctcactgtcctgagattttgaagaaactggggagattggtgcagacactccttggatccttacaggaaacttccttcagaccacacactcctcaatttgttcccaagctccaaagtttctaaagtcactgtctaaagggcccacagtgtttttgtggagtggtggaaaagctctggggatggaaagtggtggtggttgcaaagcattctgaatgtacttactgttgctgaatgcacacttacaaatgattgaaatggtttaaaaattgttcattttgccataataaaaatactgcacactctggaggaaagtaaacctagtttaattttgaaattgttcaatggataccaatcaaagaatagtgtagcaagcaccatttcccctctcgctatagcagcaactgatccccttgtgctcttttggactctctcccctgctctctctctctcaataataagcaatgctcttctctccagtccaagctcacacttccccagttgtgcaggaatgcctattgtaactgttaatttatttccaggcagagtcctcaagattcctctgctcatattctgttctcagctgtctggagccagcatgacaagtgagccaagatcacttgtcatgagagacttgtggaaggttttgcaaaaagttccccaagaaaaaacaatgctcattgttgacagcaggtccatttccacacagtagggccatgctgggtgtgcagtggggctgtgcacactgtgcccacaggccaggctctgcactgctgactctgatcctgtgcttggtaggaccttgtgcactgctgagtccactgcagactcgaccctgaatgggaaggtggttcctagctgctgggcactgagtctcatagagggacagatggtattgaggatgcccggcccctgatgtacataaggggacaaggtctgctggtagaacaggaagatgaaggaacctgtggctctaaaggtggggtctccagccctcagtctcagctgcccatggcctcatctgtgtgcaccttgtcaatccagaccatgtgaattagaggtgaagggaattgaaggactttcccattttctcccattttctctcttggttacagaacgcacccttccacatatactgtattagagcctgtgctctacaaacatacctgacactaaattagtgacttttgaaagtgcagataggtacagcaaccagtccctctggagacatttcccataacatgaaccagtgaacccatctctgaaagccctcatgttttaaaagacaagatttttgaatttcaaggaaaactaaacctttgaaaaaaacatgattcaaaagagaaccttgccactttccattcctgcttgggctgcagtgaggacagatgcagcaagtgcttctgatgtctgtgtctgttcccctgtgtggacgcacatatccaggcgagtttcagtgaggtaggagacttcggcagcattggccgggctctggtttgcttctggtgctaacggaacatggaagagaggacaaggtagcgtgtcctgaagatcacatatttcctttttgcaggaagtgcctgggctcctggagtgttctcagggctttgatccaggccaccggctccgcaatcaacatcactgatatttcagcaggtcattgacctaattccattttagtgctatctcaaatggaaacattattttcttgtaactattcatatagcaacatagcacttaaatatctaaataacacacacagaaacagtagtctcaaatgcaaagctgtcacctccccacaccacacactttctcacccgagcccctgagcccacccttccctcggccccccctctcctgtgctgttagaaatctctgtcttctaacagggacagtgacacaaaacagccccccctcccgcccagcactcacaccgcagagcccctagtccatctcctgagggaacgtttacgtttctattctgacagagagaagtcgccgtgaatggagtctttaccccaaacccaggagtttctgaggaacacatggggtcagccactgtctgtgtggggaggcttcacctcagggaggcgcccggctctgggctgagggggactcaacgtgcactaaaaggcaggactaaggcaagtcccgggtcacagtgtgagggacgcacgcgccctgaggaggggtccctggtgctaggcctgacccaattctaaccccaggcacctttcctcagctcctgtggccctgggacacctccctaccctgcttcccatgaggctggtcacagctcttgtgagcaccgcctcctccatgtcacactttttctgtcaacattttgaggagccagttggttttctcctcattccatgttcctgtcccacctgcctgctgggggtggatttatttcatgtatgaggtttcctcagcctgagccacagctgcctcaaggacaccaaccctgtgggacactcctctgggaaaagcaaacaagtgccaagaggagcatctgaagctctggtgtgggagatgtcctccaccctgggtcaggggagtctggaggggatgagaagggaccaggggcctgggattgagctgtgaagggaaccaaaaggcaggagggacagggcaggggctgtcagctatgactcaggggaggttcctgggcctcaggatcctccctctgaggccaccagggggcgggggtggcacatgcctggacctgggaggtccctgctgggcttcaccctgggtgggtcctaggagctccttcctcctaagtccccctaaagagacagaggcattctggggtcctaaatctgtcatgcccccataaatgcatttctacgagggccaataaatgaactccaggtttatccaagcagcagcttcaggcgtctgcagacacagagcggggaggaattagccaacctgaggcaccctagaagggctgaagggggctgaaggggactgaagggtccctgtggggcctgtggtcctggggaggggagagctggggtgtctcccagccactctgggccctgtcctgacacttctcccacaaagaagggaagggaaatcctgggaccccacagccaggaccaaccgtgaaccacaggacaggaaggacagggacccccaaggctggctccatttcccaggcactgtcatgggctgagtctcaggaaatccaagtcaaggagtttcaatccccctggctgagccccactgtccaaggaaacagaagtctacgggcccaggcccaggtgagggtggggtaagaagaggagcttaggatgcagatttgcatggaggccccgccctcctctgaggcatcagggtaagacaaggctgggggcaggcccagtgctggggtctcaggaggcagcgctctggggacgtctccaccatggcctgggctctgctcctcctcacctcctcactcagggcacaggtgacgcctccagggaaggggcctcggggacccttgggctgatccttggtctcctgctcctcaggctcacctgggcccagcactgactcactagagtgtgtttctccctctttccaggctcttgggcccagtctgccctgattcagcctccctccgtgtccgggtctcctggacagtcagtcaccatctcctgcactggaaccagcagtgatgttgggagttatgactatgtctcctggtaccaacagcacccaggcacagtccccaaacccatgatctacaatgtcaatactcagccctcaggggtccctgatcgtttctctggctccaagtctggcaatacggcctccatgaccatctctggactccaggctgaggacgaggctgattattagtgctgctcatatacaagcagtgccacttaaccacagtggtccaagttcttggggaactgagacgaaaacctgccctgggctctcaggctccctttttgctctgaagatgtttcctcacccagtgcaacgggcttcctgaagcacagccttgagaattcttctccctcagcaactctcttttcccaccatgaaatccaaaggaaacctgctctgtggtttctcatccaggacagggacagcttccttttgcttgtgtgttgtggtccctgagtgggtgcaactcttcctagctttttaaattatgggagggtgacaatgagctccctgactggtgcagtccctgctgttttcaggaacatcctcatcctaaatgcatctgaatctcccactgtgtgcagaccaatctggacagatgttattagggggagtttccagaagccacatcttactcaactctgtatccaccacactctggtgaagatgcttttttggtgcccatcctcttgggtaaagtccactctctactcatgacagccatgtgtcccatcttctgaacttgggaaattgccacaccaaaccctcaggctcagggcccacataggagctcagaaagacgcactgggaaatggagaagagatctgcatccacccctcagtggagagacacctaactagataataagataaggaagtaggtttgcatgatgagtctccccttcttatgataagagagacctagagacccccttctcaggtgtgcgctcagaggcagaactctgaagcatctccaccatggcctggacccctttcctgctcaccctgctcactctctgcacaggtgctgcttcccagggctcaacccccacagcaccagggaacagcctggccctgactttcagctcatcacggcagtgatgcagggtatggcactctgagaatgagaccctcatcttcagactcacctctcctgtcctcgcttgcaggttttgtggccttctctaagctgactcagctgcctgaagtgtctgtggctttgggacagatggccaggatcacctgccatggagaggacttagaaagctattatgcacactggtaccaacacaagtcagtccaaacccctaatctcattgtatacaatgatagaaagctgtgctcagagatcactgagcgattctctggttcctgctcagggggaacagccacactgaccattactggggctcacgttgaagacgaggctatttttgtttttctggagataaaaacacattcatagtgacacagacagatagggaagtgaggcacaaaccccatcaccatctgtatcactctctttcttaagccccaggagtattgtggacaaagtcgtgagcagggttagcccagctcagctggatgtgtgaccccgaggcacctttcactctagtcatccaggaaggctctacagagggtgggtcaggagaaaatttggggctgaaaactaagctgtcctggtgttgtttagctaggtatgaattggcttaagatgacctgactggtaggacagtcacagcaagataaccattgagtaatcatgttgcctggatttccttttgtttaatgaccaaacctaaggtagctctctggtccaaaatgccctggattagtcccctggactcctcattctttaactgagacctttgatcccagctgtcatggcatcatgatgtcgtgaacagggaagtccattgtaatggcaactgtgacatcaggggtcatttacccactatctacccaaggccgcagggaatccttggcttctcacagctttttctcaccggaaaatgccattgagtgcagagtactgtgtcttccaaggatgtgccccctccataatgtggtttgggagcaatgattgcctgatgcctagattccaaagccatgctttaattcaggatgaccttgaagtgcctcctgctgagtgctcaattgtaacacattcccagaagagcctcccacacttattttctgggactatatacccgaaccctactgcatggaattcaacctctcagagtaactttccaagaaacccaaaaattaaaaactaaacaacaacaagaaaacaatatagagagaagagtatcaaagaaaagcaagttgtacaaagagagaactctggagtcttcaaatattaataagcatcaagcagcacatgtgtggacggaaactccattttcagacaaacagcagtccaaagacactcgcgggaacactccacagagcattctttctctctctctctctctctctctctcacacacacacacacacacacacacacacacacacaaacacaaaatatgaatcctgcttgttcctacagtcacagaggaaaggcctgagttaaggagcatgaggtcgaatcctcggaacagctttgcctcagtcctggagaaaatgtcagcctagacaataggctggtctggtctcaactaagtaagttaaaaagcaagttttaaaaagtaccaagtttccgagtaattatactaaatccaagaataaaagaccaaatagacagagaagtgcaagtatattctaaatccaacaaggaaaaactcaaaatgtctagcacctatcagatttccttgcaagaaccaagaaaatacatgctataaaaagcagaaaagttcatcagtccaaagtctccctgaaattgcacagatgatagactttgtaggaagaatacaaaagcgatacttataactatcttccacttgctcaagagggtacgggattgattgaacatgttaagtggagacacggtagacataaaaagatcaaagttgaacttacagaaattacctctaaaatgtccgcgataaaaataaatacataaataaataagggccaggcatggtggctaatgcctgtaatctcagcattttgggaaatcatggtagaaggattatttgagcccaggagtttgagaacagcctgggtgacacagggagaccctgtctctacaaaaaaataacaaaatcagatagatgcatggtgcacacccatggtcctagctacttaggaagtggtggaagaattgcttgagctctgtaggtcaggatggcagtgacctgtgatcatgccgctgaactttggcttgggtgatagaatgacaccgtctcaaaaaaaaaatgtctgagaataattgtagattagctcccgcaaaataatagattactgaacctgaagatataacaatgaagctcttcaaaatgaaacaccaaaaaagagaagataaaaaattacactgagcatcaatgagttttacgacatcttcaaggagccttaattgtataattaaatgaactaaaggagacaagattggtggagggagagggagggtacaaaaaccacttaaagaaataaggaaaaacgtgcaaaatttggtgaaaactataaacttatgatttcacatagtttaacacaacccagacacccacacacaaacacaaacacacagacatcatatacacaaaaaaacacacacataaagaaaacatcaacacccgccataatcaaattgcaaaaaaaaaaaaaacaaaaacaaaaacaaaaaaaaactgtgatggagaaatgctcttaaaagcagccagagagaaaagacatgtttgatgcaggtgaacaccataatgatgagagtagctttcccattagaaacaatacaagcaagaaggcagtggaggtacattcataaaactttttaaaacttactacgcacagcattgtacatattcagtgtaatccctatcaaaacaccgatgtcattcttcacagaaatagaaaaaaaaaatcaatcttgaaatttatatggaattacaaaagacactgaatagccaaagcaatagtgagcaaaaagaataaagctgcaggtgtcacaccacttgttttcaaaatatgctacaaggatatagtaacccaaattatactatactgttttatagtataaaacagacacagaccagtgtaacagaataggaaacacagaaataatccacatatttacagacaactggtttttgtcaaaggcaccaataacatacattggttaaaagacagccttcttggtgctgctgagaaaactggacattcacaggcacaagaattaaaatagacctcgatctctcaccacatacaaaagtgaattcaaactggattaaagacttaaatgtaaaacttgacactactaaactactagaagaaaacacagggaaaatagggaaaatgcttccggacttatgtgtagacaaagattttatacctaagctttcaaaagcacaggcgacaaaaacaaacatagaccaatggagctacattaaactaaaagtttctgctcagcaaagaaaacaataagcaaagtaaagagacaacttgtagaacaggagaaaatatttacaaactgttcatctggcaatggattcacatacagaataagacaataagacaagaaagcaaaacaattcaacagcaaaaaaaaaaaatgccaaataataccattaaaaagaggtcaaagaatttgaatagacatccctcaaaagaaacatacaaatggccaaagggtgtattttttaaaatgctcaacatcactaatcatcagggcaatgcgaatcaaaatcacagtgagacatcatctcaccccagctagagtgactaatatcaaaaagacaaaacataacacattctggcaagaacgcagtgtaaaggaactcttatacactgttatatactgttggtgagaaggtaaattttaaattaatacggccattatgaaaaacatgatagtgtttcagaaacactaaaaatagactatcatcatacaatgcaataatcccactactgggtatttaatcacaggaaaaaacgtcagtatatctaaggaattcctgcactcccacgtttactgcagcactattcataatagcaaagctatagaatcaacctgttttcatcaacagatgaatgcataaggaaaatgtggcatgcatacacgatgaaatactttccagtcataaacaaaagaatgaaatcttatcctctgcagcaacatgatggaactggaggtcattatgttaagtgaaattagccaagcacagaaaaacaaatgtcacatgttctctctcatgtgggagctaaaaaaagctgatctcatggaggtatagtgtagattaatagttaccagagaggctgggaagggttaggggttgtggggatgaggggtagttggtcaatgggcacaaacatacggttacataaaagcaataaggtctattgttgtatatcacacagcagagtgaacatagttaacataatttattgtacatttcaaaatacatagaagatttgaaatattcccaacatatagaaatgacaaatgctcaaggtgatggatatcctaaacactaattcgatccttacatactgtattcatgcatcaaaatagcacgtataccccataaacatatacaattataatgtatcagtaaaacatgttctttaaattaaaaaaaactgtcaattctgaattctttactcagtgaaaatatctttcagaagggaaggcaaaataaaatggttttaaccataaatatacttgcactattcatgacctgcagacacacactatagaaaataataaagaacacttctcagatagaaaatcatactaaagatgtgactctgaataaagaaaacaaaaacatcaaatatagtaactacataaaaacatatagaaatggtaaataaacatagatataaacgacttaaattacattacaaaacaactagacttaatagacaactatagaacagtccatccaacacagcagaatacataataatctcaagtgcatatggaacactctccagggtagaacctgcaaaaaaaaaatgagtaccttaaaaaaatagaaaatctataaagtatattctttgtgttacttcactcttgtattgctataaagaagtacctgagcttgggtaatccataaagaaaagaggtttaattggctcatggttatgcaggctctacaggaaatctggtgccagtatctgctgctggtgagggactcaagaagcttacaattatggtggaatgtgaatgaggagcaggcatgtcacatggtgagagtaggagagagagaggtggaaagtgccacactcttttaaacaaccagtctcacatgaactgggagcaacaactcattgtcatgagggcagcaccaatttattcacgaaggatccacgtggccccatgacccaaacacctcccactaggcccacctcaacactggcagctacatttcaacataagatttggatgggacaaatattaaaagtatataattccacccctggcccaccaaatctcatgcctttctcacattgcaaaatgcaataatcccttctcaataatcccccaaagttctaagtcgttccagcatcaagtttaacatcctaagtctcatctgagactaacctcctgtcacctatgagcctgtagaatctaaacaagttatttacacctaagatgcaatggtggtacaggccttgggtaaacattaccattccaaaagggagaaaacaaccaaaagaacaggccccacacaagtcctaaacccaatggtgcagtaattaaatttcaaacttccacagatctctagggcatgaaaagaattcagccaagctttttactaaggcatcacaagggtgaactttgctccagttcccaataactatctcattccatctgagacctcagcagcctggacttcactgtccgtatctctatcagcatcttggtcacaaccagctgaccagtccccaggaagctccaaactttccctcatctgtctgtcttcttctgagccctctaagctcttcaaacctgtactttttacccagttccaaagctgctttcacatttgcattatccttacatcaacaatctacttttggtaccaattttctgtgttctttcattcttgcatttttatagcacctttatagcaccgctataaagatgtacctgaggctgggtaatgtataaggaaaagaggtttaattggatcactgttctgcaggctgtataggaagtatggtgccagcatctgcttctggtcaggcccttaggaagcttacaaaaatggtggaaggtaaagtgaaaccaggcatgtcacatggcaagagaaacaaaaagaagaaagagagaaaggaaaggaaaggaagagagggaaggagggaagaaagaaagaaggaaagaagcaaaaaaggaaaggaaagaaacaaaacaaaaggaagaggaaggaaggaagagagagagagaggaagaaagaaagagagagagagagaagagatgagacgagacggggggggagagaggcagggaaggagagagggagggaggaggaaggagggagagagagagagtgaaagaagaaagagagaaagaaagaaagagagaaagaaaaaaagaaagaaagagaaagagagagaagagtggggaagtgccacactcttttaaacaaccagatcttgtttaaactagtggttagaattcattcgttattatgaggacagcagcaagccaatcatgaagggtcagccctcatgacccaaacacctcctactaggcccacctcctacagtggagttcatcttccagcatgagatatggaaggaataaacaatgatatcatcctctgaacactgatattgaaaaataaaaggtattatatgagaacactgtgaaaagctgcataccaaaaattagatgaaaagaaaaaatccctaaaaacataaaaactactaaactggctcaaggaggtatagaaagtctgattaacactataacaagagtttaaattagtcattgaaacctcccacaaagaacggcccaggcatgaagggtttcattgatgaatattatgaactgtttaaggaattaataataattattcataaacccttccaaaaatataagaaaggggaacatgagcagctcattctatgaggccagaagtatgctgatacaaaaacaaaagacatgaaaagtgaactggagcacaacagcctctatgaaaacagatgcaaaacaaccacacttcaacaaaatactagcaaaatataaaaaggattaaacaccataactaactagtattcatccccaatattcaagggattcttaacctatggaaattaattattttaatgctccctattaaagaataaaaccacatggttatttcaacagtcacatcaaatgttttcatgtacgcagacaggacttcctgttgttttcccattcctgttaaagcatcataaaaggcacgatttgtggtgctactggatggggtgctacttcatgcaaactggatatgtcatgtccaaccatgaatatacttagccataaatgctaaaagattgtaatttggtgtcagagacttggtggtcagtgaccacttccttggcaagtggtaagtacagacatctgaaaggataactaggatttaggtaggtattggataaggaggtgagttacacacagaaaaagtttcacttaaaaactcatagacgcttgaacacagaagatggctcaataggtctgagaaataaacaaagtccagaataactggagctgaatggaaacaaggcaaatgacatgaaccatctgtttctctctcgacaactcactggggcattgtctcctccctataccacccacgtggattgtaaaaacatctgttcttaaaactttcttgtgcatcatgacagcatgtagcacctgaatccagctcagttaaatgagggcaggacagtcaaccacaaaacccaggtggcccaggaagcacatcagggagacaagaccttgctgtcaaaagcagaggaagtgagattttccattgtggctaagcccagagcatatgaaatttcaatgggtacacaaaaaccatatagggtttggttaagctgcagatgcagtctttgcaggtttgaatggggccccagattctccatggcaaatagcctccagttgaggttgattgatgctggtcctccaaggaacacactttgggtggcttagctcctatgcaccctcctcactcatgcacagctgaaactcacctacataacgcaccttctgagaagcataagtgacctatttctcctccactaatgtgtctcagtcccttttactaaaaaggaatatctgaagttgggtaatttgtaaagaagcaaaggtttatttgggtcatgcttctgatgtctgtaaagttcaacagtgggcatctgcatccagtgaagacctcaaactgcttccactcctgacagaaggtgaagatgagccggtgtgtgcagaaatcaattggaaacagaaagcaagttctttcctaaaaatactgcaggagtttaatgatcatatttacaaagtgtttaacacagagcctgacacaccctagctgctcatgagttggcagcaattattgctgatgtcattcatgaaaattggacctcagatggagaaactgcagtgcagagagtttgagaagtttagggacaagaaagacttagtgacttaaaatcgagttctaggaactgaggagagcatccctgggcattttactgccatcttttccaatgtctcagaaactgtttcaatgtgacgtcaaccagagaggaaagcagaggggtttgcagaaccaggggctacaacttcatccacgggagagtgatgtagtaagcgggtgggaaggggcagctgagctcatctgaagggtgtttaaggttttctggcccagggatctttggccatctctccctgcccagggcctcattcttccactgaccggcaggagctggagagtggcttctgagtctggttagagatcccagcagcacccagagggggaagacattggagagacgggtctaaggtcactggagacactgtttgctgcctagagggctgcgacaggctccttgaaaacaaaattcagacactttaggggaagaaaacacaggatgggaaggctcctcaccaggggattgtggataacagagaccaaagcatctacaaggagcccagccctactggaggtgccctgaacacagagatcctaggggtgtctgtattattttgccagggctgccatagcaaagtagcacagccctatggctcaaagaacacaaatgtattttctcactattctgcagatgatgttagaatctaagatgaaggtatctacagggttggctccttctgagcactggagaatctgttccatgcctctcccagcttctgctggctgcggaggtgtttgctgttccctgccatggagggaaatcaccccaatctctgcctcacattcaaatggagtattcctcatgtgcgtgtctgtgtcacagtttcccctttttataaggacatgagtcgtgttggattgggtacgtactctgctgcagtatgaccttttcttaactaatttcaactgtaatcaccctatttaaatataaaatcccactctgaggtccttgcagtgaggacttcattatacaaatttgaggggactgaaattcaaattcctaacagtgtgtctgccatgactcaggcctctccttggggctctgcaggtgggatgtgcaccaccaacctctcaggtggggcattacctgacagcccagaaggaccccaggccctctgaaaaatgacgtctctttcatccaccttgagggacatgttttctggctgtccttctcatcctttgcatgctgacatgggagacatcatcctctgctttttaaagaaggactccttcaccttcccaatcaccccaagtagatgcccatgctggttccacagaatcaaaccacggtgggttacgagttatattagccaccagctgacaatattccctgaatgtccaggatccacccatgctctctgaccatcaccagagtgagcaaatctctgatatgtgggtaagagtttctcccatgggctcccagccgggctgtaagtgaggcaagaccccttcttcagtgcacggggctcagtgcagctgcctccctgaccaagtcttcctgggacactaagcttatcagtttctctcccccagggacagtttttggttgtcctaagcctagctcagctctgctatgaactttgcatcctaagagcccattaaacacccccttgtgcctcaatggaataacctggagtaaatagtgtgaggtgcccctgctttctgctcccagggcctcttctcctcggtggcaccagcactgccctattgaccagcaatcctcacctgcccattcaggcctctacactgcctaccgtgaacagtcacagatcacaaactgattgccaaatttgtgcagatcatcttgacagtttctgtggaactgggtgccttctcatagaaccaggaagtcacaagccaggccagctctagagaagcaactgggggagtaacatgcatcacagcgcctggacacaacaaagggattttgctgtagtcctactaggacacatcctagtgatgtctctgagaaccagtcttggtccctgcaacagaaagcctactaaacaggacagtaggctgcaaggttgggcacaatttgtgccgtgtgtgagccatgtagattgtgcatgtgtgtatgtgtgtacatatgtgtacatgtgcatttagtgttgcaaggaagggttgtgtcaaatgtcccaactcaaaacttttctgttttcctaagttatctgcttctatctttactacctttgtactatcataagaataaggataatgattagggttgaaataggagaaggaataatgtttaattattcattcttatgtgtttaatacatatcaagcactcttcaaaacaattcatatttattaaatcactcaatacgaactactccatgagccaaatattgtcattatctctccatttccagttggagaatctgtgatacagattttgacacatgggaaagctaaggcaaagaaaggaaaaggactttgcccgatgtcagaactagaaagtgcctgacccaggagcagaacctgagtcttccagtcccagagaccctgttctttaacaacagcctgtgggcctgtcactgtgctttaaggtaaagcactgacatctccctaagactccagaaagttctctgtactttttgaatcaagtaactcatacttgcagtgatttccaatgcagtaggaattctctggtgctgaggagtctactaggaatataatttcaatgcctttaaaatttttcagtagccacattttaaaagtaataaagaacgggtggaagcaactttcgtactatattttctttaactgagcttacccaaatattatttcaatatgtaatcaacataaaaatattgagatattttatgttattttcctacaacctttttgaaatccggtgtgttttacccccacatcacatcttaacttgaactacccacattttaaggactcagaagctccctgggactcatggttgctatactggacagagcagatccacatgaatgatgatccatttggatcacagcccctgcagtacttacttagaaccatcttggggcaatggagagtcctatgacccagagggcctccttagggaagaatggctgttccattttccaaccaaagtagaaatatggcgggctctcagaaaccagggaatttttacaatgtgtttcacacttcttcccttctcaaagacattgactataacttccagttcgaagataaatctgagccatcaaaggcatttttttctattggtcagtggaatgaatggcaatggtccctgtggattgtgctccaaggatccctttctgtgggaagattcttacaataaaaccaactaaaagtaggaagttattgtttatatgtagatctagatgaaagggggctgatcatgaggaatatagtattgaaggtgagtgtgttgctattcttcacaaagggctatttttgcctaactcacaagcatcaatcatttttatgaaggtgtattttcccagagtggtcttagcaagttacatccaacgctgtatcaggacccacaagcaagggtgtcagaactgacctgcctgagcggtcagcaggaaccaatgtggagactctgaggtctccacaccaccaaccatgtccaacctccagtcaagtgacaggaggagtggaagcattggttgggaagggcttggaggagctgcagtgacatgctcagccaagtacaggagcaggcatattggtgtcatgtgacctcatcttatctcagttatctcttttcaccaaactccaaggtgcaatgtgtggaggcatctgtctgtacccatggacaccttgggcttcacacattatttctatttctaatgaaccagtgttttgttaatgaattcatttcatcacatccttagtacttctaggttggaaaagcaatacatgtctctaagatattaggtaggaaatattctcccgccactcgtatttattaaagttaaaatgcttcagtatctaatgtgacagttgtccaaattcaatacccttcaccttgttagaaatggaatcctgatcctaacttgtctggagaggaggctggcatgaggagcatgaccacacatctggatgtccccagtgtcactgctaacacacgctcttttgttacttgccgtgaagggagcagagggagcatccacacctttgtccaaaggacttggaggacagtgcacctgattaaaaaatgcagggctgtgataagtgggttccgggtcctggatgagggaagagaagatgaggaggcatggggtaggaggcagggcagggaggagctgtaaggtcaggctctgagtatgggtgaaatcctgactccactcactactctctgggaggatttgataaatcttgtaacctcctgatgttggttctcccatcaataaactaaaggagaggtcgtgtcttaagcgtatgcttgctgtggggctactgtgaatgtgtggttgaggtggtgcctgcaaaacactctccaaagggcctggcacgtattaatgtctcaaaggagtcattctgcttaagctcgtggaggatgactttcctcctgtgtgcactagagggccttgttttgaggaccccagtgacttccctggtagggctcaagcacaaagggcatgactgatgcttcctctgaggccccttctattgggtaaaattcatgctccactcatgacacccacctggcccttcttctgaccttgagaaattgccaatatgaagccctcagactcagagctcagacagtacctcagacagacatgctgtaaagtggagagcagatttgcattcaaagctcctcccttcttgagcttcaagaagaggataagacaggagctcatagtgtccaggttccactgggcagtctcgaatagagctcttggaagtccctccaaccatggcctgggtctccttctacctactgcccttcattttctccacaggtcagaacatcccagggaattcagggaaatgttttcactgctattttcccatgagcaccagtcctcaggggcattctttccagttcttctgtgcattcagcatcattcatgacattctgtttacaggtctctgtgctctgcctgtgctgactcagcccccgtctgcatctgccttgctgggagcctcgatcaagctcacctgcaccctaagcagtgagcacagcacctacaccatcgaatggtatcaacagagaccagggaggtccccccagtatataatgaaggttaagagtgatggcagccacagcaagggggacgggatccccgatcgcttcatgggctccagttctggggctgaccgctacctcaccttctccaacctccagtctgacgatgaggctgagtatcactgtggagagagccacacgattgatggccaagtcggttgagccacagtgacacagatgaaggggaagtgaggccaaaacctcccacctcccctttctcctcagggactcagagtcaacagccctgggttcctctccagtaccctgagacctctgactctcctccctccaagacacccctaggcagaagcagatgcaggccatgactgaggccattttgaaaactcatctttctgtttcctccacaacagcctgtggggaccatgctgggagagaccagagcagcccaggcaggaaaaggaccttgagagagtggctaggatgagatgaccgtgtcccagtgtctcattgtgccctgtgctctattaccaggctctgccccaggaaaggacatggatcttgacctgtcagccatcatttatgagagttcaatttttacattttttaaaatataaaaactacaatctccaagatgctaggagcaatttcactgagtctcatcatggaattctgacctcccccagcatgtcccctgttcctacaatctcctgttcaagaccaactcaactccattacccagaccagctgctggatgatcaagacagggctgtgagagcctaagaatctttaaggtccacgatgagaacacgtcaagaaggatttatgttggaacttccttccccatggatattcacatcaacagagaagatatctgagttcttgcctacacctatgaatacctaagacatgaagtgtgtgtgtgcatatggtgtgggcagcacttcctcactcaacaccagagagtgtctgaggacactgggtacagacatggagacagggcatatttttatacactcaattaagccctcgtccttctctgctcaccaaggagccacccaacaaggccacagcaggaagagaagttgatttccatgaagagccttccctttctaagagtcctggaaacccactgtctagttgtggaatcagaggcagagctctggggcatctccaccatggcctggaccctcccctgctcaccctcccgactctctgcataggtgcttcctcccagggaataagccccatggaaccaggggtcagcctggccctgaccttgagctcagtgcagggagtgatgcagggtgtggggctatgggaatgagaccctaattctcagtctcacgtctcctgtctcctcttgcaggctgtgtggcctcctctgagctgactcagctgcctgcagtgtctgtggctttgggacgtacggccaggatcatctgccagggagatagcataggtgactctgatacaaactcgtaccagcagaagccaggtcaggtccctgtgctggtaatttatggtgacagcaaccagccctcagtgattcctgagcaattttctgactgcatatcagaggacatggccaccttgattattaatggggcacaggatggaaacaaggctattactgtcgctcggaacagcactgcttctcatctcacagtgacacagcatacagtgaagtgagatgcaaaccccttcccatctatgtcattctctcccttcaaccccaagaggactgtggtcacagccatcagcaggtctggcccagttcattcagatttgagacccccaggctgcccttccctccagtcctccaggcaggttcattagatggtaaatcaggggtggatacacaactattaaatatcatcatgttccaatttttcatgaagtagaggaatgattgaacatgttaagtagaagcacagaataaccaaaaaaggactaattgagcttgtgtacagctaataattgcaatgtctgtcaactttaaaaacatactggatgtgattaacaacagattagattatgtaaaacaaaagattagcaaacttgatcatgtagcactagaaaatattcaaaatgcagcacataaagaaaaaacaatgacaaaaatgaaaaagcattatcggatattcataaagaaaatgaaggtgagttataggacaacttcaaacagcctgaggttgactaggagtaatggttcacgcctataatcccagcactttgggaggtctaggagggaggatcttttaagactaggaattcaagaccagactaggcaacatagctctataatttaaaaaaaaaaaaaaaacttaaaaattaactgggcttcgtggcttgcacctgtagtcgtacctacttataaacctgaggcagtaagattggtagagcccagaaattcaagactgcagtgagtgagctatgatcatgccactggactgcagcctgggcaacagagcaagttcctgtctctaatatagggtctcaatctgtcattcaggctggagtgcagtggtgcaatcatggatcactgcagcactgacttcccaggcccaagtgatcctcccagctcagcctcccaagtagctgcgaatactggcgtgcaccaccatgcccagctaatttttgttttttctggagagactgggtctccttatgttacctaggcttgtctcgaactcctggactcaagcaatcctccagcctcagcctcccaaagtgttgagattacaggggtgagccgctgcacctggcctaaaaaaaaattttttttaatacaacaacctaagtatgtataattgacatccatggaatgtaaaaggtatgggtgggtagaaaagaatatttgaataaataatagtcaaatgtgctccacatttggtaaaaaccaaaaactggtatatccaagaagttcaacaaaactgaagcacaggaatcatgaagcaaatgactccaaatgacataatagtcaaattagtaaaatctggtgatgaagagccacttaaaagtatgattctaagagtacatttctcattagaagcaatgtaagcaagaagacagtggagcaataattttaaaatactgaaagaaaacagctgtcaaccttaaattctttatccaacaataataactttcaaaagtggaggataaatataatgttttcagacatataaaaacttacagaattgattactatcactcttgtcattagaaatgacaaaagacacccctagacagggggaaaatcataccaaattgaaatatgaattcacacaaatatcagataatgcaactccatttgaatatataatcacatttgaagacagattttaataagtgatatatgtatcacaaagcctaaagtaaacattaaacttttttataaaagaattatgactagtaagctgtattaggattctccacagaaacaacataaatcagatatgcatgtatgttatacgtgtgtgtatatatatacatatgtgtatagtatatatatgtgtgtatatatatacatgtgtatagtatacatatgtgtgtatatatacatgtgtatagtatacatatgtgtgtatatatacatatgtgtatagtatatatatgtgtgtatatatacatatgtgtatagtatatatatgtgtgtatatatacatatgtgtatagtatatatatgtgtgtatatatacatatgtgtatagtatatatatgtgtgtatatggtgagagaaaaagaacaagagagaaactaattttgaggaattggatcatatatttgtggtagctgacaaggatgaaatatgttggtcaggctgaaggctggaaattcaagtaagagttgatgttgcagtcctgcatccaaatttagcaaggcagcacttcaggaaacctccacatttgttctaaaaacattcagctcactaaagagtcccacccacattgtgaagagaaatctgcttatacaaagtttactaattaaaatgttcatcacatctgaaagttatcttcatgtcaactcctatactggtatttgataaaatcaatctggtgcatagcctacccaatctaacacttaaaattaactatcacttaacccagcaaggaaataaaaagataatttaaaaaatcaatcaaaaaaggagacagcaaaagggaaagaaaactaacgaacatatgggacaaatataaaataaagagcaagaagatccttccagctcagcctactgagtttctgggactacaggaaggtttgtagttctccttgaagaggtccttcacatcccttgtaagttagattcctaggtattttattctctttgaagcagttgtgaatgagagttcactcatgatttggctctttgtctgtctgttgttggtgtataagaatgcttgtgatttttgtacattgatgttgtatcctgagattttgctgaagttgcttatcagcttaaggagattttgggctgagacaatggggttttctagatatacaatcatgttgtctgcaaacagggacaatttgacttcctctttttctaactgaataccctttatttctttctcctgcctgattgccctggccagaacttccaacactatattgaataggagtggtgagagagggcatccctgtcttgtgtcagttttcaaagggaatgcttccagtttttgcccattcagtatgatattggctgtgggtttgtcgtagatagctcttattattttgagatacgtcccatcaatacctaatttattgagagtttttagcatgaagtgttgttgaattttgtcaaaggccttttctgcatctattgcgataatcatgtggtttttgtctttggttctgtttatatgctggccacttctcaaaagaagacatttatgcagccaaaaaacacatgaaaaaatgctcaccatcactggccatcagagaaatgcaaatcaaagccacaatgagataccatctcacaccagttagaatggcgatcattaaaaagtcaggaaacaacaggtgctggacaggatgtggagaaataggaacacttttacactgttggtgggactgtaaactagttcaaccattgtggaagtcagtgtggcgattcctcagggatctagaactaaaaataccatttgacccagccatcccattactgggtatatacccaaacgactataaatcatgctgctgtaaagacacatgcacatgtatgtttattgtggcattattcacaatagcaaagacttggaaccaacccaaatgtccaacaatgatagactggattaagaaaatgtggcacatatacaccatggaatactatgcagccataaaaaatgatgagttcatgtcctttgtagggacatggatgaaattggaaatcatcattctcagtaaactatcgcaagaacaaaaaaccaaacaccgcatattctcactcataggtgggaattgaacaatgagaacacatggacacaggaaggggaacatcacactctggggactgttgtggggtggggggaggggcgagggatagcattgggagatatatctaatgctagatgacgagttagtgggtgcagcgcaccagcatggcacatgtatacatatgtaactaacctgcacattgtgcacatgtaccctaaaacttaaagtataataataataaattaaaaaaaaaaaagaaaagaaaatgtctctagacagcttggttcctgagctgggaatcaaccgtcttttctctccctttcaacccagagtgtggcaggcgcgccccctacaggcagctaaaagagctgactgagatgccgtctccatagggagggatttgggctgagaatttgggctgaggattttcccatgccctccctggcaggctggtcccaggacactcagaagacttactgttacaggtccagagcatttctcgtcttccttttctctctccttgccaagtgaccttggaattgttcctccccatctcagccccttcccttttgtgttaagtgcagtttgcagattttgtgttcctaggtcctgtatctgtagaattttagggaaagcagtgctggtcacccacatggaattcaagacagcgagcccaggaccagaaacacagacagcagtgggggtccccacagagcagcatggtgggcaccaggtggaggtaagaaaccaggaaccactcccctgagtgtcttcagccccaggtgaactagggaggggtcagtgggctgggctcaacccaccggggactctcctgtcactgccccagcagcaccatcctggaagcccctatatgtgctaagcagctgccaaagaacttgattaattacctgtaaatttcccttcaccacacctgaccacacatgactcctgcccccaaattactaatttattaaaatggcacaattagccgaaatggcctgaatccaggacccctttcaggtttgccgctgacctctcaggtcctcacacatgccagactctttccacaggggcctgactccactgtttccaacacaaatcccaggactcatttttctctgtcagtcctgacagcagttccagagacacttccccattaagatgtccccaggctcttataatacaacctgtctgttattttctgcctaaatctttttaattatccccatagcatttacaactgtaggaatctttgcctattgttaattttattaattgattggtgttaaatatttacttaattggtcatggatgcttttttaccacagaatcacacataaaaaacagacacaaacagctaagggtgtatttctcgctgcaataatacccaccactttcacgaagacaccagggtctttctcactttttgtcccaccatccctatgatattggctttattttcatccctgctgatgtgtgacctcagggtggctgctgcagctccagctatcactcccatattcaaggagaaaagggcctcatgaatctagtgctctttcacaagagcaaagctttcctaagaagaatttcacccactgatctcacaccccactgatcaggcctgagtcacatggtcaatcccagctgagcaggacctgggaatcacaggcaccagtcttttcggtgaatatagaagacagtgctcaggtggaaggtgacagggactgtctgctgggtctgcaaacccagttttcccgcacagccaaaccagcacgatgaacaactcacttcaagaaggctgtgtcttgttcctgctgaattcaccgcatggaacgtgtcccagaccacagtgggtctggattaacatttgatgggtggatgttcttctgtctctgactttggtgcaggagtcaccactgtacgctggtcctgcatccacagcggggaccagtaagagccagtccctgagtcctgtgatccccgccctgcatgccaagccctggtattacccccatgaccacccaccgcccagacacatgtgcaggcagcctcagatggaccttcctcctcctcttccaaatattcatgttcatattgtcatgagtaatctgcacccctcgcacctggtattgaggcaggcatgagtcacaaagagaagagaaaaatttcctccattggcaccagcagtctgcagaccagggaatcagggacctgaacagaagattttaattatacacccggacccaggaggcccttgagcctccagcagccagtatggagcagccaccaggggacagaacagagtcacctggcaaagtcacttggagatagggtagacctgggtgacaaggagatgctgacatgcagggagggtcagtgaccacaacctgagatctagaaaggtgtcgtttttctacagcatcatccttaacatcgagtacaaattctccaggctttgtgtttctcagctttgtctctggccaatgttgcatatttgacacaggtgcagacactttgcttccccctacacactggcccactcttctgtgctaaaacgctgtcattgccacaaacgccatcctcccctgtgggcacatgtgtttcatcaccctcctgtttgctctgagagccccctcattctgctacacagcaaagttttctttcagcatctaagctgtacctgaccatgaccacatactgggggtacataggcacagcacctgtgccctaccctaggagctcacagccaaggccaggaacttacagcatctcctgagtctttcaacactccgtgtgcacatgacaagggtgaagtttgattgtggaaagcaccactcagaagcaatggcaggtccctgcatgtgtgccagccttacggtgtcacctgtagagtggggtcatgagggtcactgcactgggttgaaaagtgccctccagagggggagctagaaccacacctaacttctggattttgccacaaaatatttagggacaggacacccctggagtcctcaattacccaagttattctgagccagtattcaacagaggaagtaccttagatctcagaataatccctcagtcgccattgtaagtcagtccctggccatctccacgcaggacaaggaatggccacatgggcaggacatcatactacctggaaaacgcacaaagaattcctctcagagttctgcatggccagatcagctcaggagtgaggccataacacaacctacagtgacgatgtcaacccagatgatgggaccagaaggagaatgagaattctgtgtgctgagggtgggtctttaggggccccctctctctctgtcccttggggctgagcccttctctggaaaccacacagctcctcctgcagcagcccctgactgctgatttgcatcacgggccgctctttccagcaaggggataagagaggcctggaagaacctgcccagcctgggcctcaggaagcagcatcggaggtgcctcagccatggcatggatccctctcttcctcggcgtccttgcttactgcacaggtgctgcccctagggtcctagccactggtccagtcccagggctctgggtccagcctggccctgactctgagctcagcagggcccccgcctgtggtgggcaggatgctcatgaccctgctgcaggtggatgggctcggcggggctgaaatccccccacacagtgctcatgtgctcacactgccttagggctctttcatccctggatctgtgtccaggccaggcacgtgggaagatttacttggagttcagctcctcagtttcaagccttttctctcccgttttctctcctgtaggatccgtggcctcctatgagctgactcagccaccctcagtgtccgtgtccccaggacagacagccagcatcacctgctctggagataaattgggggataaatatgcttgctggtatcagcagaagccaggccagtcccctgtgctggtcatctatcaagatagcaagcggccctcagggatccctgagcgattctctggctccaactctgggaacacagccactctgaccatcagcgggacccaggctatggatgaggctgactattactgtcaggcgtgggacagcagcactgcacacagtgacacaggcagatgcggaagtgagacagaaaccagccacctcggcctggctcacaagacccttccctctctcctgccctgtcacactgagcaggagggagccttccatgtggaatggaagtttccagtcctatccctgcccttatgttcctgagagacgggagcaagttcctgcccacctctaggctcagcttatcccagaataaactgagctagtcattttgatgatcaaatgccagctcccaaaagaccccagaaaccctgatatctaagtagcaccgactctattagtatcaagggagactagccctagggtggaatcattttagtgtctcagaaggcacagggcaatggaaagtgtttatgaggtttcaggatatgcacgtgagcagttaaaggcaggtcttacaaggaaggaacctactagaattggggcccatctgtgacatcatagcacagcctggtggacacagagaagggaaggtcctgaatcaagtcttgatcagtaaatatttattggataagtgagcaatttacataggtgagaactgtgtgctctcttgagcagaacacttacctggataattggttttcaggaattccctgaagcaatgagtgacattctttattgttttcaccctcatccacctgggaaagagtatcctggaaccagcagttaacattgacacagctggtctcggtcctcagcacaaacattcattgcaggctgaaaagtgacaacggaagagaaaggagtttattaaatccctagacacaaacaaatccataagcagagatgagagatgcgggctcagctggcccagtcccacaggggtcattcctcttgtgatggaaatgaccacatgagggtcccccaagcggtgttggggggcagtcatggggaactggcctcccagggctacctgctgcttgggctgggcagaggttagagggatggaagtctggtccagtccttcccagcagcatctccaggctcctcctccctctactggggcttcccctccactccccagaaccatcattgcttcctcatctcctgtctcctccctgccccaaggccctccctgtgctcaccctggctcctccccctgctccatgcccagcctctgcagagcagcccaggcccagagacttgggcagaagcttccgtcccaccagctgcagaaccttccctacagaaccaggccagtccctgtgtctcatatttgtagagatcccaatcaccctcagagatgacgggtgggaaaccagcccacagtgacctaggctgttgggcatatggccttcaagctggccttcaagcccacttggctgcatctccttggccaactccaacatccaggctgggagtctggaatcctagttcccctggcccattcactcccactagggttgcttctaaactccctgggcctcagcttcctagtctgcccactggaagcagcgacaggcattttccagggctgcggtaagggccctggaacaccctctctcaccctctctctccctttctctctctctctctctctctctctctctccccctccccctccccctccctctccctctctctctctgcctctgtttcctcctcagtagtgggaagaccccctgtcaggtgggccagtccatgacatctacagagggagcaggaacctctcctatttcctggaggagagctggggtggaggctgcaacccaggatcatcagaggagctggggtcttcaaggttcctagggaccccttaagcgggggtcagagtggcttcagcggtcttattgctcggtccagacagaagatgtttccagttgtgaaaaacgacttcagggacaacaaaaacagagattcgcctctccagacaccagtggttggtgtgcctggagtactcctcgtaccaggcaggggagagagtcctagacagaggaggttctaagtgtcacctagatttcaggcctcggggcctgtattgggtaggtgatgtcacagtgagttgatgctctgtagccccttccctaggaggtggcagagggaagagctggtggtcctctgaggtgtgagtgagtccaaccctgagggtcttcccaagctggaggtccctgggtgtagacggaagaggttctggtcaaagaggcctggtgttgaatcctggtccatttattcatttggtcaagaaatattcatggaggacccaatatgtgccaggtgccaagccaggtgactggggacacagtgttgagtgggacagttggctccttcactgctagaggtattatattctcaagccgagactcggctctacgattgtatgtcagatatatagcctctatgtgcatgtctccagagactggtttcctggagttccaagtgacagccatcactcacctcgaatgcaaaaattaaaggagcatccaaaaacctagtgacccagataaataatacttaatgcaatattttcaaaaatcaaaattaatgcccaacaaacccacaatgaacaaaatttcaggatctgactcactcacctcagtggttttgttcttggtcctacccacagtcccacaggtgagtgagtacccacagggatgcaaaaccagagtcaggcccctgcaccgccttctgcccggccaccagagccctcccctgggtcttggcctttctcttctgaagagctccagccagttcctcctcaggcttcctctactgctggtctcttctgccccctactggattctccccttacagctgcactccaggcagctggtggaggttaaagaacagaaacctcccaaaactccaccctccagttccaggctggctccacctcatgtccaaaaaggctggtcctccaggtctttgattgctattagtaagtcccaagacacagtctttacaccaagtcgctgtgtgccttgggcaagaaactctccctctctgagactgtgtttccacactggtagaagtagctagaagacctccctgccaggttggcaagtccactctgtgacatctacaaagggagcagggatctcttccatttcctggaggagagctggggtggaggctgcaacccaggatcaccagaggagctggggtctttggggttcctgaggactcctcagagggggatcaggagctgcagagccagcttctaactctggggactcagagatccagaacctttgtcatatccccagccaatactttgtcatcctgtgcctcagactcccccagatcccaagagtgagaagctcaagacgagacaagaaagaccagccagcttgaatttagggatggtggggagtggggagctggggacccctggacctgggggagaggagtctgcagtgcctgcaggtggagtttctgggacctgggggatggagactgggcaggggactgaccagcagaaggccaaggtgggggataccctcagacatggagcagggcagaagcaactggatggggtacatccctctgctttgggagagaagggccagggcgggacccagagagctctgcagaggcaccacagaccctcagcagggggtctgccaaacaggacagctggacttggctgcttctgcccaggcctggatccagcccttgcacatctcagggcaggggataggcctgggtggccagagctgcagctgcacctgctggggaggcctagtccagtcctccagggtccccagacagactcggatttccgactgcagccaccatggaaggatgtggtctgcggtgacgatgtctatccagaggccatggcaggtgcaagggtgggggtaggggcagcagctggggatgctacatttagggacagcccctttttatccccaagacctgggactgtccctgaaaggaaccacagcttctgggtcctgagcagtgggtgagtgtcatacccacagaggggctggaagggagcagcttcagcctagactcccagggcagaccctgccccagccccgaatatccaaggagcccaagatcagaggcaggaataggccaagctccccagtggagaagctgtgctggaccaggggtttcccagggccctcccttgtgccctgaatgatgtctgttagggcacctacaccctgttactgctcagtgccttgcctattttgaaggacagggatgtgtggtgattatttgtataatccagcccccagcacctggtcctcaaaagttacccaagcaatgtgtataaagatccagcctggagatctttgaaaaccgattcgatgagtcgaaccattaagtcatgatcaccatcctcaacttcatctctttcttcctcctcctcctcattatcatcaccttcaagaactgttaagagtctgagacttcatcctatttgcagactaaaaagtaagcctgccacagtgccatggatgctggcagaagatacaagactcctgggtcagagacaacgaataatctgtttttcacagcaatagcagttgccaaggtatcagcattgtcttgcaccagttccacaaggtgatgcaaagagggccaggtgacatctgcatgccagagctcagggatcccaaatatttcatacttgacagtaagcatatatctgtgttttgctccaaagagaggcattctctgtaccttccgaggttgttcactccacaaacactcttgaaaagataatccacaatcagtgcctttgcccgagagacatgcagaaatgcagagatccatagtagaccactgtctcccaacaaccatcaactttatcaatgaaatgaagtctcaggctatttgtctgttaccatagcccacaaaaatgtctggcttgattgtcaccaaatgtatcaaggaagttaaggagtatctgacacaaaatgtgaaccaagcaattctcaaaggagcctcccaggaaattcactttaggaagtcctaggaggctcctctgagagttgctaaaacaaaacattgagagtcctagagggctgcagatctgaacttgagcagatatttttaaagattttgtggcagaaaaagaaactggaaagcaagagggcagaccctcattgcagttctgtaatgtaagggggcagagcaggggcctttctcaccagagtatggggtcctgaagatctcctcaaacatttttatactaggctctcagggcaacagaaaagatgggagcgatgaatggggcgtaaaggagtgcaaatgacacaaggggtcacatgaagcaaaagaggtttattcaaccagatttagtccatgtttaattgagccactcctttgtgccaagctctgggttttcccatgcaccaagcagtgtgttaccacctagacccagagagccatgtcatcatcagcaaagcacgccctagtgtcatgcaaggaccaggcctcagattccgactccagacctactgcctcttggccctgtgacattaaaagagtagggaatcagcctgagcagcatttcctcatcttcaaatgtggaggacagtagatgatcttagctcccaggattagtgcttgtaaagcaataataatgtaatgcattattattgtattatgcatcatattcccatattatagtcaaaaaggaccccaacttaaagcacctgccagccctctcctcctccaccactgccgaatggagccaggcacgagtattccaggtggacagacgaatagaaatacaggggacgagccccttcctagatcctagcgcagcttgctccctacttaaggaatgatattggaccctgcattcatcttctctggatggtaattttctcacctgtaaaacagagacactggccccaaggacaccccacaagtagttgtgaatcccaaagtaagagaagaacaaaaaaagaaccagaatttattcaacacccactgagtgcttagcaaacacatggtttctttaactctcataagcttcatgctgcagaggaactctccccattttacagataaggaaactgaggcccagaggtaacctaggtctagatagactccacatttatgacttcaccactcttccttgcctgaaggatatagaatcactccctgcagggctcttgcctgactcaggaaagggccacaggatagccagccaggcttaaccaacccagccaagaaagggctggtcccaactggctggagtgcagtgtacaggcacccagcctggaagactgatcagaaaagaagccacagctccagccccagccccaaccccctgagctcaagcccttggggactcctgctgggcagctctctaggccctagggagatgctccacagacccaggctgccctttgggaagtggggaagacaagtgggtcaggtgtgcaccacccaggggcggggccaggcagccggctgtggtgggaggcagttgagccctggattgtgaccgcttcagggcagttggtagatgcccctctgggagagatccccaggggtgacagccatggaccctggaagggcctgggctagggacagggaccagagccagtccagggagaggacagagccaatggactggggtgtactgtaacagccctgctggcgagagggaccagggcaccgtcctccagggagcccatgctgcaagtcgggccagaggtgcccctgaacctgaaggccaatgagacccaagacaggccaagtgggttgtgagacccctgaggagctgggccctggtcccaggcagcgctggcccctgctgctgctgggtctggccatggtcgcccatggcctgctgcgcccaatggttgcaccgcaaagcggggacccagaccctggagcctcagttggaagcagccgatccagcctgcggagcctgtggggcaggtaaggggcaagagattccaggggatgtgggggtcctgcagcagagctgggaaagggtgaccaaggggagacaagccagaggagtgaggaggaaggttaacccctaagaggggcctgggctgacactggctttagtaatgggttgatattttgtccatcacagatttgtttgaattactgtttttaatatcatattacgatattatttttcttgatttctgagttttctggcgccacttaaattttcaccagggtcagtgcctcaatcacctagtcctagtcctctgggtagggaaggaacagaggcagggacaggacatccacagggggtggtggccactgtccccacagggtgcccaggcctgttcctccccctcctcctctctgcccatgtgcctcctgcccagtgagggcaggggccactccctggagaaggcagcaagggcttggtttggtctcccccaaggctgtctgttcaccaacttgcacataaatgcttactggggccaggctcaaggacacagggagggtgggatgaaccgaggggagctgtccagtcattggaacaggcccacggcccatgtttggagcaataaagggagaggggatctccctctgggatgatgcccaggctggtctcacagatcgaggggcactggctggtgatgggtgcccccaaaagacagagcagcgtcagaggagaggagagcacaggatgaggctgggagctcctgggtgactgggaaggggaggcaagaagaccatagggtccgtgcaccattcccagtccaggacgagtccttggatggatttaggtagattgattatcagagtcagatttgtgtttttggaaaaatcagcaccggattggaggctgatgcgacgcccgattagaggagggaggagagggggtgatggccaagtccagggtaggtggggatcctggaggaagccgtgccttggggatggggaggacactcagattcagagcacccaggggcccagtttcctatgaaatgggagcatgaagttgaagtgagggctgagcagaggggagcagacacgctcggggactgtctatgggcattaaaaatgtataaccattttagcaacaggcggcgagtcaaaaaacaaagtgtgtttatctaaactgggcaattccacttctaggaatttatcctaagggttggttgggggaataatcaaagctgtaaccaaatctttataacaagggtggttagctcagcattattagtgatgggagaaaactggaaaaaatccaaatatctaccagaaagggtgtgaaaaaacacaattgtatttgggggactgttgttgtttttgttttgaaacagtcttgatctgttgctcaggctggagtacagtggcgtggccacagctcactgcagcctcaacctccagggctcaaaagatcctccagcctcagcctcctgagtagctaggactacagatgcaggccactacacctggctaattttgattaggattattattagtttagagacagagcctcgctatattgctcaggcctgtctcaaattcctaagctcaagcaatctttctgcctcagtttcccacgtgctggaattacaggcgtgagccactgcacctgacccaactgtgtttttaaagtatatatgcattttcaaaaacctgtcagaaaatatagaaaaatgtcaatggtgtgtctggctggctgatgggatttcacctaattttaatgtggctttataattttctggttttgtgaagttgttcacaaaaagagacatttcttctaatataatttttaatacaacagtaatgtactcatgtgcattactctttttgtaatgagtatattacaaaatgtaatgacttttgtacattactcttttttcttgccaaaaaaaaaaaagattaagcagagaagtatataaagtaaaagcaagtgcttctgcttaccatctctcacctcttcccagagatagccactgtcaggttggtcaatatacttccagaacttttcctgtgtgtgtgtgtgtccctgaaaacacacacacacacacacacacacacacacacagttggtgctgggattttattttgcaaaagtaagagccatattctgcatattaccaacttttaatctattattgacactttctgtatcagtccatatggattaaccacattcattgcttataaactttgttttataagcaaagtttagatgagccagaatttatttccactaaaaaatctaaatgacaaatgatgctgcagtggaaatttgtgtgtgtgtgtgtgtgtgtgtgtgtgtgtgtgtgtgtgtgtgtgtatgtgtacaaagtgcacttatatatctccccaggatagatgcctaaaagtggaattgctggatcagagagaatgtacttttgaaatcttataggtagtgtttccaaaagtctgtgtccactcactccggtgaatggtagtgccttcgctcctacattcttaccaataatgcaaaattgttgatctttttatattctgcccatctgatgagcaaaaaattgaatgtgtttatggttttattgtgtattttattactggtgaaattattttttatatttttatttattggttttatttcgtctgtgaattaactggtcatcatgttgcccgcctttccattcagttgctttcatctttttatatatcaataacatattgggatatatttgggattttaaccacttgtttagtgtatgtattgtaaatatttttccctggtctgttttacgggtcttttgtttatggggtctcccaccataaaactgtggtaaatttttatgtgtcgaactggtttaatcttttctttatggtttctgtgacctccaccatgtgtaggaagttgtctttatttcaatattataaactcatttttctgttttattctggtacttttggtgtattggtgttttatttttttttctttacttcccctggagtttatttttgtggatgtaggaataagaccttattttccaaataggaaagccaatcatcacacatttgttgaatataaatgcaacttttctcaattactacattactgatttattacattctttctgtggttctcttggtttattgagctattcctgcgcccaccctgttttgattattttagctttatggtatgttcggtaactggtagggaaagaacccgtcattgttactttttctcaaaatagtcatgtctattatctgtcattcttagagttggactgcagaattggttctctaattttcaaaaatcattcttgtgttatgtggtaatatcacagaatatgggattaatttgagaactgctatctttataatgctcagtgtttttgttcagagacatgatgtactctccattcactcagataagtggtttaatattttattcatgcaaatcttgcacactttgttttttattcataaagggtttgtaaatataattttattgaagttataaattttttcacaattttatatcgtaaatgattactgtttctatagcaaggaaccctattaacttttctatgttgctcttgtatccagacactttaactcttgtattaattccagcagttcttcagctgattctccgtgtgtgtgtgtgtgtttgtgtgtttagttaactatcacaccatttgccaagaacaattttctctctttttctgtaatatttatacctccttctctcccccttttatgtcatttcattggctggaatctatacaatatgctgaataataaaagtgagactagacaaccttgccttgtttctgattctttaaatgttttgcctttaaatatgaaggttgctgtaaatttggggagatattcttcactgagttaagaaaattttcttcagtaacttaataaaaggctaaatgtttgctttctttatatgagaaacaagtgttgaatttatattactattatattaaattctgtttcaaaaatcttctgcacatgtcttaaatacaaatgtattaaatacaagctgctgctaagatgaaagttgctggccccatcacaatgggtatcttccaatgtgaataaattgccttggggaataaaatcagatttggaaaaacctgaggatggttgccatcataaactcttagagtgtgacctgggtgtttttctttttctctgtaggatgttaatagtatcttgtgtcatgctaggatgtctaggacagagggcaatacaatgaggggaaggcattctgcgatgtccccaggcctctggcttgaagagtaacttgctgaagtgaggactctgtggaggagcaagttatacagaaagaagtttagttgtgatctgttgagttggaggtgtctacagggcatccaagcagacataggttgaggaggcagaatatatgtgaatctggagccaagaagagaggtaagggctggaaatagggatctaagacccctggacagttgtgagtgtgcacaatgagggtcagatgcagagaaaattaggagactacagagagcagaacccagggtggggatctgggagtcagcagttgggcatgggcctggtagaaagggaagccaaggaggaggagagggggcagtctcagacaccaaggaggggagagtgactagaaagaaaaccttcttgcagagacataggggatggggaagaactgcagactgaactggggcaaaggactgttggccttaaccagagagatttgagggagagatgaggctgagagccaggggatcctgccatgtcccagcataaaaacagtacctgacacagatgggtgcttgggagctgttgtcggatgaatgagtggacagatgcatggatggacggatggatggaaggatgatagattgatggacaaacagatgaacagatgaatagctggatggacaactggatggatgggtagacagaatgatctcagagatcagaaaaagcttcatgcactaagtgggactgaaccgcgtctccatgggtagaaagcagaggaatctccacttgagtcaggaatgacccagtgctctcaatccagggagaaagccagcctggcttcactggggacacttgtgtgggggactcagaggccctttaaatgaggccagacgaggttggacaggtccaagccaactcagcactcctctgccacactgcacaggaggggatgtgtcactcagggagttgctgggacctatgggtcccagtgttgtcatcagcaccgacagcctcagagaggaaagacacacactggggtaactccaaggctgtgtgtggcacttgccttggacagcagacaggcacagggacacctctagggggctggccacccccctgcctcatgtctaggtcccagccccgcccactgcaaccctgtgcccgtcatgcccagcaggctcctgctccagcccagcccccagagagcagaccccaggtgctggccccgggggttttggtctgagcctcagtcactgtgttatgtcttcggaactgggaccaaggtcaccgtcctaggtaagtggctctcaacctttcccagcctgtctcaccctctgctgtccctggaaaatctgttttctctctctggggcttcctcccctctgtcctcccagccttaagcactgacccttacctttctccatggggcctggaggaggtgcattagtctccgggtaaccggcaggaagggcctccacagtgggagcagccggatgcagcctggtcccggggcctgagctgggattgggcagggtcagggctcctcctctcttccagggcagatgtctgagtgagggacagaggctggttctgatgaggggccctgcagtgtccttagggacattgcccagtgactcctggggtcaaggacagaggctgctggggtgggcctgggagctgctgagtctcatagtctaggggagcagccccaagaacagctgagggtctaggctgaggactggatgccaatccagcctgggagggccacacggcctggtgacacagaggtcaccccaaggggagaccaatggagggcacagagagggctctgggtctaggctgcagctctgtggcctgtgctgggtcatgaggacatggggacacagagggacgggtgagactgggtgaggtgccagaatccaaccctcccaggacagtcaccagaaaggagacagtctcttagggcagagatgtgtctgtccctggagccccgtcacctctggggcccagtgtctctctgttcacggatcggcctcctgccttcctcaaagggcatgttagactcaggaaatgaccagaggggagtgaatgaggggtgcagagaactccatggctaccaggtgaagtttggggtcatcacaggctgctggggtgggcctgggggctgctgagtctcatagtctgtgggagcagccccaggaacagctgaggtgaagggttctgtggtcgggcttgtggagacaggaaacatctcagagcctcagaggagccctgaggcttgtctaggtggagcccactccttgccaggagagccaagtgggctgggctggggcagagcccggtgcctgtgagggataggaagctccagttcaaagcaggcttgggtctccccacacactgcctgccaggacagtcctacaggatgagcaggggacccacagttcacggaggaggctctaggtcctggaagaataaagtgggtgatggaggggggtatagggatggaaatgagggatccaggggtcaaggccagattctaaactcagactccagagatcagagaagaaggaacacagcctgccctgggtatatggagaaattgaggctgtagaggagaggggctgggccaggacacctgtgaaaggtgacttgggagggctcctaggaaggcacagagctgtctgctctccacagggcatgagtggaaaggatggggaaagaagaggagagaaccccgggtggaccggatggccacactgtgaaccctcccagagactttagacagagagaggggctccacaacaccccggtattctgtctgccctctctcacccccttccctgtccacacaggtcagcccaaggccaaccccactgtcactctgttcccgccctcctctgaggagctccaagccaacaaggccacactagtgtgtctgatcagtgacttctacccgggagctgtgacagtggcctggaaggcagatggcagccccgtcaaggcgggagtggagaccaccaaaccctccaaacagagcaacaacaagtacgcggccagcagctacctgagcctgacgcccgagcagtggaagtcccacagaagctacagctgccaggtcacgcatgaagggagcaccgtggagaagacagtggcccctacagaatgttcataggttcccaactctaaccccacccacgggagcctggagctgcaggatcccaggggaggggtctctctccccatcccaagtcatccagcccttctccctgcactcatgaaaccccaataaatatcctcattgacaaccagaaatcttgttttatctcattttttttctcacataaattgctagcctccccggggttctcagtgtggggtacagggaattctgcacccagtgtgaaaatcacccaagggaggaggctcacagcctccctgagtcatctccccagagggtccttcctctcccagtcaccccttctccaactctccactgtacccctgagctaccagtctggcatcagttcagaccagtcccacaccctcctaaattttacttctcaataaatacctgatcatgtaaaacgcagcatttctaatgtgcagtctctgtctggtcatgtgtctgggctgaagggtcactgctcagggacagggggcagttccaggtgagatcccatgtctccgtcatcccacaccccacccaacctgccagggaaccgggtgagctccctgtgccagtgggaactgcaatccaaggcacaaaattgtcctgcagtccttgcccacctgggaagggacaggggcccagtgagaggtttgctggcgccctgtggggagattcaggagaaatgaagggggtccccggagaccagatgagggctagaggcagaaataatggaaaaaggacacccttgactcaaggccacggtctcagcaggaacagaaggtgaaattccccattgcatacgaggaaccagtcaggagagtgtttactgggtgagggataaataactgtgctgccactgggaacttgtaaaaacattgggaaaggaaacatgcaagtgtctttctaagacttgtacaatggacattggctaagtaaacatactgacaagtcctgcactagggaaccagtttaatatgatgagccacagcatatccaaaagcatgttgatctccttcttcacctttagaagacccaaaacactctgaaagataccagcgtttcctggaactagtttgtggaatatggggtgaggttgatgcacatgatgttacgggtatatgatcacatggctgtgggttggggatcaggctcaaagttaacactagcgtggggctggatgtcaagcatgaagggtgtggaccactaagtcaggcccaggtagagttaatttctgattggtttgtggctggagcttgatgatggtcagtctgcaggagcaggaggatgtggggaaattgggaaaatgagaaaagtcacaaatccaagctcaaactctgcatctattgattgcctgggggaggctaatcagagttgaattcaggatgagcttcagggctgggtcagactgaataagagctgagtgaatgtgggctgatggctccaggcaagtcctggcctccactaggagtcagatcccacaaaccctcctgcccgcagagcaccctctccctccgtagctcatggtggcgcagcctccccaccccatcccatgtacacctgctgcctcatctcagagacactcattccagtgtctctgacagcagatgatgtcagcctcctgggtgtggagaccccagctgtcttggagagtcctcagtgcctgggtactctcagaccccctgtctctgcctccagcacatcagagacatagcagctgcctccaccagagctgctgggtgatcccaacaggccagggacagagcctgcaaagacaggaatctctgcagtcacaatgaggcaaagaaagagccccttagagcttgatcacagccacccctgatccaaatcccagcctctcattagaaggaggcttgagggttctgttgccacagcacctgtctgagcccatttcatggaggggaaaactgagatgaccaagggccagatccatagtcctgctgggcacaaggccatccccagcagctgcctaatctttgactgtgttataagtttccattatggaaaactttgaacacatacataaggagacagagaaataataatgcccccaagttcccatcacccagcccccccaataagcaattcacagacattactgacccacccatagcagaataacccctccattacacaataccagacatcacatcttttcagctgtaaatatcccatttctatgctggaaagatatgggcttaaaagtaactgcaatattattaccaaacctaaatagaaattatcactaattccctaatatcaagaaataatcatgggctcctcaaatccctcacaaatgccagaagcgtattgacttagttaagtgttggtgctgtggttattttggggttttgggtggtttatttcagaattcaatatggcatcaaatggtgatgggcgcatgtgctgtcaggccagttgtcactggtgaatatttcctcaattgctctagtgctgcctggcaaggcaggagctgcaggagttgagagctgtccggggaccttcccacggttggaatacagccacacctcccaaaacaagaacccagggctatcatctacttctttttttttccccctgcaaaatggttctagcatggagggacttaactggattcagactagacattgcaaaatagcttccaaggacagggagctgctaacagcgagatcacccatgtcagattctcactcttgtagtaatgttagctgcataggatggtcaatagctacatccctcagaagggaaggaaggcagagggatgaggcttcagttcacctccttctcatgagtgctgcagagcatctgtgaattcagaggtctgcagctgggctctgttcacccaggagtgtgcttcatgctctaggaaggagccactttgcacacagatgatccggggcccagccatccttccagggtgaataattaatgtcttctctcatggtgaactctaggattcaagccatctaatgtttttgaagccactgtcattatatttaattgatgatgacaggtggccaccaatgatgaatattttcccagggggagtctccctaagtggctttagacttcctcacatggccccaggggattaaatggctcctgattactcagaggataagaggttctgtcttatcatgttcctttcttatttgtcttatgtgtctttcctgccccaggcctgggatcccccactgatctcccttcccttagtgagaggtggtatttggagaccacattctggaggctcccttatgtcccccatttgaaaaagacaacggcagccaccaccccagctgtcccacccaacatgaggccagattcggggtgcagggatgctcccaaggttaccctaacagatgtgactggcacttcatattgggaccagccaggcctcactgaccaggcctatccaactagaactactccagaaggtggggctgaaacccaccaaggttcccagaacactgcactctagggcaatcagcctctgcatgggaggagaggggcaccctctgcaccaccccatggtgttaccaaaagttgaaccatgggttggttcaactttgcagagaagagaccacctaacccatctgtggaaattcactccttagcgatactgatgctccctaagaaattcaatcctgggcctgagtgatggttggtgcaaaaaacaaattcaagatcccagtgtcctccagaagcctggatttccagggatcctgctgtgagtcacaggacgtcaccggtccccttctctttgtgggttgagtgtgggggccatgtggactccctcatgagcagatgccaccagggccactggccccagcttcctccttcacagctgcagtgggggctggggctggggcatcccagggagggtttttgtatgagcctgtgtcacagtgtgtggtattcggcggagggaccaagctgaccgtcctaggtgagtctcttctcccctctccttccccgctcttgggacaatttctgctgtttttgtttgtttctgtatcttgtctcaacttgtggtcagcctttctccctgcatcccaggcctgagcaaggacctctgccctccctgttcagacccttgcttgcctcagcaggtcactacaaccacttcacctctgaccacaggggcaggggactagatagaatgacctactgagcctcgtctgtctgtctgtctgtctgtctctctgtttgtctctctgtctctctgtttgtctctctgactgtctgacaggcgcaggctgggtctctaagccttgttctgttctggcctcctcagtctgggttcttgtcggaacagctttgtccttgggttacctgggttccatctcctggggaattgggaacaaggggtctgagggaggcacctcctgggagactttagaaggacccagtgccctcggggctgatgctcgggaatcacagagctgggacccagagccaggatccagacccagaatgaggtaggaggtggaggggctgccctgggcgtctgggggctgccagggactgagccctgagccagcctgagactcaggaaaccccgtcaggagggagaagggagaagcagactctggacaccagaaagccaggggaagggtcacaaaaggagtggatgtgacggaagggcgggctcctgggtctcttcagaacatatcccctgtgcccagggggatcagaggggcagagtccactgcgtgaaagccccactgctatgaccaggtagccgggacgtggggtggatgccagaaaagactccacggaataagagagagcccaggacagcaggcaggctctccgatccccccaggcccttgccccatacacgggctccagaacacacatttggctggaacagcctgagggaccaaaaggccccagtatcccacagagctgaggagccaggccagaaaagtaaccccagagttcgctgtgcaggggagacacagagctctctttatctgtcaggatggcaggaggggacagggtcagggcgctgagggtcagatgtcggtgttgggggccaaggccccgagagatctcaggacaggtggtcaggtgtctaaggtaaaacagctccccgtgcagatcagggcatagtggaaaacaccctgacccctctgcctggcatagaccttcagacacagagcccctgaacaagggcaccccaacacctcatcatatactgaggtcaggggctccccaggtggacaccaggactctgaccccctgcccctcatccaccccgcaggtcagcccaaggctgccccctcggtcactctgttcccgccctcctctgaggagcttcaagccaacaaggccacactggtgtgtctcataagtgacttctacccgggagccgtgacagtggcctggaaggcagatagcagccccgtcaaggcgggagtggagaccaccacaccctccaaacaaagcaacaacaagtacgcggccagcagctatctgagcctgacgcctgagcagtggaagtcccacagaagctacagctgccaggtcacgcatgaagggagcaccgtggagaagacagtggcccctacagaatgttcataggttctcaaccctcaccccccaccacgggagactagagctgcaggatcccaggggaggggtctctcctcccaccccaaggcatcaagcccttctccctgcactcaataaaccctcaataaatattctcattgtcaatcagaaatcttgttttatctcattttttcttttctcacatataattcctagcctttcctgggttctcaatttgtggtggaaagaaccctgaacccagtgggaaagttgcctatgtgaaggggttctcagttccctgggcatctctgcaggtaaggccttcctcacccagacaccccttcctcagctctccactgtacccctgagccaccagcctcgcctggctgggaccaggggggtgtcacactctcctagattctgcctttcaacagaaacctaaccacgcatcacacggcacttctcgcatgccttctgtgtctgctccagtctctgggctaaagagttgctggtccgggacaggggataggtccgctcttggtcagatgccaggtccctgccatggcatccctgaccctatgcaacaagccagtgactctggtgagctctctgtgtcaggagaatccatgatccagagtttcatattgtcctgcaagcatctggtgggctgtagctcttgccaaactgggaaataccatggcccagcatcaggatgcaggacagtccggagagggaaatcaggagaagtgaaggggtctctggggagcccagatgtgggctagaggcagaagtaagggtgaagagcacctatgagtcaatgtcatggtctcagcaggaacacagttgaaaatccccattccacacaagaccgtttagcaggaaaggagtccatacttgtgctgccaccaggatgtcctgagaagccttggagaatgaaacatacaggtgcatttcctagacttgacaatgcacgttagccaagtaaaggcaatgaaaagttctctactagggaaataatttcctgtggtaaagcttagcttatgtaaagtcacatttatccatctggcacctctaaaagccccataatattctgcaagatactagtatgtcatggaagtagtttatgaaacataaagtgagatttaagaacaaagatgttacgggtgtatgataagatggctacaggctcagggtcaggctcgaggagtgaaggaggccgtgtcaaattcatgacaagagttggagctgggccaggctgggtcagggctgtgtgaatgcagacagagggctacaggcaaggtcaggcatccatgaacactcagctcccccagaccctcctgcccactgggaccttcgccctcccttggtcacagtggtggagccttcctacccaaacctctatggaggccctggatgactgtgcgttcttagtgcccacgcaaacttagactccctgtctctgcctccagcacatcaggaatgtggcagctgagttcaccagagctgctgggtggtcccgacaggccagggacagagcccgcaaagacaggaagctctgcagtcacaatgaggcagagaaatggccccttggtgcttgatcacagccacccctgatccaaatcccagcctctgaattagaagaaggctaaaaggttctagtggccacagtccctgtctaagcccatttcacaaatgagaaaactaagaccacccaaggagggccagttacgtaggcctgctgggtacaaggccaaggtctacttcacacccagcagctgtccaaagactgagctgtgtcataagtttatattatgaagaactctgaacatataaataaggagacagaaaaataacagtgtcccatgttctcatcacccagcactcaaaataagcaattcacagatgatgccgacccacccacagcaaaataaattctcccttacacaacatttagaaagaaatacaagacatcagatctgttcagctgtaagtactccattactgtcctggaatgacatggaccttaaaataactataatatcactaccaaacctaaatagaaattatcactaattccctaatatcgagaaataagcagggtctcctcaaatgcatcagaaacaccagaagtgctttggcttagttacatgttggtgctgttggtatttgggggtttaagtttatatgaggagcaatatgacatcaaatggtgatgggtgcatgtgccatcaggctggttgtcactggtgaatatttcctcaattgctctagagcctcccggcaaggcaggagctgcaggagctgagagctgtctggagaacttcccctggctgctatacagccacgcctcctggagcaggaacctagggcttccctcagcttttattttcctggaaaatgattctagcatgaaggggattaacttgattcagattggacattgcaaaatagcttgcaaggacagggagctgctaccagcagagtcacccatgtcagactgccactcttgtagtaatgttagctgcataggatggtcaatagctacatccctcagaagggaaggaaggcagagggttgaggcttcagttcacctccttctcatgagtgctgcagagtgtctgtgatgtcagaggtctgcagctgggctctgttcacccaggagtgtgcttcatgctctaggaaggagccactttgcacacagaagatccggggcccagccatccttccagggtgaacaattcatgtcttctctcatggtgaactctaggattcaagccatctaatgcttttgaagccactgtcattatatttaattgatgatgacaggtggccaccaatgatgaatattttcccagggggagtctccccaagtggcttcagacttcctcacatggccccaggggattaaatggctcctgattactcagaggataagaggttctgtcttatcatgttcctttcttatttgtcttatgtgtctttcctgccccaggcctgggatcccccactgatctcccttcccttagtgagaggtgatatttggagaccacattctggaggctccctcatgtcccccatttgaaaaagacaacggcagcctccaccctagctgtcccacccaacatgaggccagattcaggggtgcagggatgctcccaaggttaccctaacagatgtgactggcacttcatattgggaccagccaggcctcactgaccaggcctatccaactagaactactccagaaggtggggctgaaacccaccaaggttcccagaacactgcactctagggcaatcagcctctgcatgggaggagaggagcaccctctgcaccaccccatggtgttaccaaaagttgaaccatgggttggttcaactttgcagagaagagaccacctatcccatctgtggaaattcactccttagcgacactaatgccctctaataaattcaatcctgggcctgagtgatggttggtgcaaaaaacaaattcaagatcccagtgtcctccagaagcctggatttccagggatcctgctgtgggtcacaggatgtcaccggtcccctctctctgtgggttaagtgtgggggccatgtggactccctcatgagcagatgccaccaggaccactggccccagcttcctccttcacagctgcagtgggggctggggctaggggcatcccagggagggtttttgtatgagcctgtgtcacagtgttgggtgttcggcggagggaccaagctgaccgtcctaggtgagtctcttctcccctctccttccccgctcttgggacaatttctgctgtttttgtttgtttctgtatcttgtctcaacttgtggtcagcctttctccctgcatcccaggcctgagcaaggacctctgccctccctgttcagacccttgcttgcctcagcaggtcactacaaccacttcacctctgaccgcaggggcaggggactagatagaatgacctactgagcctcgtctgtctgtctgtctgtctgtctctctctctctgtttgtctctctgtctgtctgacaggcgcaggctgggtctctaagccttgttctgttctggcctcctcagtctgggttcttgtcggaacagctttgcccttgggttacctgggttccatctcctggggaattgggaacaaggggtctgagggaggcacctcctgggagactttagaaggacccagtgccctcggggctgatgctcgggaatcacagagctgggacccagagccaggatccagacccagaatgaggtaggaggtggaggggctgccctgggcgtctgggggctgccagggactgagccctgagccagcctgagactcaggaaaccccgtcaggagggagaagggagaagcagactctggacaccagaaagccaggggaagggtcacaaaaggagtggatgtgacggaagggcgggctcctgggtctcttcagaacatatcccctgtgcccagggggatcagaggggcagagtccactgcgtgaaagccccactgctatgaccaggtagccgggacgtggggtggatgccagaaaagactccacggaataagagagagcccaggacagcaggcaggctctccgatccccccaggcccttgccccatacacgggctccagaacacacatttggctggaacagcctgagggaccaaaaggccccagcatcccacagagctgaggagccaggccagaaaagtaaccccagagttcgctgtgcaggggagacacagagctctctttatctgtcaggatggcaggaggggacagggtcagggcgctgagggtcagatgtcggtgttgggggccaaggccccgagagatctcaggacaggtggtcaggtgtctaaggtaaaacagctccccgtgcagatcaggacatagtggaaaacaccctgacccctctgcctggcatagaccttcagacacagagcccctgaacaagggcaccccaacacctcatcatatactgaggtcaggggctccccaggtggacaccaggactctgaccccctgcccctcatccaccccgcaggtcagcccaaggctgccccctcggtcactctgttcccgccctcctctgaggagcttcaagccaacaaggccacactggtgtgtctcataagtgacttctacccgggagccgtgacagtggcctggaaggcagatagcagccccgtcaaggcgggagtggagaccaccacaccctccaaacaaagcaacaacaagtacgcggccagcagctacctgagcctgacgcctgagcagtggaagtcccacagaagctacagctgccaggtcacgcatgaagggagcaccgtggagaagacagtggcccctacagaatgttcataggttctcaaccctcaccccccaccacgggagactagagctgcaggatcccaggggaggggtctctcctcccaccccaaggcatcaagcccttctccctgcactcaataaaccctcaataaatattctcattgtcaatc

SEQ ID NO: 74 - DNA, 30542 bp, Homo sapiens
gcgacacaggggtgcctgcctgtgccctcccgggccggggcaagcagtggtgggcccagtggtctcgtagtctggggtcggtgtgagttccggttctccaggcttttttccagacaactgctgggattggtgggcgagaccaaggctcatcaaaggcacagccttgggggcaggatccccaccatgagtcagaggtagttctggggagcctgggcaggctgtcacctcctcagctgtcaggcccgaggtcctcatgtggtccccaggagaaggggcagacggccacttccggccaccagccagctccctgtgtgcctgattccgtaacatgtcccctggctgggcatgtactccccaagttctaattacatgtaactgcagagaagggctcagcctgggaaaaggatgggcatagggggtggttgggggctggggcctctgacacagctccatgagcccggccaagagtcccacacaagtcagtggcccccccggaccctgaaggatcccacatcctccctgccctcggggaggcccctttctggggtcaggcctggaagctgccccagagcttgggccccaggaatgggttggtcctcccagcgtaacgtgagcctgatcaggcctggggacctgctcagcgggtgtctgggggcccatggcgggctaaggagcctgaccagacttgcttctggcaggacacccctcccccggccaccctgggctcgcccctctagtagctgcatgtgttccccgggtgtgtgttggcattcaggctacagggctgcctcatcctgaagaaggctgcgtttacccagggagccataaagagatgacctccgataacctgaatcaatatttccccattggggctcgggcccccgcagctgtcttcttgatcatctggcagatgccacacccacccttggccctcccctgccttcctgccctcctaccctcctgccaggacatataaggaccagacccctgcccccgggcgcaacccacaccgcccctgccagccaccatggggctgccactagcccgcctggcggctgtgtgcctggccctgtctttggcagggggctcggagctccagacaggtgagagagcagacacaggggtctggggcctggcagagtgtcctgggggcagggcgaggcgggcgggcaagtcgcgtctgggaggaggagctggtcccagagtgcagcctgcgcggctctgctgaggctcctggcccgggttggtccctggaagcccccggccctgctgactttcaaggagctggaaggtcggggctcccctgctattcctttggggttgactgcccgacgacagtgtgggtcttggggccagcaccaggtggaaacagcaggtcaggccccagtgaactgggtcattgtccataggggaggaaggggtggccaggatcccaccagaaggccccattctcaggtggcagagacccttgaagagttggggcagcacagcccttgctggggagcggggtgcccagaatgccctctcctacatcccgcttggcacccggccgcactcctcaccaggccgggggtagaagccctgagacccctgtggtggggtgaccaaggcccagcagagggcccgaggataggaaggaacctttcccggccaggggccctgtgctgggctcgaagctgcttccaggtgcttcttcaggggccttctctcgagggtagcttgggcagccttccccctccggggccactcacccctcattccccgctgctccctcagagggcagaacccgaaaccacggccacaacgtctgcagcacctggggcaacttccactacaagaccttcgacggggacgtcttccgcttccccggcctctgcgactacaacttcgcctccgactgccgaggctcctacaaggaatttgctgtgcacctgaagcggggtccgggccaggctgaggcccccgccggggtggagtccatcctgctgaccatcaaggatgacaccatctacctcacccgccacctggctgtgcttaacggggccgtgtgagtgtggtcggtggcacccctcccacatcctagcaacgggggctgatgtttcccaaagggatattccttgtagccctagaagaccccttccgccccagcacacagctcaggagaacagccttgaggtttgggttcaggtcactaattcattcaacaaacactgatgagcccccaccattccccccataggcaaggggtttcagttatccctttgcctgtgtgtccctgacagcccctcccctcggagcccaccaggctccggacagacttggcacccctggaggctgcatgtctctggtcctgtgcatggagtggccgtgtgtgccctccccaggctagagttacagaagccggtgcagggggctgtgggacccccttccccatccccagctattgctcccctattgtctccagaacaatgaggccctgtaagtgcgttcccatccagcgcctgcccctcttctgcctggggatttagtttcctgcaaggggccccagcatgggcatgggcaggcgggtggaggccctcaggcatgggcatgggcaggcgggtgggtagaggccctcaggcgtgggtgcaggcaggtgggtagaggccctcaggcatgggcatgggcgggcgggtgggtagaggccatcaggtgtgggcgtgggtgggtgggtagaggccctcaggcatgggcgcgggcgggtgggtgggtagaggccctcaggcgtgagtgcgggcgggtgggtggatagaagccgtcaggcatgggtgcaggcgggtgggtagaggtcctcaggtgtgggcatgggcaggtgggtgggtagaggccgtcaggtgtgggcgcgggtgggtgggtagaggccctcaggcatgggtgcgggcgggtgggtgggtagaggccctcaggcgtgggcgcgggtgggtggatagaggccgtcaggcgtaggtgcgggcgggtgggtagaggtcctcaggtgtgggcgcaggtgggtgggtgggtagaggccctcaggcatggcacaggtgggtgggtagaggccctcaggcatgggcgcaggcgggtgggtgggtaggggccctcaggcatgggtgttggcaggtgggtgggtagaggctttcaggcatgggcaggcaggtagaggcccttgaggaccgaggcacagaggctggggtgagtgcctctacctggaccagcaaggggcactggcaggaggtggggtagggcccctgacagtctcaggggcagcctggggggctctggggggtttgggaccccatggggggatgttccaccaagcagggggcctggaagggggctgggcagcctggtcctccctcctctcccaacctggtgccctcagggcctctgaggggggaccctgcccaggaccgtgccccgaggagggagtggagaggaggggcgtgcaggcaggaggtggctctgccggggaagcccggccagcggagatggacaggtgctctttggccactgcctatgtccctccaccccagaggccggccaagttggtgaccccagggcaggagctgggcctggcagagccatctccaccaccccaggcgcccagcttcagtcccctctgggcggcggggtcccgggaggacaagctggggcgggggggcctgggtggtggacccaagagtgaccccgatgtgcctccgccagggtcagcaccccgcactacagccccgggctgctcattgagaagagcgatgcctacaccaaagtctactcccgcgccggcctcaccctcatgtggaaccgggaggatgcactcatggtgctcaggggtccccggactcgtggggctggtgggggctccgtcaggcctctgggcagaccccaagggagggcagggagggcagtgctctgacccctcaccgagagggcatgggtggggcagggcctcggcagcgcggggcgtcggtgctggacttggggggcagcagcagaagccgacctggccctgacccccccaggcctcagccttcccccaaacgcactcggcttctcagggacctgccctgccaggccgctccctggctgctgaccccagccttcctgccccaccttcctctggctcaaacaagccacgagtcttgggggttcctggcggctgtgggccgggcgggaggccagctcacctgctccctcccgcaacagctggagctggacactaagttccggaaccacacctgtggcctctgcggggactacaacggcctgcagagctattcagaattcctctctgacggtgaggcccggagggcttggagggggcagggtaggctacgggcccccaggagccctagctgaagggccgtgcatccccaggcgtgctcttcagtcccctggagtttgggaacatgcagaagatcaaccagcccgatgtggtgtgtgaggatcccgaggaggaggtggcccccgcatcctgctccgagcacgtgagtcccctcggtctggggtgggggtcctggcggagctggcctctgaatagcatgctcaccctgcgtctgtccccagcgcgccgagtgtgagaggctgctgaccgccgaggccttcgcggactgtcaggacctggtgccgctggagccgtatctgcgcgcctgccagcaggaccgctgccggtgcccgggcggtgacacctgcgtctgcagcaccgtggccgagttctcccgccagtgctcccacgccggcggccggcccgggaactggaggaccgccacgctctgccgtaagccccggcgccttgtgggcaggggaccccagggagaccccacgctggtgctttccccaagcccgggtgggagctgtgtctgcgccgggcaccttgagctggggggacactcaccgcaccgggcaccttgagctgggggaacactcaccgtgccgggcaccgggagctggggggacactcaccgtgccgggcaccttgagctggggggacactcaccgtgctgggcactgggagctggggggacactcactgagggcaccgggagctggggggacactcaccgtgacgggcaccgggagctggggggacactcaccacgggcaccgggagctggggggacactcaccacgggcaccgggagctggggggacactcaccgcaccgggcaccttgagctgggggaacactcaccgtgccgggcaccgggagctggggggacactcaccgtgccgggcaccttgagctggggggacactcaccgtgccgggcaccgggagctggggggacactcactgagggcaccgggagctggggggacactcactgtgacgggcaccgggagctggggggacactcaccacgggcaccgggagctggggggacactcaccacgggcaccgggagctggggggacactcaccacgggcaccgggagctggggggacactcaccacgggcaccgggagctggggggacactcactgagggcaccgggagctggggggacactcaccgcgccgggcactgggagctggggggacactcactgagggcaccgggagctggggggacactcaccgcgccgggcactgggagctggggggacactcactgagggcaccgggagctggggggacactcaccacgccgggcaccgggagctggggggacactcaccgtgggctgagagcccttctcggtgcacttcggggtggagcggctgctgtgccccagcctcaccctcactgcgtggcctctgcggttccagccaagacctgccccgggaacctggtgtacctggagagcggctcgccctgcatggacacctgctcacacctggaggtgagcagcctgtgcgaggagcaccgcatggacggctgtttctgcccagaaggtgcgtgtggaggatggccccgccccggcactgcccaccagatgagaggcagccctggcctggggttctcgcctgcgctgaggggacggctccgctgggtggtgggggcagcggcggcacagaagtgcctctccctccacccgataccgggggagaaggggcctcggtgtgaggcccttcccaaagggtggcttcagggaggccgggaagggggctgccttcctggttatcaccctggggacagacctcctcctgcccggcccctggcctggtgcctgaggcctttgggagcagctcgattgtcaggggcaggaaggtggcctggaggctggacccccatggccagaccccaacccagggaccaggtggggaccgcaggcgtcagcacaggggaccagtggtgcctgcgggtgggaggcctggctggcagcccctcggtggggattctggctctttctgagccagccggggtgacatcgcctccctggctgtcccaggcaccgtatatgacgacatcggggacagtggctgcgttcctgtgagccagtgccactgcaggctgcacggacacctgtacacaccgggccaggagatcaccaatgactgcgagcagtggtgagtcccggggccagggctgggcacagcagaggctggggcggctgagccctgaccctgtgccccgctgcccaacagtgtctgtaacgctggccgctgggtgtgcaaagacctgccctgccccggcacctgtgccctggaaggcggctcccacatcaccaccttcgatgggaagacgtacaccttccacggggactgctactatgtcctggccaaggtaggctgcccagggtctggggcatggggcagagctggggctggcatccaggcccttggctgtcccggggtgggtgggctggctgtccctgaagcagagggtgcctgtgggctgtcctggggcaggtgaccatgcttctgctctctggctggagaataagaagcaggccttcctttctaagccactgccgggtcctagggtgcagggtgctgcccgtcccggccctcagcagctgcactgcctcttgccccatcacagggtgaccacaacgattcctacgctctcctgggcgagctggccccctgtggctccacagacaagcagacctgcctgaagacggtggtgctgctggctgacaagaagaagaatgtgagtggtcctgccccctccttctggagccccaggtcccccgaggggggcccttctcagccctgagcaacctcggccttccctgcaggtggtggtcttcaagtccgatggcagtgtactgctcaacgagctgcaggtgaacctgccccacgtgaccggtgagttgtgccccagggaggggcccgggcccttcgagctccactgggcctgcagtgattcggacagtccagccacctcggacccaggaggctgggtgggaaggttccacggggggagggtccctgcggcacccagcaggctccgtcctgggtcctctgctggagggggtggtgggagggtgacaccctcccgctgctcacctgggccaggcaggtcccgggagccccgcccctcgccatgccccttactgtgtccctcatcgtgcccctgcccacagcgagcttctctgtcttccgcccgtcttcctaccacatcatggtgagcatggccattggcgtccggctgcaggtgcagctggccccagtcatgcaactctttgtgacactggaccaggcctcccaggggcaggtgcagggtaagtggccccaccggggttgccccaacaaaggcccacaggggggcctgctagccccagactcttcccaaccctgtcctggcccctcaggcctctgcgggaacttcaacggcctggaaggtgacgacttcaagacggccagcgggctggtggaggccacgggggccggctttgccaacacctggaaggcacagtcaagctgccatgacaagctggactggttggacgatccctgctccctgaacatcgagagcggtgaggctcggcaacacgggcgcccccacctagcgtgcctagggtacccggcccatggcctggaagggcagacggggctcccagcaggaagcatgggtggtgaggggcagaagtgaggtggctctcctccaggggcagcccggcccctgctgcttcctgctgtggctagtttatggcggccatggtggcagcctgccaggtgacctggaagagggcctgggctggtccctacctgccccgtcatgtccaggatgctgggcccttgggggtgagagacgggaggtggtgggtgccctgcaggggtttctatctagccaggagctgcctggaaatttgactcacggggaggaaggggcctgggcatcggtgcacagagggaaccatatctggggcctaggcagccaggcagcagggcccaggggatctcacgggggtcccgggccccgctgaagttccgatcccccactccccagccaactacgccgagcactggtgctccctcctgaagaagacagagaccccctttggcaggtgccactcggctgtggaccctgctgagtattacaaggtgggtgggacccacacccccaggcccccatgccatcgaggtggactcagggcacccccagccccccatgccacccgtgaggtggactcagagcacccggttgggcccactggttgctgtgtgtgcgtgtgagcttgcatctgtgagcgccgggccacactctgcctccctgcctcactgcccgtccaccttgctctgtcgcccagaggtgcaaatatgacacgtgtaactgtcagaacaatgaggactgcctgtgcgccgccctgtcctcctacgcgcgcgcctgcaccgccaagggcgtcatgctgtggggctggcgggagcatgtctgcagtgagtgccgtccccgtgggctgcatcctggggatggggtccgggctttgagctcctgggacggggctgggggccctgagcacgggtggtccagggagaggggtcggccccctgcagccacggaccaggctccagcttcgtcagccggtggtagcaggaaaccagcaactcctatagcaaggggcggccacgtagcaggggcagaacctggggtgggcctggagctgtggcggccgagtgtgggagtgggtcccagagtgtgcactccctggccccctggccaccctggggatgggagctgggcgtctggctcttcccgtccctcacaccaccccgtggtcctctgcagacaaggatgtgggctcctgccccaactcgcaggtcttcctgtacaacctgaccacctgccagcagacctgccgctccctctccgaggccgacagccactgtctcgagggctttgcgcctgtggacggctgcggctgccctgaccacaccttcctggacgagaagggccgctgcgtacccctggccaagtgctcctgttaccaccgcggtctctacctggaggcgggggatgtggtcgtcaggcaggaagaacgatggtgggtacctgctcgggggtcaggtgtggcgtgggggcgggggagctccttctgaacctgccccaagcggagacctgggagtctctacctggggaagctgagacacccaaggctgaggggtgcctggggtggggggcgctgagaggcatcaggctcacatctgcggggaagctgcgggctgtctgtggccgtcctgcatgggccccgctcatccctggccttttccacagtgtgtgccgggatgggcggctgcactgtaggcagatccggctgatcggccagagtaagtggcactgccccggccacccctccccagccacccctccctgcctgccctggccaccctccccggccacccctcccgggcctgcctgagacccccagcttcagctggagctgaggtggcccctccgtcccacaggctgcacggccccaaagatccacatggactgcagcaacctgactgcactggccacctcgaagccccgagccctcagctgccagacgctggccgccggctatgtgcgtgttgggggcgctgctgtgggcgggcagggattcctggctggctgagcctggctcttgtgctgtgcccccgctagggtctgggtgccgagtcctgaggacgcaggccctgttgatgctgtccctggccctgggagggaagtggcagcctgtgagccaccggggcacaggggccagtgtagggcccttggccggcagccctcaccagtctcactgccctgtggcgggcccaaggggagggaagcctgagcccaggccagggggagtggtgggaggtctgggacatgacagagactgcacggtcaggcctttcctggttgcacatccaatcctgaccccagggagggctgcagcctcacctgtccacccctgaaccccactctctggctgtccccagtaccacacagagtgtgtcagtggctgtgtgtgccccgacgggctgatggatgacggccggggtggctgcgtggtggagaaggaatgcccttgcgtccataacaacgacctgtattcttccggcgccaagatcaaggtggactgcaatacctggtaagctggcccggcctgtcctggctgcctcccaggccccacgtgctccgcaggggtggccactggagagcggtccaaggggcaagtgcctctcctgggggttccgcctgggtcttgcgagatcctgtggtggcccctgtcccacgggcagggtggtctctcatgtcaactgctggtcttgaagccatgggagaagggacatttggagccacttttggggcctgcaggtgtcctgtgtgggaggcacagggagctgtctgcacggtgcccagggtctcctccagccacccatgagcaggtcctgggtcccttcaggctcctctcctgtcctcctcagcacctgcaagagaggacgctgggtgtgcacccaggctgtgtgccatggcacctgctccatttacgggagtggccactacatcacctttgatgggaagtactacgactttgacggacactgctcctacgtggctgttcaggtgtggtcacgggcactgcctggtcgggctgcttatggtcagggaccctctgcctgccccaagtgcagtgcttagctccccgagaaaccctgagacttgggaaggccggcctttcctcagccccagacccgcacctgcacccgcaggaggattcgttcttctagccagggctgggtaggggtggtaaaacccctctgtactgcccagttctgtggttctcctctgggtcctcctctgggttctcctgtgggtcctcctctgtggttctcctctgggtcctcctctgggtcctccctcctctggatcctccctcctctggatcctccctcctctgggtcctccctcctctgggtcctccctcctctgggtcctcctccaggtcctcctctgggtcctccctcctctgggtcctcctctgggtcctcctctgagtcctcctctgggtcctccctcctctgggtcctcctctgagtcctcctctgggtcctccctcctctgggtcctccctcctctgggtcctcctctaggtcctcctctgtggtcctcatttgggtcctcctctgggtccttctctgggtgcacaaggtgggtgcaccagccatggggactgagggcacctgtttggggagctgagtaaaggccagggctaggccgctgcccgcgcggctctccagatccaaatcccacagccctttgaggcaccgtgatccccagggacaggggacaggcctgcagcagggtcaggtccttggatgggccaggccagggcctggtttgtctgctcagtggctgtgaccctgccaactggggcgggtgtgccccgggacacctggggtccagctgtcctggctgaccttgccctcctggcccccaggactactgcggccagaactcctcactgggctcattcagcatcatcaccgagaacgtcccctgtggcactacgggcgtcacctgctccaaggccatcaagatcttcatgggggtgagtgctgctggccctggggacgcgtgagccctgcgggaccctcagaccagccagtgactgggcctctcctccgggcagaggacggagctgaagttggaagacaagcaccgtgtggtgatccagcgtgatgagggtcaccacgtggcctacaccacgcgggaggtgggccagtacctggtggtggagtccagcacgggcatcatcgtcatctgggacaagaggaccaccgtgttcatcaagctggctccctcctacaaggtgggctgcctccctgcctgccctgccccctcctggccagccccccaccccctgccctggtgtttgcaggacaagcccctgtcctccctccagcccctttttggagcccctgtgatgcttgtctcttgcagggcaccgtgtgtggcctgtgtgggaactttgaccaccgctccaacaacgacttcaccacgcgggaccacatggtggtgagcagcgagctggacttcgggaacagctggaaggaggcccccacctgcccagatgtgagcaccaaccccgagccctgcagcctgaacccgcaccgccgctcctgggccgagaagcagtgcagcatcctcaaaagcagcgtgttcagcatctgccacagcaaggtgggctggccgggccatggtggggcaagtaggcagaggagggctgtaggtgggctgtgactgtgggctggggccatgggcggggccgactaagcagagcagggctgtaggtgggctatagctgtgggcggggccatgggcggggccgactaagcagagcagggctgtaggtggactatagctgtgggcggggcatggcggggctaactaggcagagcagggctgtaggtgggctatagctgtgggcggggccatgggcggggccgactaagcagagcagggctgtaggtggactatagctgtgggcggggccatgggcggggccgactgtaggcagagcagggctatgggctgactgtgggcgtggtgagggtgccgtagagcatgctaatgaccagggcgtggtcatagcagggtagggtcttgggtgctcctggggctggggggcttctccacatgctccccacaccttcaggagtcgccctgctgcgtcacgcaccacacggcgcttgtcctccagctttggctctggccgctgcctcctttggtcacatgaccgtataatcggcctcccctctgagaccctgggctggacccccggcctccctctgcctccccaggctcagatattcacccggagggagaaaggacatgtgtcccccatgcccacacatccccagctacaggcagctggggaggacgggttctaggatggccatgttacagctgaggatgcagaggggttgggtgatgggtctgcacagccacggcgggacaggtgtctctggaccctctccccaaggttggccctgccggggccctggctggctggtgctgggtaatgtgccctgtcccaggagcagggccggcctcagggtcctgagctccagggcactggggaagtcctggctccatgagggcaggacgggcccaggacagaccagggtgttctccccaggtggaccccaagcccttctacgaggcctgtgtgcacgactcgtgctcctgtgacacgggtggggactgtgagtgcttctgctctgccgtggcctcctacgcccaggagtgtaccaaagagggggcctgcgtgttctggaggacgccggacctgtgccgtaagagcctgcccgaactgcactcagggccgggacgggggctgggaggtgctgtattgcgggccggggtgacactccttgtccatccaggtgatgggtgtgcatcacccaccctttccccgacttctccagtgtccttctttggggccctgtgggacccgggttggcagagcaagcttgatgcgtctgcgtcccagcccccgaccccagattcgccctcaccccggcccaggcctgagccctcctgcgtctgaccctggccctgtctcccccaagccatattctgcgactactacaaccctccgcatgagtgtgagtggcactatgagccatgtgggaaccggagcttcgagacctgcaggaccatcaacggcatccactccaacatctccgtgtcctacctggagggtgagcagggtggggcgggcttcagcgggggtgatggccgaggggcctggaggctgagtggggcagccctcgggagaggcaacagtccactggcctggagggtgagccaggcggccctcgggggaggctacggccgacgggcctggcactgtggggctgaaggctgatgtctggagacccatggggacacccggagggaggcctgaccctcagggtacccacagcccagggcagccaggctccccttgctgcaggatcaggagggaagcaggctatcgtggaaactgggagtggcaggggtgggaggtgctgaggttcgtgcagagcagggcgggttggggagcatttcaggcacaggtcaggggaggcccctgccgggtgctggtgtctgagctgagaaccagtgacgtgaaggagggactggtgggaagtttgggaggagtatcccgccatgggagaggaacatgggtcttgggactcagggctgctcggggggcccgatgagactgggcagggctcctcagcaggcagcgttcagggctcagtggggtggggagatccaggccctgcctttccaatccccggccttcccagaggggcatcctgcagagaagggcctgccagggtagggacggtgggtggggtgtggtggactgcggtggtcccaaccctatgccctgtgtccaccaggctgctacccccggtgccccaaggacaggcccatctatgaggaggatctgaagaagtgtgtcactgcagacaagtgtggctgctatgtcgaggacacccactacccacctggagcatcggttcccaccgaggagacctgcaagtcctggtacctaagcccacgtggcagggggcctgggggagctgcacatatgggcacatgagtacacacacacgtgtgagcacacagtgtacacagtacacagacacacaaccgttccacatgggtgcacatgcacacaaacgcacacagcataccacgtgcacacacacggtcacatgcatgcatggtgcacacatgcacacatgaatggatgccaacatgcaggcacacacagtcacacatgcacacagcgcacacatggacacatgcctagacgcagatacccaggcatacactcacggttacacactcacgcacatatgcatggatgcagacacgcaggcacacacggtcatatagtcatacaccacatgcacacatgcacagacagacacccaggcacacacagttacacagtcacacatgcacacatgcatggatgcagacacgcaggcgcacacacacatgcacagtgcacacgtacacatgcctagacacagatacccaggcacacacagtcacacatgcatggacacagagtcacatgtgcacacatacacacgtgtggacagacataggcacagtcacgtgcacacatgcactcacactcagtcacacatgaacatgtgctcacatgcatggacactgacacgcaaggacacacagtcacacatgcacacatgcatagacacagacacccaggcacacacagttacacagtcacacatgcatggatgcagacacgcagtcacacagtcacacatgcacacactgcacacatgtacacatgcctagacacagatatgcaggcacacacacatagtcaaacatgcacacatgcatggacacaaagtcacacgtgcacacatgcacacatgcatggacagacacaggcacacacagtcacgtgcacagatgcactcacagtcacacatgaacacatgctcacatgcacagacactgacacgcaggcacacacagtcacacatgtacacgtgcctagacacagatacccagacacacacaattacacagtcgcacagtcacacatgcatggatgcagacacacaggtacacaaggtcacacagtcatataatgcacacatgcacacatgcatagatacagacacccaggtacacactcacggtgacacagtcacacatgcacacatgcatggaggcagacacacaagcacacacagtcacacagtcacacatgcacacaggagccaggctacagaggtaccagtccctcactgcggcggggggtcttctgttctcatcccatcctctgggtctggctttttccttcctctcctcgcccctgctctgttcccacagttacaacccagtggggggctcttccggagctggctttggggcagtgcctgggggctttgggctcggtactagccacatggggaagctgggggtctgagcagcgtgggcgcgttgtcagtggagtgggacttgtagccatgtgcttgctttgcagcgtgtgtaccaactcctcccaagtcgtctgcaggccggaggaaggtaagctgccctctgctgccagccctgcggtggccgggcccatcctggggaagcctgtggggccttggatcggtggggggtgctggtctcctcctgggctctgcccctttggtccccccccagctcagacccacctccgatgtgtatcagccctggggggctgctgtgacccattttgtttcttctggggtgtcggtgtcctgtggggaatttccgtcaccctctcccgtgatccagcttctgcgttctgatgagattccctttattcaaagagaggggctctgggacgggtgcagtctcactggagcatttcttagctgcttgtgggggctcgggcacacctggccttcttcctatcttgctcctgatgaggtgattcttggcctcaccctcacccccaggaaagattcttaaccagacccaggatggcgccttctgctactgggagatctgtggccccaacgggacggtggagaagcacttcaacatctgttccattacgacacgcccgtccaccctgaccaccttcaccaccatcaccctccccaccacccccaccaccttcaccactaccaccaccaccaccaccccgacctccagcacaggtaaggccccctggttccctccatgcttcctcgggctctcaccttcccctgcatccagcatccagcacagagggctctttcgggggcaggccccggcctggtgcagccaggctgtgacccctgcacaccagctgcagagtgaggtgacagtggcattcctctgcactgaggtgtgagggggcctgccctggctcccctggcctggtgcattgagatagtagcatcctgaccacatccccaagcccagaccacagtggaggatcacctggggagatttctgaaaaccagcaggaaactatccctaagggttagagaaattttcttatgttcccctgcgtttgttctggttgaaatcctagctaccactgaacaagccaccaggggtatgatagccacagaaaaaagaaactttttttaaaaaaggcaagattttaaaagatcttgaactatataatgatatcctcttttcttcctgctttattgcagttttatcaacaactccgagtaagtgacggtgatgatattcatgatgacaagcagggtgggaggagcgaagtcttataaaatcacctgcaggatgcttccttcagggcccagatgtgaggctggcggggctggactcctctgcttatggaccaaagatggatgtattttggccacttcattcatggtttgctgaggccaggggctaaagtgagacctgattggctgtcggtgacaatattgctggttaagagtggagacaaagccccttccgtcacacttccttactggaatgggaagctctcttgttattgattctttgaaaaaaaagtattgaaaatagctgaggaaagggtccatcacacccaggtgtggccctgggtggccccgtctctttgggctcaggttttcagttgcaaaatgaggatggaagtggtgtccagccctgagctctctggccctgcactctggttttttggcaatgacagggaaaagagagattgcagctgggggatggtcatggaggtccctgggtcctctgaatcctggtggcttcctggaggtgcctctccccaggtgtgagagacaagaacttggttttgcttccctagagctgtgctgcctctggtctgactggatcaatgaggaccaccccagcagtggcagcgacgacggtgaccgagaaacatttgatggggtctgcggggcccctgaggacatcgagtgcaggtcggtcaaggatccccacctcagcttggagcagctaggccagaaggtgcagtgtgatgtctctgttgggttcatttgcaagaatgaagaccagtttggaaatggaccatttggactgtgttacgactacaagatacgtgtcaattgttgctggcccatggataagtgtatcaccactcccagccctccaactaccactcccagccctccaccaaccagcacgaccacccttccaccaaccaccacccccagccctccaaccaccaccacaaccacccctccaccaaccaccacccccagccctccaataaccaccacgaccacccctccaccaaccaccactcccagccctccaataagcaccacaaccacccctccaccaaccaccactcccagccctccaaccaccactcccagccctccaaccaccactcccagccctccaacaaccaccacaaccacccctccaccaaccaccactcccagccctccaacgactacgcccatcactccaccagccagcactaccacccttccaccaaccaccactcccagccctccaacaaccaccacaaccacccctccaccaaccaccactcccatcaccaccaccaccacggtgaccccaaccccaacacccaccggcacacagaccccaacaacgacacccatcaccaccaccaccacggtgaccccaaccccaacacccaccggcacacagaccccaacatcgacacccatcaccaccaccactacggtgaccccaaccccaacacccaccggcacacagaccccaaccacgacacccatcaccaccaccactacggtgaccccaaccccaacacccactggcacacagaccccaaccccaacagccatcaccaccaccactacggtgaccccaaccccaacacccaccggcacacagaccccaaccacgacacccatcaccaccaccactacggtgacaccaaccccaacacccaccggcacacagtccccaaccccaacagccatcaccaccaccactacggtgaccccaaccccaacacccaccggcacacagaccccaacatcgacacccatcaccaccaccactacggtgaccccaaccccaacacccaccggcacacagaccccaaccccgacacccatctccaccaccactacggtgaccccaaccccaacacccaccggcacacagaccccaaccacgacacccatcaccaccaccaccacggtgaccccaaccccgacacccaccggcacacagaccccaaccacggtactcatcaccaccaccactacgatgaccccaaccccaacacccaccagcacaaagagtacaaccgtgacacccatcaccaccacaactacggtgaccgcaaccccaacacccaccggcacacagaccccaaccatgatacccatcagcaccaccactacggtgaccccaaccccaacacccaccactggaagcacggggccccccacccacacaagcacagcacccattgctgagttgaccacatccaatcctccgcctgagtcctcaacccctcagacctctcggtccacctcttcccctctcacggagtcaaccacccttctgagtaccctaccacctgccattgagatgaccagcacggccccaccctccacacccacggcacccacgaccacgagcggaggccacacactgtctccaccgcccagcaccaccacgtcccctccaggtaagcagagctgcttggttcctctggcctgggatgcttcttcctccccttgtgccgggcaggactgtcccaggaaggctcaaggcacgttctgggcgcctctctgcccacgaagcttggtcactgtgtgggcagaagccactgacactggccagtgctgggcagtgaagccaaaggccattccgcttgcccataggacagccttctgaggagctgctgacaccggccagtgctgggcagtggagcccttggctatcctgctcgcccataagacggccttcttcaggggcccactgctatgtgatgcggtgctgtgggagcccatcaaggctggggggcagagagaggctgccagtgaggtgcctgcgggtccacctgcttctggctgcagcccctccttggggccttttcctggtggacggcgtgccacagccagtgccttctggacgcctcttgctggccatcggcttggccagcaagctgtgttgctgccagagcaccaggtcacctgcaggctctcgtgacactcggctgtggtgatactggccttgccgctccaccctgcctggtgactctgagagcctgggaggtgggcacgaggccctggtcctccagttctgccacccggtcggctgtctggctcccttgcagctggggagtggcagttgggaccctgtggcatctgagatgtgcaatgtctcagccctcactggtgtctcctgctctcacaggcacccccactcgcggtaccacgaccgggtcatcttcagcccccacccccagcactgtgcagacgaccaccaccagtgcctggaccccaacgccgaccccactctccacacccagcatcatcaggaccacaggcctgaggccctacccttcctctgtgcttatctgctgtgtcctgaacgacacctactacgcaccaggtactcaggctgttcacatcctgtgcttgggtggccgaggctggccccggcatgtaccaatgggtcaggtgccagggctgagatcgcagtagaagcgtctcaggaggcagcagccgtcgagggtggctgtgtccagggcacggcttcccttgggtggcctctgtggggacctccgctgtggggacctccacggggtccagcggctagccctgcctccggatagccctgcctctggacggtgtgatcgtgggtctgtctcccttcgcaggtgaggaggtgtacaacggcacatacggagacacctgttatttcgtcaactgctcactgagctgtacgttggagttctataactggtcctgcccatccacgccctccccaacacccacgccctccaagtcgacgcccacgccttccaagccatcgtccacgccctccaagccgacgcccggcaccaagccccccgagtgcccagactttgatcctcccagacaggtcagtgggctgcaggcggctttgtccccatggcactctgcgcagcatgtccgggcagctgaggccccaggcaccacttcctgctggtcgtctgagggccgaggcctccagcaacccttgggtgcagggtctgccgagccctccacattttcaccgtgccccgctgtgcctggcgaggtggctggctgcagtgaggtccgtggaagccacttcggcctccagcctcccggctcagcacccgcccctcctgagcgcagaccaccccatcctgtgccggtccccctgacgtcccttgcctcccgtccccaggagaacgagacttggtggctgtgcgactgcttcatggccacgtgcaagtacaacaacacggtggagatcgtgaaggtggagtgtgagccgccgcccatgcccacctgctccaacggcctccaacccgtgcgcgtcgaggaccccgacggctgctgctggcactgggagtgcgactgtgagtccggggcccccaggccctccccgcatctcctgccctctccgtgggtgggggctgcagggcccgtctcccgggggcggaagggctgaggctccttgggcacagatcccactgaggtgttcgctgaggctgggtgacttctgagggtcttctcacagccctgcttttgcctcattgggtggggagggcctgggcaggtggagggcttgcctggtggagttagggctcctccctggaacaagggtgcttctgaggcaagagggggctgagttgaagtttgaaccctggtccgtcctgcagaatgggccactgtgggtgcgccagggcaagtgcagctcagacatccccgtgcccacgcacaggagtggggttttcaggccccagcttcctgctggctcttcctgactatgccccagcccagcccttgcacccgaccccggccgaggggcacaggtggcacggctcactccggctcccttgcaggctactgcacgggctggggcgacccgcactatgtcaccttcgacggactctactacagctaccagggcaactgcacctacgtgctggtggaggagatcagcccctccgtggacaacttcggagtttacatcgacaactaccactgcgatcccaacgacaaggtgtcctgtccccgcaccctcatcgtgcgccacgagacccaggaggtgctgatcaagaccgtgcatatgatgcccatgcaggtgcaggtaggcacagcgtggccacaggaggctggcatggaggcgggtgctgacatgggccccaatgcaccctggttccccaggggccagaggactgggctgtgggggtgccaaggcatagcctctcctagagctgggctagaaggtaggatggggtgggcgactggctccgggacatatcagctcttcctgcaggccctccaggtgtgtcctgggcccctcgagccctggcaccatgccacgctgggcacagtctctgcagcagaagctgcctcctgaggacagagtcagggacagggctctgcacacccttggctgagatgcccctacttgcaggggaatcattggttctgaggctcaggaggccccgggagcctgcgccgggctccacagtccccaggtgctcccaggagagctccttcactggctcacccatgggaccagggtctggttgggagcagtggagtggaagcaagaaagggggcaggaaagcggggtaggcagggccctctccctacatgtgtaggtcagagagcaggcggggtggggcagccctggagctctcacaaggagaggaccgaggcagctgcagctcccatggtgtgtcggccacaggtgcaggtgaacaggcaggcggtggcactgccctacaagaagtacgggctggaggtgtaccagtctggcatcaactacgtggtggacatccccgagctgggtgtcctcgtctcctacaatggcctgtccttctccgtcaggctgccctaccaccggtttggcaacaacaccaagggccagtgtggtgagttccgtgacccccatggcccccgaggcccccacggctcccaccgtcccctgtgcccccatgtcctgccccagggcgggtggccaggccaggctgaggctgaggctgcgtgtaaacacccatgggcctggctgtgggcctcttgccccgctgctcggggctgctgtggccatcacccgggttcagtctctgtgaggagccaacaggagggggcctggcctggtctctgccctcggccctggctggccggtcctgggcatctgggctggagaagggcagggcttaccctgtctgcaacgtggcctctctcactgatacaggcacctgcaccaacaccacctccgacgactgcattctgcccagcggggagatcgtctccaactgtgaggctgcggctgaccagtggctggtgaacgacccctccaagccacactgcccccacagcagctccacgaccaagcgcccggccgtcactgtgcccgggggcggtaaaacgaccccacacaaggactgcaccccatctcccctctgccagctcatcaaggacaggtgaccccgcccaggcctgcctgtggccacgacaccaataagctgagggcctctgtgccccagcccccagctcttgcaaagaggaaggaggcagcgcgtggggcctggcgctggggctgggaaggcacggagccgcggaaccaggatcaggcgctaggtcgccgtggggtccaggacccaggcccttgggttccacggggctgagctgctacgtgcggcctgtgcctttgctgaactccagtctctcctggctcccgggaaggtgcagggctggccgagtgtgaggcccggagtaaaccagtcaacccaggacagagctcagggctgatattgggagggcagatttgggctttgacagagagggggtgctcctaacgctggcagtcatggggggtcagcatcctgtccctggaagtataggggccaggtataggctgggtgtccatctgccagggttgctggagggggtcctgaagctgatgaccacatagacgtggtttctatctctgggagccgggctgcagagccaccttgctcggccatcccttggtctgtccctgagctgtccccctggctggcctgtcccttgaccctccatcagccacaggcgcctctctggcgggtgccggactccaggaggacagtccgggcagagacgctggggtagagagcaggggagaggcaggtgccacctgagtgtgacctgtgcctctccctgcacagcctgtttgcccagtgccacgcactggtgcccccgcagcactactacgatgcctgcgtgttcgacagctgcttcatgccgggctcgagcctggagtgcgccagtctgcaggcctacgcagccctctgtgcccagcagaacatctgcctcgactggcggaaccacacgcatggggcctgctgtaagtgcccatctgcccctgccctggagctgggggcctgcaggccagacgtggtctctaggctctgccaggtgctgtgcccagcctgaagctagacctagatgggctgcggccagggatgcagagatggcgggtgtgagaccagggctggggccatggggtggggaaggccaggctggaggggctgaggtgctggggcttctgccagcatcgctaaatgcaactgggtgcccaccacccagctcgggacaacctcgagggtggaggttgatgcccaggcagctggtcaccctcctccgtgtgtggggcactgggcagctgtcactcaagggggtccaggctcctccgcctgacatgaggcagccctctgacctctgcccatgtccctcagtggtggagtgcccatctcacagggagtaccaggcctgtggccctgcagaagagcccacgtgcaaatccaggtatgttgtttgagggtccaccaggaccgtgggctcgccttctgcagtgcggagggtggcatcatctgggcatagcagtcccacctgccagctccccagccccaccccacctgtctgacaatgccctcccgcccccagctcctcccagcagaacaacacagtcctggtggaaggctgcttctgtcctgagggcaccatgaactacgctcctggctttgatgtctgcgtgaagacctgcggtacgccacccactcacactgtcccctcctgcctccctcctgcctcctcctgggtgtccacggaggctgggaccaggacgctgaccaccccccacctctgatccctgttgcacaaggactctgctaacacaacttgtctcctgggtgtccatggaggctgggaccaggaggctgaccacccccacccctgctccctgctgcacaaggactctgctaacacaacttgtttcttccctcttcctaggctgtgtgggacctgacaatgtgcccagagaggtaggccccaccgtgttgctgggggatccttccacaaattctgaattctggggagtgagggatggacatgaaaacctggagcctcaaagattgaggaatgaggtcatctaagtcctggatggctgagttggcatggacaccacccactcacccacccatccttccacccacccactcatccacctgtgcacccatctacccactcacctacccctccatccttccacctacctagtcatcacccactcatctatgcacccccccacccacccactcatccatccatccatccaccatccacctacccaaccatccacccatccatccaccatccatctaccatccaccatccacccaaccatccaccatccatccatccacccatcatccatctaccatccacccacccacctatccatccatccatccaccatctgtctaccatccacccacccactcatccatccatccatccaccatctgtctaccatccacccacccacctatccatccacccatccatccatccatccatccatccatccatccatccatccacccaccatctgtctaccatccacccacccacctatccacccatccacccacccatccatccacccaaccatccaccatccatccatccatccatccatccaccatccatctaccatccaccctcccatccatccacgcatccacccaaccatccatccatccatccaccatccacccaccatccacccatttatccatccattctccctccctccattcaccacccattggtcatatgatactctgtctagaagctctgacatgacatcttggccacctctgtgctgcccatgcctcctacctgtggtagcagccatgtggatgattccttagctaaattctgtacaaacctgagaggcctgagtggagaatttgccacgtgccaagcccctgcttgtcgatgctggtgagcaggtaatggctttgtgatatcagtgaatgagcagctactgtcctatcccagaacctgcctggtgtgctcagaagtgaggagggacatggttttcccccaggatccctcagcactctgctcagggtggctgtttctccccgctgaccacagctgcagctccggggctgtggtgaggtggggcctgcctggtgccacctgtcctctctactcacccttctttccctgcagtttggggagcacttcgagttcgactgcaagaactgtgtctgcctggagggtggaagtggcatcatctgccaacccaagaggtgcagccagaagcccgttacccactgcgtggaagacggcacctacctcgccacggaggtcaaccctgccgacacctgctgcaacattaccgtctgcagtaaggccatcccctggggcccatgccacctctcaggggtgcacacatccctgtaggctgggctgcctgctgtcccctccttggcaagtgaggaaacagctggcttgggggcctctgctgtgccccttgagagggcttgggagggggccgctgggcccagtccaggcatccctgctgcagggcctgacctgggtggggaggggacccttggaggtgctggaggcccgaccctgtgcagtggccccgggggctttgcctgggaggagccaccctcacggccgcgtgcgcaccctgtcttcagagtgcaacaccagcctgtgcagtggccccgggggcttggcctgggaggagccaccctcacggccgcgtgcacaccctgtcttcagagtgcaacaccagcctgtgcaaagagaagccctccgtgtgcccgctgggattcgaagtgaagagcaagatggtgcctggaaggtgctgtcctttctactggtgtggtaagcagggctggtgggcagggcagggaggaggctgccgcccggggtggggtggctgtaagggggttggctccctcctgggggtctcagattctggggacacagatggctgtacgcttggctgatgcacccaccccagccctgagcgctcgctccatccactgggtgtgcaccgggagtgggggtctggccaggtggccgccccggggcagtctccaacgaacggccttctccgttctttctcccaagagtccaagggggtgtgtgttcacgggaatgctgagtaccaggtgagccctgggctgggtgagagggaggaggggaggaggtcggctgcagcgtgggggtcctggcaggctgttgggctggctgggatgctggagaggcccctgcctcatgtctctccctgtgcccgaagcccggttctccagtttattcctccaagtgccaggactgcgtgtgcacggacaaggtggacaacaacaccctgctcaacgtcatcgcctgcacccacgtgccctgcaacacctcctgcagccctgtaagcggccaccctcctccttcagcctgcccttttccctcctcccagacaagcacccgggcccatgtctgcatcgtgaccctttctttcctcctttcaacgccaacctgtccctgtccccacctctccatcctgacacctgcccagcctggggcctcctccaggtgggggggtctcggcagccctgcaggctttgtgtggtgtggggtacagcctgggagttcagttgcagtggcgtgtctatgtgcgcagggcttcgaactcatggaggcccccggggagtgctgtaagaagtgtgaacagacgcactgtatcatcaaacggcccgacaaccagcacgtcatcctgaaggtaggtgtgcactgccggccccgacgcggccgggttgcttgagcccagggcaaggcgcgggccacccaggatcccccagctgagtcctcccagtcctgggcgcagctgtgatgggcgccctggggctgccatgacaaatgagcaggcgtcttcagggcagaaagggattctcctggttctgcggcccagaaatccatagagcaaagggcctcagggctgtgctccctcggaggcgctaggcaaggacctttcccagcctctggtcactctaggtgccccttggctgtgaccacgaggtttccttccctgtgtctgcctctcctctcccttttaaggatttaggcaccccaagcaggatgatctcatcttaggatccttcacttaatgacaccttcaaagaccccctttccaaggcaggtcacattcatagattcagagttagaacacagacagacctttgagggttgtgtgggctccaggctggtgcctgatgtggggccccgcccatgtcacttgtcctgtggccctgggcctcaccaggaagcctccccggccaggtgtctccagggtgtcttcctggccgggctggggctgggcctgctgccctccctcaccagagctccctgccccacagcccggggacttcaagagcgacccgaagaacaactgcacattcttcagctgcgtgaagatccacaaccagctcatctcgtccgtctccaacatcacctgccccaactttgatgccagcatttgcatcccggtgagttggccacctggggcctggctgtgtgtactctgccgggagtgggggtgcctggtgttctggggggctggggccccagtgctgcgacagtgacctcgggcctggtctgagctgccgcaggaggctttgcctggggctttctgcagcagctacccccgcccacggcatcgtgggaaggtgctctcatccccaggaatgtccgggggtcccgggctcattctcctttccctctagggctccatcacattcatgcccaatggatgctgcaagacctgtgagtacagggcacagcctggggggtaggcagggtgggggcacaagggctggtgccctcagccccgcctggggtggctggaggctggacaacggcctctgggtgggcagtgagggctgggggctgaggccgagcctggggaggggacgcagcgagggagagcctcctcgaagatgtggaggccctgccctaagccgctgcccgctctccccaggcacccctcgcaatgagaccagggtgccctgctccaccgtccccgtcaccacggaggtttcgtacgccggctgcaccaagaccgtcctcatgaatcattgctccgggtcctgcgggacatttgtcatgtgagtcccaggctgggagtgtgcctggagggggtggtggagaccccagggaggcgagaggccagcgctggccccggaaggtcacccctcactccgccctccccccaggtactcggccaaggcccaggccctggaccacagctgctcctgctgcaaagaggagaaaaccagccagcgtgaggtggtcctgagctgccccaatggcggctcgctgacacacacctacacccacatcgagagctgccagtgccaggacaccgtctgcgggctccccaccggcacctcccgccgggcccggcgctcccctaggcatctggggagcgggtgagcggggtgggcacagcccccttcactgccctcgacagctttacctcccccggaccctctgagcctcctaagctcggcttcctctcttcagatatttattgtctgagtctttgttcagtccttgctttccaataataaactcagggggacatgc

SEQ ID NO: 75 - DNA, 69245 bp, Homo sapiens
tgcctgggaccagagacagcgtgtccgtttcctccagcccctacctctccccgcctctgttcctgctcccccgcagcacccaggcaccagccccccaccctgctttccaccacttcaccctctattcaggtgacccacccttatatttgcctcctgtctctagccctttcttcaaccctaaaccttcctcctaaccttcaggctttccttccttgtccgccccaaccccagcttcctccccaaggcttgtatgtcccagtgttcacccaagcccttgccctgccagtgcccaagcctcacctgctctttctctagggacttgctgaggtaggagaatgcaaagggggcagtgacaggagagggactgaacagaacagacagcaggagtggctcggggacgggataagccgagaagatagaaatggtgggactggagcagggtggggacttggggtcccagagacggtcccagttggagaaagaggttgcctcttgcctcctgccctctgcccctgctccctgccccagactgccaggggagaactggtgagaggatgagggagccagcactgggtgatagacatggggtgcgatccagagatccaagctagagcagtggctgggaagagatgggagaggagcatgggggagggaggggaagggggctggccatgaggaaggatataggctgagaggaaaccactggggtcagagaggaggggcagcaggtggagaaatggtggggaaaaaagaaatggcaggaagggtggggggtgtcaagttgggcaaaaattagggtgagctaaaaatggcatagggaaaggacgtgggaggtaagaccggggctgggggttgagatgagggtatggtgagacagtgatgctagacagggagtgggggctggggtgggggcaggagaagaggaggggtggcatgtgggagggcctgggaggggtgggaggacctgccctatctccgctcccctccctgacctcatcctggtcctccccttctcctcccctgctcgctgcagactccctcctcactgtcgctgccgagatccacagtcggttgtggctcagcccctgttgcaggggacaagtgagggagacttccctgtcctgccctgagacgccgccctcccggggttggggacagagcaggtgcagaggcactgcagctgctcggttgcccaggtaaggaacagagttctggggagacccagaaggagaggcaagggatttctcgcctatccccatgccccaggtgaaggtgtggcaggtgagctctcagcagtgcttccagagcaaggacttctgttcaggacagaggacataggagcattcgctgggaaccaggctccctgtgaaggagtgtctgggaggagagggtggtatgtgtgtgttggggtgggcagtatgtgtcagggtttggatgggatgcagacaactgagaggggctgggaacaaaccgagggactccgggagtcagatggtggaaccagggtagaggtggttattggtgaggtgagcccctgggccctggaggtgctggggctagcgggaagataggactaggctgaactggtggccagctgaaccttggaaggaaagtgcttgcggaatcccaaatgtcgggctagagcagctgagcccaggctctgggggctccaggctccaggaggtgccagagggtgcttctttgggcatccaaatggggactccctaggtggcagcgtgagagttgcagggagggaggtctgggagatctctttaggaaatactgaaatgggacagtcaggactcgggtctgggacgtgcacagagcctgcagagaggatcctaaaacttgttcttggccagagctctgcactcatgactcacggttcagcagggctgggatggctgagagatgcctctgggggcacaggggctccgtcttcactctgtgccccttccaggctccccttgcctctgtctgtctgaacccgcactctccctcacctcgccgcccccgccccccaccaccagtacacgtgacacgccccgggtgggaagggcgggccccttatctcgcctggaaagaatttaatggcatagaaacaactggaagtggaactgagaggaactactgggaagcaactcggaaacaccacagctgctgcctgccctgcccctgcttcccgcatctccagcccctcctcttttccctgaccctgccttcaagtccctggggacccagcacctcaattcctcaaacttcctttgctcactccagacctagccactaggtgcaggaccagaaactgccttcctgtctctcattgcacccctaaccattttcagctggggcctggaaatcctttctcttaatttttccattcccaggccgattagctccccagaataaggggtatctggattccccaacctacccctccctgacacctccttcctacctggttccagcccaatatctgagacccccacattccctttttagtctcactcctagaatccttctaccttcacctctcattgccagattcaactgagggtgtagcaggagggtcagagggaggcatgggggcaggaccagaacccccatctgtggaacatcttttatggaagccagcccctctccccaccccttgggacctatacagtccctaatgagcaaagtgtcaaagttggctacaacacaaaatacccaggaagctgagtcacagtttgggaagatgcccccatccctgccagccctccaactgtggggagggtgccaagagggtgaggccatatctctctccaaacacacactacagagaaccaccccagacatagtggcagggggaatggtgaaggggagacacaagagacacccaattctttgcttgcccagtaccgagagaagagcagaattatcccaggagctggaatggggagctggagggctgggtggtggcaacagggcagggagggagattgggaaggagcctctgggtgtgtggtcaatggaggctgctctgctcttctagaccaatctcaccagctttccagaaaagctggtgagctctcttcactccttcctggtgcaaagaccctctctgctttcccccactgtgcagggaaagatgaggaatccacttatttggggaggggcactggacaactcacagaggcctccaggggtacggggaagtatggtggaggccatgtgtccgctgcttcccactgggaagggcctcctgctttgttcctctcacaccatccaggttctttcactcacagagctgccctcggagccaacaagaaatcagccttcttaggcatcacccaatgactaggtgtggaggaaacctgaaggggagattgggtgtgtgtgcacgtgtgtgcatgggcacccatatgtgtacctacaaggatgcaggttttgggggtggatttgtgtgtctgtgcaggtatgtttgtacttgtggatgagcacacattaatatatttgtaagtgtacatgtgtacacatctttgtgcaagcattcccagggtgtgggagtgattagcatggccttagacacaaagtgacaggatttgagggtcggtcagagcccatctcttacccaaggctacactccaggctgacagaagggctggggagacaggaaagggcagctctctgtatgccaggcctctcggcctgggctttcttgggtggggagcctcttggtgtggaaacactctgtccctgttcagctccctttccgtctcttgctggctggtagcagaatgtgatggctggtagccccaattactcctttttctctgatccaggagaaaagtttaagagtagaaagccagaagatgtgtgcgtgttgggtggaggtgtgtgtgtgtcacagtcacctccgcctaccagtgacacatcccccactcctcaccggtcagcatttccacacccaccctgccctcctcctttccccagcctctggtctggaagagctgggcacctttcaacatctctcctcaactcttcaccctagctgaatcctgactggccccctcacactcaggtttgccatagccctgtctcctgtcttatcctgggacccccctaccacctttcctcccacctcttgtctctgtgtgctccccaatccctgcctcagtaaactccacaaacacatacaactgggtaaccgtcatccagatcaagaaacaagacacctttagcaccccagaagccccccgccccatgcccctactagtcactaccccctcaagagtatcacacttctgacttggagcactacagattaatgttgcctctcctcaaacttcacataaatagaactgtgcagcatgctctttcctgtgtctggcttttgttcaacatcatcttagtaagatccatcacactactgcatataactatagttcattcctgctttattttattccacggtgtgaataaaccacaatttatttattctactgatgtgaaatgtttgagtagttcccagtttggggctattatgagctatgttgggtatattcctaggagtggaattgcggggtcatagggtttgcatgtgttcacctttagtacatttagtagattctgtcaaacagttttccaaagtgcttgtaccatctggtcctgccaggatcttccctggcctggcctctgattctgcctcagccctggtggctgtgtctaaccaacttccagtcccagacactgtccgtggtcctagccctgaccttggtcctgcccttggttccagccttaatgctagtcctgcgtttacattgaacttttcattcattcatatagtcggtaaatatttattgagcaccagttatgtgccagatgcagggatacagcagccaagaaaaaaaaataggtgccatgcctgccctcatggactttatagtctagtgggcaagaaagtaataaaataatctcacagtatatttattattactttggacttcaaaaaaatatttgtttatatatgattgcaaattgttataaacgctacacatgagaatggcatgatgctgtgatatcacatgataggaggacctgacctggtcaggaaaacttccctgtgaaaaaaatggcgggctgagacctgaaggatgagaaggccaagagagaagggaacagtgttccacacggatggaacagagtatacaaagatctggggttggggatgggcacagagagtatgagggacttgaaggtcagtggagctggaatggagggagggagggaaatgttatgggtggtgaagtgggagcaggggatacatgatggtagggctgtttgtcagtgttctaagagaatttggaagggagacactgaagcattttgaggatagggacatcctgattgcgtttgtgagactgtagagggcaagagtggaagcagagggaagggtcagggctggacacagtggctcacgcctgtaatcccagcacattgggaggctagggtgggaggattgcttgagtccaagagttcaaggccagcccgagcaacatagaaagatcctgtctttgcaaaaaaaattaaaaattagctgagcgtgatggcacacacctgtagtcccaactactcaggaggctgaggtgggaggattgcttgagcaacaggaggtcaatgctgcagcgagctatgatcgcaccactgcacaccagcctaggtgacagagtgagaccctgtctcaaaaaaaaagaaaaaaaaagcagccaggaggcaattgcagttgtcaggcaagaggcggatggaagcttggattagaatgaaggtaagtgggagagaaggaaatgaattaaagagatgtttatgagaaaatacaggtagatacaaggaaatatggtagccttgaatgggctattaggtttctggcttgtaaagctggatgaatggtggggtcctgagcttcaatggggaattctgggaggggatgggatacaggaaggtgaccgtgagttcaggttacaggcatggtgaatttgaggtgcccaagtggagatgccaagtaggcaggtggatatattgctgtggagcgagaggaagatgactggggtgttttacaaattggtgtatagtttggaaattgaagttataagtctggatgaaggtaccaggtggatgactagagcagtaggtctattaatttagtagaaatttgttgcacattacaatcatctggggagcttttaaaaatactgagtaaaattcacttacttggtcgttctagtcacatctcaagtgttgcagagcctcatatccctcctggctaccatattggtcagcgtggatacagaatgttttaaaagagaagggccaggtgtggtggctcatgcctgtaaccccagcactttgggaggccgaggtgggcagatcacctgagctgaggagctcaagaccagcctggtcaagatggtgaaacctcgtctctactaaaaataaaaaattagctaggtgtggtagcgggtgcctgtagtcccagctactcgggaggctgaggcaggagaatcacttgaaccccaggaggcagaggttgcattgagccaagatcgtgccactgcactccagcctgggcgacagagtgagactccatctcaaaaaaaaaaaaaaaaaaaaagatgcggtgaactgtgtctagtgattttgagagaagtcaaaggtcaagcaagatgaagacaaatgtcccttagattttgtggcaccgaagtcattgggaagccctagagggagctgtttggtgggttggagggagtagagtggattgaggcatgcataggctataaggaaatgtaaacatcaaatacaaataaattttgacaactgtggccatgaagtagaggagagaaatatgtggtggctggagggggtgtgagattggggataggttttttaaggtttcatttttttttttttttgagatggagtctcgctctgttgcccaggctggagtgcagtggcacaatctcaactcactgcaacctttgcctcccaggttcaagcgattctcccgcctcagcctcccaagtagctgggattacaggcacctgccaccatgcccagctaatttttttttattttttatttttagtagagacggggtttcaccatgatcgccaggctggttttgaactcctgacctcaagtgatccgcctaccttggcctcccaaagtactgagattacaggcatgagccaccacacccagccatggttcaatttttatacagcaaaatgccaaagtcttaagtgtgcagctcaatgagtttttgaatatgtatatatctgtgtaaccacccagattaagatacaaaatatttccagaaatatgactccttccggtcaataatccctacaagtaatctgatcctatcttctaaaagcaaagattaactctgcctgtttttgtttgtttttttgtttgttttttgacatagagtcttgatctgttgccaggctggagtgcagtggcattatcttggttcactgcaacctccgcctctgggattcaagcaattcttttgccttagcctcccaggtagctgggactacaggtgtgtgccaccatgcccagctaatttttgtatttttagtagagacagggtttcaccgtgttggccaggatggtctcgatctcttgacctcgtgatccgcccgcctcggcttcccaaagtgccgggattacaggcatgagccactgcacccagcctctgcctgtttttgaacctcatataaacggcattattcagagtgttttcttttttcttttttctttttttggtagctcaggaagggtatataagagtataagagcattctctttctgtgtgtgatattttttactcagcactatgtgtgtgaaattcacccatgttgcatgtagcaatagggtgttttttattgctgtatagtattccattgtatgactctggcacaatttatttatccactttatgaatggacacttgagttgctttcagttttagctaatataggaataaatctcatgaacattatggtctacgtcttttggaagaactatgcagtcattcccaccggatatttagttatagatatctgggttatagactatatgttttagcagatactaccaaacaactttccagtgtttgcattaatatatgctcccacttgcaacagatgacaattccagctgcttcacattcttgccaatatcaagcaatgacagcctctttgaagagggacaagcattctggaggatatttagtggcatcttattgtggttttaacgtacatttacccgataactagtgattttgtgcatcttttaaaatgctgcttggatctgggtgcagtggctcacacctgtaagcccaactactgtggagggtgaggcaggaggattgcttgaggccaggagttcaaggccagcctgggcaacacagcaagatcccatctctacaaaaaatttaaaaattagccaggcatggtgatgcccatctgtagttccagctactctggaggctgaggcaggaggatcacttgagcccaggagtttgaggctgcagtgagctgtgattgtgccactgtgcttcagcctgggtgacagaggtagagtttatcttaaaataaaatgaaatagggtgggtgtggtggcccatgcctgtaatcctaataactttgggaggccaaggcagatcacttgaggtcaggagtttgagaccagcctggccaacttggtgaaaccctgtctctactaaaaaaaaaaaaaaaaaaaaggctgggtgcggtggctcacgcctgtaatcccagcactgtgggaggccaaggtgggcggatcacgaggtcaggagatcgagaccatcctggctaacacggtgaaacctcatctctactaaaaatacaaaaaaatgagccaagtatggtggtgggcgcctgtagtcccagctactcaggaggctgaggcaggagaatggcatgaacctggtaggcagagcttgcagtgagccaagacgcaccactgcactccagcctgggcgaaagagcaagactccatctctacaaaaaaaatgagctgggcatgtggcgcatgcctgtatcctagctactccagaggctgaggtaggagaatcacttgagcccaggtaaaataaataaaatgtttattggctctttggctatattcttttctggagtacctgtttgtcttttgacaatttaaaaaactaggtttcctgattttggcttattttgttttgcagagattttttttttattttttttttttttgagatggagtttcactcttcctctcaggctgaagtgaagtggcatgatctcagctcactgcaacctccgcctccagtttcaagcgattctcctcctcagcctcccgagtagctgggactacaggtgcccgctaccacgcccagctaatttttgtatttttagtagagatggggtttcaccatgttggccaggctggtcttgaactcttgacctcatgatccgcccacttcagcctcccaaagtgctgggatttcaggtgtgaaccaccacacccagctgccttcttattctcttaatgatgtaatttgatgacctgaaattttgttttgtttttttctttttcttttttttgaaacagagtatcagctctgttgcccaggctggagtgcagtggcatgatcacagctcaccacagcctcgacctcccagactcaagtaatcctcccacctcagcccctgagtagctgggactacaggtgtaccaccacgcccagtgaattctttttgttttttgtagagacagagtctcactatcttacccaggctggtctccaactcctgggctcatgcaatcctcacacttaagcctcctgaagtgctgggattacagatacgagccactgcacccggcctatggttaggttttgtgtgtgttttacttaagaaatcttgcggctgggtgcagtgactcaagcctgtaatcctagcactttgggaagccgaggcgggcggattgcctgagttcaggagtttgagaccagcctggccaacatagtgaagccccgtctctactaaaaatacaaaaaatagctgggtgtgggagcagatgcctgtaatccccgctactcaggaggctgaggtaggagaatcacttgaacctgggagacggaggttgcagtgagccgagatagcaccagtgtactccactctgggcgacagagcaagactcagtcttaaaaaaaaaaaaaaagaaatcttgcttactccaaggtcagaaattttctgtaagatattgctatgaaagatattgctttacttttcttatttaggtcctgggttcatctcaaattaatttcggtatatcagacataaggtggagaatgactgtttttttttttttttttttttttttacttagggatgttggattgacccagcaccaggaactaaaaagaccatcctttctcctcttaactgcaggggcacttttgtcgttaattagttgaccacatatgtgtgggcctgtttctgggccctattctgtttcatctgtctatccttgcacctttaaaataagtcttgatatttgatcatgtaagtcctgaggaagaggatttttgttttttttttttcaattggagatatttgagcaaggatccagttgagagtgaggagttgaataaaaaagagagagaagccaagcatggtggctcatgcttttaatcccagctacctgggaggctgaggtgggaggatggcttgagcccaggagttcaagtccagcttcaaccagggggttgagcaagatcctgtctctatattagaaagaggtcgtgcggtgactcatgcctgtaatcccagcactttgggaggccaaggcgggcacatcacttgtggtcaggagttcgagaccagcctgcctacatggtgaaacctcatttctactaaaaatacaaaaattagctgggcatggaggtgggcacctataatcccagctactcaggaggccgaggcaggaaaatcacttgagctaggagacagaggttgcagtgagccgagatcgcaccactgcactccagcctgggcgacagagtaagattccatctcaaaaaaaaaaaaaaaagtgagagagagagggagaagataatctgcacttttcttagaagacagtaggagctgggatccaggtgtttggggaaggattggccctaggtactcatccactaattcattcaacattgatgtgtcagatagaacatttatgtgccagacacaagtatacagcagtcctgggatagatgaggtccttgttctcatggagctcccattgtagcattgagagaaaggtaataagtaaactgataactcaggcagcagtaaatgccatgaagaacaggaacaggatattgtgatagagagtaatggaagactgccctaactgggagttaagatttgaagatggagccagcctttatgagcagagtgaagagcatcccagacatagggaacacacaatgcaaaggcccttggagtagtgagagcttgtagtgctcgtgggaaaaacaaaagaccagtgtagagccgggtgcggtggctcatgcctgtaatcccagcactttgggaggctgaggcgagcagatcacctgaggttaggagtctgagaccagcctgaccgacatggagaaacccggtctctactaaaagtacaaaattagccaggcatggtggggcatgcctgtaatcccagctactcaggaggctgaggcaggagaatcgcttggacctgggaggcggaggttgtggtgagctgagatcgcaccactgcactccagcctgggcaataagagtgaaactccgtctcaaacaaacaaacaaaacaaaacaaaacaaaacaaaacaaaaaaaccagtgtaggagaacacaatagaaaagggggtgaggagcagggtaaataaatgatatcagagaggtagagaacagacttgcccagggagggtatcctttagggttgggcggaatgtgaatttttacatgcatgtgagttgggtagattacttgtgggtggtgggaccgtgggtatgtgctggagaaggggggattcattttgtctcctttttgaagctgctctcatacctaccctttctccctgcagcctcctgaatgatgccagcccagtatgctctaacctccagcctggttctcctggtgctgctgagcacagccagagcaggccccttctcttcacggtccaatgtgacactgccagccccccggccccctccccagccagggggccacacagtgggggctggagtgggaagcccctcttctcagctttacgagcacacagtggaaggaggggagaagcaggtggtattcacccaccgcattaacctgcccccttccactggctgtggctgtcccccaggcaccgagcccccagtccttgcttcagaggtacaggccctgagggtccgtctagagatcctggaggagttggtgaaggggctcaaggaacagtgcactgggggatgttgtcctgcctctgcccaagctggcacaggtgagcaggtgatcacagaagagggtggagaggtggggtggggtgggcattgctagtccataaaggtccttggtatgaattagaagaaggcactccttcctcaccatgaggggtgtggatgcagcccagaacacaacttggagagcagagctgggctacatgtcaaccaaagcatatgcgagggccctgagaggctgcatacattacacatactagcaactgggagcagacatggccttatgagatgaggctagcctggctaggggcctgcacataggagcactacataggctcagcctctctcccaggagagagactgagacttgcctctcccctcctactccaggtcagacagatgtgcggaccctctgcagtctccatggtgtgtttgatctgagccgctgcacctgttcctgtgagccaggctggggtgggcccacctgctcagaccccacagatgctgagatccctccctcttccccaccctcagcctcggggtcctgcccagatgactgcaatgatcagggtcgctgtgtccgtggtcgttgcgtgtgctttcccggctacactggccccagctgtggctggccatcctgtcccggggactgccaaggccgtgggcgctgcgtgcagggcgtgtgtgtgtgccgggcaggcttctcaggccccgactgcagccagcgctcctgccctcgaggttgcagccagaggggacgctgtgagggtgggcgctgcgtgtgtgacccaggctacactggtgacgactgtggcatgaggagctgccctcgcggttgcagtcagagggggcgctgtgagaatgggcgctgcgtgtgtaaccccggctacactggcgaggactgtggggtgaggagctgccctcggggctgcagccagcggggacgctgcaaggacgggcgctgcgtgtgtgaccccggctacactggcgaggactgtggtacgcggagctgcccctgggactgtggcgagggcgggcgctgcgtggacggccgctgcgtgtgctggcccgggtacacaggcgaggactgcagcacgcggacatgtccgagggactgccggggccgcgggcgctgcgaggacggcgaatgcatttgcgacacgggctacagcggggacgactgcggcgtgcgcagctgccctggcgactgcaaccaaaggggccgctgcgaggacggccgctgcgtgtgctggccggggtacactggaaccgattgcggctcgcgcgcctgcccacgcgactgtagaggtcgcgggcgctgcgagaacggcgtgtgtgtttgcaatgcgggctacagcggcgaggactgcggtgtgcgcagctgtcctggggactgtcgtggccggggccgctgtgagagtggccgctgcatgtgttggccggggtacacaggccgggactgcggcacgcgcgcctgtcctggcgactgtcgcgggcgcgggcgctgcgtggatggccgctgcgtgtgcaacccgggcttcaccggtgaggactgtgggagccgtcgctgtcccggggactgccgtgggcacggcctttgcgaggatggcgtgtgcgtgtgtgacgcaggctactcaggggaagactgcagcacgcgcagctgccccgggggctgccgaggccgcggccagtgcctagatgggcggtgtgtgtgcgaggacggctactctggcgaggattgcggtgtgaggcagtgcccgaatgactgcagccagcacggcgtgtgccaggacggtgtgtgcatctgttgggaaggctacgtgagtgaggactgcagcatccgcacctgcccctccaactgccacgggaggggccgctgtgaggaagggcgctgcctgtgcgacccaggctacaccggccctacctgtgccacccgcatgtgcccggctgactgccggggacgtgggcggtgtgtgcaaggagtgtgcctgtgccacgtgggctatggcggtgaggactgcgggcaggaagagcctccagccagcgcctgccctggaggctgcgggccccgggaactgtgccgggcaggccagtgtgtgtgtgtagagggcttccgaggccctgactgtgccatccagacatgcccaggggactgccgtggccgaggagagtgtcacgatggcagctgtgtctgcaaagatgggtatgctggcgaagactgcggagaaggtgagcaggcagccttccccagtgtactctgggactgtgattctgtgaacaggagccatggggaagacctgagcctgaggaagagtggagggagagcatgtcattccaaggagccagtgcccaccaggggcagcagaaccacaggggtggggctttccagtgggcaggactggccttcagatctctgaggagcaggttggggcccatttagttgcatttagggagattctgtgctcctgaagatggagagaaggtgaaggcgatccaagccccgttcagccctctgtcagctattctccactagcagagaggagtgggagttaggatgggcctcttcgatgtccctgagtaaaaggggctgtgggtgggggtggttgccttgtgctaaccagctttccctaacccattctcttgggcagaggtgccaaccattgagggcatgaggatgcatctcttggaggagacaacagttcggacagagtggaccccggctcctggccccgtggatgcctatgaaattcagttcatccccacggtgagagagatgccaggctccaggaggggactgagtgggcaggacaggggggcagggctcacctcctggaggaagttccaggtgatcattggttgagtccagatggctgggtacctgaagctgctgtaaaggctttcttagcctgcttgacactgggcactgaggcctctgcagcatctccagcaagcattggtcccacacagttggaacacctggtaacagagagctcagtacttcctgaggctgtccagtccattgttggtcatcactgttagctgttatcattgttgcagaatccgtctgcccctattctagcacctgtccgttggccctagctgggtattcatcagcagctggaatgttttttgctttccctgtgtcctacaccacaggccttcaggtatttggagacaccagcctgatgtcttcattcctcaggcaaaacctcccagtttcttcgccccttttccctaagtctttattctctgaatcctttaccttcctgtgattcttgcttttttcatgtgcccccaaaatgtggggacagagaggggcccactgacttactctgaatttatggacacttttctcagagctggcgtatagcaatttgtagtcacacaagcaggcagctgttttggtcatatttggttttttaagtaacttttaattataaaagtaatataggccccgtgcagaaaacttagaaaatacagattagcagggaaaaaagatggaaggaaagaagacaacattcaactatatacacttttttttttttcacctaaatataggcctttgcatttggccctgttcaatgttatcttttttggtttgggccaagctgtctaggctgttgcaataattttgagtctgtgaacttcatctcccacctccttgtcatcagtacatgcaaaccagttttttctctgtctccctccaacttgctctttttttttttttttttttttttttttttgagacagagagtctcactctgtggcccaggctcgagtgcagtggtgccatctcagctcactgcaacctctgcatcccaggcttaggtcatcctcttacctcagcctcccaagtagctgggactacaggtgtgcaccaccttagcctgctaatgtttgtatttttagtagagacggggtttctccatgttgcatgcccaggctggtcctgaactcctgggctcaagtgatctgcccgcctcagcctcccaaagtgctgggattacaggcatgagccaccactcctggccatccaacttgctcttaaaacattagagggaacaccctaaggacaaagccttgtggtcacttatttggggcctccctttgtgcagactgggcttttaagatatggtcgtttccccagctgcaaatcttctgacatttctaccatccaactcatgttttcctgcatcatcccacaaatgccatatggggtgtgggccatgtcatcctcatcttcatcagcttagccaggactctgtaaaaataaacaactccctgggcctaaagcctcggaaggcactaggacagaaggggacagctcagaggaactgtcatcctcactccactttgctttgtcttgtcattatgctcctcaggccagccccctactatgttctgcctctcctcactctccagccaaagcagaagcagaaatctcaacttcgtggcgcaaccaagatagcttgaattttttcttctgtttaaacatctttttttgttgttgttataaaaatactttaatcacgagacaagaatttggcaactagagaaaagaaaaacaattcctggctgctcctcactaaaacaagcactgctaacattttaaagtgtttctcccactctcttcttctctgtatatattatttacatagctctaatcttgaaagggtgggacttcgaaaaggaagtttcttaagaaatttcagggaaagaagaattaaaataaacacttgagataagaggagcttttagggcagcagttgtctcctgctctgagtaaataaatacaaaccgatccttggtgttgtcaagggcgccgctttccagttgaagccctagactttctccctcactcagagccaggatggtggtgccaagttggcctgtgccaggcttggccatgttcttagctcatccattctgctctcggtatgggcatctgtcacattctgggtcttctctgagcctgggtgtggaaaacactcctgtaaaattggtccccagacactcctcttgggcctgggctacccaccctcagaccatgctttctgctgtctgtagctggtccctggcatcgtaccttctgccttggcaagtgccatctatttcttttcttttctttctttcttttttttttttttgagacagagttttgctcttgttgctcaggctggagtgcaatggcgcaatctcggctcactgcaacctctgcttcccaggttcaaacgattctcctgcctcagcctcccaagtagctgggattacagacacctgccacaatgcccagctaccctttgtccatttctgtgggtacagagtatattcaatagctgtctgtcctctggctgctgctgtcatcctagaagcctatctctacctcttaccttccctcttcccagaagcacttctctctcaaagcccaaactctgctattccagatcaagggacatacctagttattggaattatttttcagaatgcagaagaagaaagtttctcctctccctgtatatgtggcactgttactctgactcagtggttctcaaagtgtgttccctggacctgcagcatcagcatcacctgggagtatgttaggcatgcaaattgtcagactcccccactagatctactgagtcagaaagtctgggcacagagcccagtaacctgtattgcaacaagccctccaggtgattctgatgcccctccagcctgaggccccctaagtgaaggaatgttgctattttgcaaagtgctagctccactatgaatgtgagagaaagcatggggaaactgagggagatgagttcctgaatgagaaagaggttcagatattccttgtctgggtgtgtcctgcagcctggaaatcagggctaggctaagtgttcactgggactcaaaacctcacagcctcagagaagtttttgcttgggtctagtctaaaaacagcaatgagggtgagataagctccaaggaccagccaaggtagagttcatctggagccacgaggttaatattgagataaactctaaaacttcccaagaacaaaatcagtgaagcaggccaggcgcagtggctcatgcctgtaatcccagcactttgggaggccaaagtgggtggatcatctgaggtcaggagtttgagaacagcctgaccaacatagtgaaaccccatctctactaaaaatacaaaattagctgagcatggtggtatatgcctgtaatcccagctacttgggaggctaaggaagaatcccttgaatcttggaggcggaggttgtagtgagctgagatcgtgccattgcactccagcctgggagacaagagcgaaattccgtctcaaaaaaaaaaaaaatcagtgaagcagccaagctttaccaaggggcagagccagctgccagcatctgtttagaaagactgcttcagggccaggtgtggtggctcacgcctgtaatcccagcactttgggaggctgaggtgggtggatcacctgaggtcgggagttcgagaccagcctgaccaacatggagaaaccccgtctctactaaaaatacaaaattagccggacatggtggcgcatgcctgtaatcccagctactcgggaggctgaggcaggagaatcgcttgaacccgggaggcggagctcgcgatgagctgagatcgcgccattgcactccagcctgggcaacaagagcaaaactccctctcaaaaaaagaaaaaagaaagcctgcttcagaccagtaagatggtgctaggagacgtaggagacatgggttaggttgatggactttcaggggactgttcccagatggatctcaggaggaaccaagaagtgtctaaaggatatatatagggagaaggagaactctggggataggcttgcctcactgaaagaaccagacatcatcagggagcatccaaggtgtgtgtattgcggctgtggggatggggtgggtgtggataaagagaaagagacatacacacacacagagaaaatgaacaaataaattctgggaagggtaaggatttcatgggtcttgagttgaggccaacccaaggcttcctaggctggggtattctaaggcagggtgaataggagagggctggaggtcctatgtgcccaggaaaacttttcaacccagaaaactgacaaagctttacttcatcctcaacccagaaatctctacgtggccttctcatctggttttatacttcggtatttactatgttgatttccccacagttctcttggtttaggagagtaccttttgaaatttccaatcctacttggctgaatggaggtgtccccatcacagccaacatagctaggcagaacacagcatccttagcggctgtcctagctggacagcacagcaaaatgtggggctgttagaatgctcacagatgtacagttcctcctgtttccccagtggtgggcattccaggagaccctgcctggagcagggtccagtagattccctttggaggcaccacacataatcataattccttaaatgtacacttgtaggagtgttgttttctcacaagcatttgctaagcatagagattgttgtaagtatctcatatattcaagatgtggccatacatttagctattagagtctcagctacctgaggacagggaccatatattttatttttgtgtctccaatgcccagcatgatgccaggtacaaaatcaacaatcaggaaacatatttgtggaactttgagcaggtggttcttgttttgaggagcctacaacccgggtgaagagacaagaaaagtccctcaagggaaaggttgtgatgcgggtcccactcctgttacacagccatgagcaggcatctacgaggaggttcagggtgaggcagaccctttaaggagaaagtgcaacttgaaggggcatccttgatctacttcatttgttctgacaggaccaagcttaggaaaaggctcctcatgcccaggtagtcagagttgccagggcaaagctggagggagagtcctggtgcatgttgggtggaattctggcagatgaacacggggtgcccatgagaggggactctgacagataaatagggggtgcccatgagaggggactctgggatcacactgctagggcctaaattcttgccattttcttggtgttggtgacgttggcaagatacttgtccttctgtgtctcagtttccttatctgtaaaatgggactaataggacctgtttcgtagggttgttgtgagaattaagtgagttcatgtgtgtacctcgcctagaacagtggctcacaaggagttagcgctctcagcatgtttgctccccagcttgtacagggtcaagttccacacagtaccatgctgacactgtttagaattggagaaagaagagataagggggattgagcagcagaggcaagagtgccagcccctgagccacctggtgctctctctcacagacagagggggcgagccccccattcacagcacgggttccaagctctgcctcagcctatgaccagagaggactggcccctggacaggagtaccaggtcactgtccgagcccttcgagggaccagctggggccttcctgcctccaagaccatcaccaccagtgagagctggggctgtggggaggggtgtcctgagtggagatctggactagagagggaatctgccctccgggagggcagaaggaaggggctggatgggggctaggctcttggaaggaaagatgatgattgaagaaccagacacccacctgagtcctcctctttaacctggctagtgatcgatgggccccaggacctccgagtggtggctgtgacaccgacaacactggagcttggctggctgcgtccccaggctgaggtggaccgatttgtggtgtcctacgtcagtgccggcaaccagagggtgaggctggaagtgccccctgaagcagacgggacgctgctgactgacctgatgccaggcgtagaatatgtggtgactgtcacagcggagcggggccgggcagtcagctacccagcttctgtcagggccaacacaggtatggctggccagaggttagggaagggccctggtttcccagccttggatcctcctcctcaggagcccaggctcagggctcacagactcctctgaatgcttctggcaggtgtgtggcagtctcgaggcacctgctgggggccttgctctgtcctgaggccactggggagacagagccctcagatgcctggagtcctgtaggaaggttacaggttagcctatgaaaggaatggccccagggagagaagtgaataggagatgctgcctgatccagtcagttaagggaggttcttttttaaatttaggtaccgggacaggccttgtgctgatagatcttgtgggactggaattaggcagattagagatcatcagtcctgttgacttttggattgggattgctgggaggtgggtctcacagcagtgattttccactaaacctcgaggtttcttaacagatacctggatatttttcttttcctgtgacagggggacacccacctcgctgtagctcatgttctcttccccgactcccctttctctccttcagctacagggccccacccacgggcttctctcttctttctagggcaccaacagtggtgggcttggaggggaatgggggggctgcgggacactgaccgatttccctccgttctctttccaggtggggctggggcacagggaagaggcctctggctctggtgggagggatcgagggaggggctgccgcgggaaggagtgccgggagggagctgccactgacctgttctccccttttttgcccctggcagcaccaggccactacagttacccggaggtgcgccccccagccccgccccccaagtcccggccccggccagccccagccccgcggcccccacggcccccttggccctcgaggccagcagaggaaagggaggaggagtccccgcccaggccaagcctgtcccagcccccacggcggccttggggcaacctgacggccgagctgagccgtttccgcggcacggtgcaggacctggagcgccacctgcgggctcacggctacccactgcgggccaaccagacttacacgtcggtggcgcgccacatccatgaatacttgcagcggcgtctgttggccgccgccccagccggctcccccgcacccccgccccgccacccccgccccaccgccagccctgatcccggcaccaggaaacgggactccaaccagggaatctacggcctctcgcctgaaggcgtcgaccgggtggctgcgtcccgccaccccaagccagaggtgctgggcagttccgccgatggcgcgcttctcgtgtctctcgacgggctccgcggccagttcgagcgcgtggtgctgcgctggcggcctcagccgcctgcagagggccccggcggtgagctgactgtgccgggcaccacgcgcaccgtcagcctgcccgacctcaggcccggcaccacctaccacgtggaggtccacggggtgcgggcggggcagacctccaagtcctacgccttcatcaccaccacaggtagtgtgggctggggccacgggacacctatcccttgtccagcctcacctgccgttggagcctgcattcatgaattcctcccactgccaccccccactgcccccttctaccttcaggccctacctggccggggctccagggggcccccaggacaaagcacgagtccattgtccctagaagacgtccccaccccagggtcctggcatccatcctgtggatgcctaaggtcaaggcagcgccttctttggggtttcccgggacacttccaggattgttattttaggcaatagagggtgatgtggttggggcacctgcaaagattcactggagcagtttgagtgggctgggaattgaaaacagtgattcccgttctgactcactgtggtgagagtggctgaagactgtggttagtggttactgttttccacaatttggccttgaccttgaagggacacatcagaactgcgtgggggtggcctgggtgccatcaggcagcaactgtatattggggaggtgaaaccactgcttcttaagctggcttttcagaccccctggctcactttatgctggtctctcccacaggaacgatgtctgggcttggggaaagggcaccctgtggctgctgtggggagggtggtggacctcttcttcccccatagggcccagatgccacctgacctggatgtccacccccacaccctctctctcttcccactgcccactctcctcttgcatcctccctctctaacaccactgtctttcttccaggcttctcactgcagcactaatggaagccacctgaccaccacccagtgggggggatgtatgtggggagggacatggaagtctccgggggctggaggtcatggaagccttgtggggtgaaggatagcaggctttattttacctattacctgcctgaagcacaggcccgtctgctcaggaatgtggtagatgggggtgtttggaggattggctgacctttgggaggagggagtggcccaggtgagggaaccagaagtagaagtagaacaaggctcttagaggctggagggcagaacctggggactggggattcctttctagttctcatactggactctcctctttttctcaccctgccccttcccagggtcctcacccttgggcctcttggggactaccgatgagcctcctccctcaggcccctcgacgacgcaaggggcccaggctcctctcctgcagcagcgcccccaggagctgggagagttgagggtgctgggcagagatgagacagggcgcctccgtgtggtctggaccgcccagcctgacacctttgcctacttccaactgcgcatgcgggtgcccgaggggccgggggcacatgaggaagtgctgccaggggacgtccgccaggctctggtgcctccaccccctcctggaaccccgtatgagctgtcacttcatggggtccctcctgggggcaagccctctgaccccatcatctaccaaggcattatgggtacatcttggactctgctcagatcaatatcctgagattgggggaggagctggggttattgggacttcagaggtaggatggatattgaggggccagtgaagggcagggctgatgtttggggctggatagaggagaaaaggagagaaaaggaattgcaggttcagcaggaagatggatcgagggggatcttaaaacaatgataaggatgggtggggagaggggaaagaggcagaggtaaaaaggccgagggtgggacagagattccaggagagaggctgaaggtccctggccctccacctgcagctttccttgccctgtcccctgcccccactcttcggttgctcctctgcccttccctgccctataaatctttcagggtgggcatgggaaggcctctggacactgaccctcagcccccaatacctcgtccctgggagcctggtttgcagtggacagcagtccatggtcccatcagccagtttctgctgggggtgaaggctccttggggcagggggctccacagccatcaggacttcagacatggatgaggtttgcaggaccagtgaaagacaggtcctggggtacctggctttcacatcccctctttgttcctctctgtgggaccagggtggctgactcatcccccagctccaggtcaagctcaccactggaagagagggtggtaagagagacagcagctcaggtgggcagaggagctttcagactgctctgatgctgcagcagggaggcttgaaactctcattcagaaccagggggacctgaaacccccgcaaagatcctggtgtgcagagagaccaagaccttgtgagggatggagaaactgtcacaagggaagaagcagagattgagagggaaatgcccctcttccagaagagctagtcactgaggggtgggcagatagagtcttccggggagggatctatccaggatggagtgaggtgggcaggggagagggaaggagacacagacaagagaacggttgagtccactatgctttgcttttgcctctcaaactccagacaaggatgaggagaagcctgggaagtcctcaggcccaccacgcctgggtgagctgacggtgacagacaggacctccgactccttgctcctgcgctggacggtccccgagggcgagtttgactccttcgtgatccagtacaaagacagggacgggcagccccaggtggtgcccgtggaaggaccccagcgctcggccgtcatcacctccctggatcctggccgcaagtacaaatttgtcctgtatgggtttgttggcaagaagaggcatggtccgctggtggctgaagccaagatctgtgagtgacagcagtaacaccctgccctctgtactgccctgaagaggttttctcagtgctttgggaacctgctttgggagctccgggaaggcttcctggaggcagtggtgcatgagctgaattctgaagggaaagtagtggtggggcaggcaaagagtttgagaagctcagtgcagcctgagggagtcacggtgagtaaggtggggagagcatggccagtaagagaatcactgttacagtttcctctggctggagaacagggcatgtggggggtgccaaagggcctggtctcagggcttcctgtgctgtgctgaggggcttgggcctcattcgaaggcccctagagggcctctgaagggtaaagtgggagagtgatgagactagatatttatcttgcaaataaccgggtggctgctgagactagctggagaagtgagttaagagctggtaaaggctagcagggttgatcctgcctataatcccagcaccttgggaggccaaggcaggaggatcgcttgaggctaggagtttgagaccaacctggcaacatagtgagaccccccatctctactataacaaaagatattagccaggcgtggtggtgcgtgcctgtagtcccagctacttgagaggcttgaggtgggaggatcgcttgagcccaggagaccgaggctgcagagagccatgattgtgccactgtactccagcctgggtgctatccacactctgcacagagcaacaccctgtctcaaaaaaaagaaaaatgatgatgggtcagctgggatggtggcagtggggctggatgggggaggcgaaggaaagcaaggtgtaccaggcagcccccagggttctggatgagacagtcccattccctgaggcagggagcagcagaggtggggaacaacgccttagataaacttagatcaatatctaagagacacttacataaataccttttgtgcatttattgagagtcagttgtgatcaagatgttctctaagtggatcatcacaccccataaagcacacctgggaggcatgcctactttataggtcaggagaattgaggcaccagagtagtcgtgtggggttggggaagagacagggccactggaaccctgtcgacagcctacactcacagcggaggcagaggaagaagagcccacagggtagcttgcggagtgacttgcagggaggggcagaaccagggagggtgctgtctggactccaggaaggagggtgcggttggacttgtcagattccggaacagtgattcaagggctacggagcgtccacagaatttagcaatggcaaggccacccctggcctgcatgagagctgctgcctggtggaggggtggagctggatcgggagggtggtggaggtgaggacatggctgcaatcagtgtagacatcactttctggaatctgggctgggaatgagagcaaagagggaagatggaggctagagagagatgcacacagagtgggggtgaggaggggtgtgacagtagcttgttgaaatgctgatggcacagctgctggggagtgaagggtcagtgctgcaggcgagggagtccatccatgggtcaaagttcccaaagaggaggagaggcctgcagcatagatgagggaggctgtcccacattaaaacgcttcaaggattgtgctctcctctcttggagaagaagccagctagtagttaggcttggaagcagtggaggttgtactgggaagatttccctggctatggagatgtgaaagggcctggctgggctcccctctttctgaagctccctgctgctctggtttgtggttggaggcagagccacactagtccacgcagtgcttccatgccgtttgaaagaaggcacccattccttaaagtggacaccactcctcaccagggcacacagctcggcaagcagagtgctggctggatttcagtccctctgtactccctcagcaaatgcacttttgtgcagtgaacaacctgcacagcctcacacagcattcctatgtgggatttggcttccccattctccttggacctaagtctctcccttctctctacccactcttcctagtgcctcagagtgacccaagtccagggactccaccccacctgggaaacctgtgggtgacagaccctaccccagattcactgcacctctcctggactgtccctgagggccagtttgacaccttcatggtccagtacagggacagggatggacggccccaggtggtacctgtggaagggcccgagcgttcatttgttgtctcctcactggaccctgaccacaagtacagattcactctgtttggaattgcgaacaagaagcggtatggccccctcacggccgatggcaccactggtgagtagcagccacctcagcccccatgtgaccccttctcagccccatgcacacttcccttcagcccaaaaccagctggggtcccccagcaagacagctgactccagcttcccggccccactccagggctgaggggcagccagactcccccgcactgctgggccccttccatcccaagcagcagctccccgtggcccagaaggtgtgtcataccctggctgtgtcaggcttcccagaagtttagcactcgaattaatggactagtgaccccccaccccccataggtgtgacatcccgtcgaaaccccaagccccagtcccaggctgccagttcagcacctggctggatctccttgtttacagctccagagaggaaagaggagcccccccgccctgagttcctggagcagcccctcctgggggaactgacagtgaccggcgtgaccccagactccttgcgtctctcatggacagtggcccagggccccttcgactcattcatggtccagtacaaggatgcacaggggcagccccaggcagtgcctgttgcgggggatgagaatgaggttactgtccccggcctggatcccgaccggaagtataagatgaacctctacgggcttcgtggcaggcagcgtgtggggcccgagtctgtggtggccaagactggtgagtcatggctgccaggcctccctcccctgctagccccatcctgtgagcgggacttggctggggctccttccagcctccctccatcttcgccttctcagctcattttgccaaagcctccacccacttcctcccgcactgctctcctgtcctctgcatgccaggtccccctcatccagcctccacctcctcatctcttcctcagcctcacttcttcatctccaagggcaggtcctattttcccccattccaaacacctggactcatccttccacctggggctgtcctccccacagatgtcctcaccattcggtcactgtgttctcacccctcagtttttactgggctccttcatggtctggtttgggccatggtcacttctgggcttctgtcacctgctgcccacaacctcctgccatttctgctgtgttcagaggtggcagatccaagtgacaagagcaccacgtttctctagcctttttgcagcatgaagaggactcctctcagctcccgactccttgactcccagcccccttggaacagggcaaagggattgtgttcagcccagcatcccagcctgttcctccatgtccccagcctttccctgtccagtgccattcccctggcctgtgaattatttgatgagagatagtgtggatagtggttaggagcaaagactccggagccaactgcccgagtctcactaccagccttgcaacttacttcctgtaggaccttgtgcaaattgcttaacctctctgtgcctcagctttcccttctgtcaggtggctggatttcagtccctctgcacagagctgttggaattacatgagttaatatatgtataacacttagaaaggccaggcacagtggctcatgcctgtaatcccagcattttgggaggccaaggcgggtggatcacgaggtcaggagatcgagaccatcctggctaacacggtgaaaccgtgtctccactaaaaatacaaaaaattagccaggcatggtggcaggtgcctgtagtcccagctactcaagaggatgaggcaggagaatggcgtgaacccgggaggcggagcttgcagtgagccgagatcgcgccactgcattccagcctgggcgacagagtgagactccatctcaaaaaaaaaacaaaaacaaaaacaaaaaaagcccacacacttagaatagtgcttggagcagcaaagcattttcagagtgagctgcaatttctccctgactctctcacttcccagtaatcttttttgctccccacctccctcccttcctctgggttgtcattcttgccaattctttcctcaatctgctatcccaaagtagtcccccatgtagcaggtcacagaagggctggtttcccttgtgccacagtctccccactccatggagcctcagcagagacctaactgtagggggcgggtaggtgcccacagggctgtgattccagagccagccagggaaggacatgtctctccttggatcccactcaccccagaatttttctcccactcatgcctggagccctgccttagcaattcattccttggggttaaaggggagggaggggcagggctgcctggggaggccacagcaagagcacattccatggtcagatcctcatatgaggggtggggcagccagagtgccctggggagggcacaggtaggaagaggcctcactgccctcctcactgtctgaggtcagcactgtcagtgaacgtggtttggaagaaccctcagaggcttcctctcttcccatctcagctcctttctcagacacgaagggagacccctcacccccacagaacccaccagagcaggatggggcaagggctgtctcagccttctccatccgtgagtgaccgaatggcaaatacaaaggctacagagcccctgagcccacagcgtaagggcatttccatggctgtcatctgtgggcagcagcagcaaagccagcagccctttatgcctctatctcttctctcagctcctcaggaggatgtggacgagacccccagccccacagaactgggcacggaggccccggagtcccccgaggagccgctcctgggggagctgacagtgacaggatcctcccctgattcgctgagcctcttctggaccgtcccccagggcagcttcgactctttcaccgtgcagtacaaggacagggatgggcggccccgggcggtgcgtgttgggggcaaggagagtgaggtcaccgtgggaggcctagagcccgggcacaagtacaagatgcacctgtacggcctccacgaggggcagcgcgtgggcccggtgtccgccgtgggcgtgacaggtgagtgaggggcaggggcctgctttggttccctcccactgctggctcccagcttccctgtagccagttgctctccttgctccagtggaaccttgaggctgcctgccaggggaagacctagaaagagcatgtcactggggactggcgtaccaccagctttcatggccctgagcaagttttaaactttctgcacctctgtttccttgtccgtaaaatggggacacctacctcacagagttattgtgagggttaagtgagttaacagatgtaaagcatcaagaatgggcctggcaaaagtaaatatgctgccagtgtctgctgtgagaattgttataaatattcttactctgaggtctgctttgtcccctttggctggttcagttacttggtcagaatgcacatgaatctaaggccataccaccctgaaggtgtcctatcatctcctctgatctcagaagctaagcagggtcaggtctggttagtacttggatgggagaatgcgcgtgagacattggcctcttcatcagtacagcttgaagcaagctttcttttctttcttgtctttttttttttttttttttttttgagacagagtctcactctgttgcccagcctggagtgcagtggtgcgatctcagctcactgcaacctctgcctcccaagttcaagtgattctcctgcctcagcctcccaaatagctgggactacagatgcgtgccaccacacctggttacttttttgtatttttagtagagacggggttcaccgtgttggccaggctggtctcaaactccagatcctcaagtgagccacctgcctcggcctcccaaagttctggtattacaggcgtgagccaccacgcctgaccacaaagctttctctttcttctttctctctttttctttctttctttctttctttctttctttctttctttctttctttctttctttctttctttctttctttctctttctttctgtctctctctctctctttctttctttttttcctttctttctgttttttgagctctgttgcccaggctggaatgcagtggtgcaatcttggctcactgcaacctttgcctcccaggttcaagtgattctcctgcctcagcctcccgagtagctgggattacaggcatgcaccaccacacctggctaatttttgtatttttaatagagatggggttttaccatgtcagccaggctggtctcaaactcttgacctcaagtgatccacccgccttggccttccaaagtgctgggattataggcataagccaccacgcccggccacaaggctttctttaatactcatccagtgagtgactttacagcaaagaagaacatcccttccaccctttctctcaggcctggttacagggccacatccaccaccacacaggaccagcctgggcacctcctctccagggcctcagcccaagaggctgagtggacagcagtgcctctgggaccctcgggctgacctgcccggtttagtcacagtgaggggaatctcttttttcctttgctcacagaaacaaagacacacctttctcaaaaataacttttactataaggggaaagatttaaaaattaaaagtagagaaatagatagttttccagaacatggtttctgtaattccaccaagctcagcctcatcatgacttggttgatttcatttccagaaccttccaccctcaatttattttctttgcctcagtcagccctgagaagagggagacggcaaagccaccctgagtggctgtccttggggcctgaggttgtagggtggaggctggtgccaggcccagacatgctgccaagtctgctcctggagtgaccctccctctgccgctctgtcccagggacccacactgggctctgtgaggccctgtgcctggtccctggggtaaggatgggctctgtcaggcactgaccaagtcggtgcagtagagataaatggagtttgggaatctgacaaactgagttccttcctgtcttcctctgttctcagctgtatgatttttatttttttattttattattatttttttgagacagagtcttgctttgtcacccaggctggagtgcagtggcatgatctcagctcactgcaacctctggctcccaggttcaagcagtcctcctgcctcagccccccaagtagctgggattacaggcgcccaccaccacacccggctaatttttgtatttttagtagagacagggtttcaccatgttagccaggctggtctcgaacttctgacctcagatgatccacccgccttggcctcccaaagtgctgggattacaggcgtgaggcaccgtgcccagccagctgtatgatcttgaaaaacttacctcctctcctggaacctcagcttcctcatattcaggagggagtaaacgctgcccagcttgttgtcacggttaaaggtggtgatgtaacatgtctggcatcttctcagctcattcatcttttgctcagaccttcccgtgagggaatccctgtatatccatgttctaatgctggatattttgaaacatgtattttacacgtcctggataaaatagatgaggccctttaggaaagaaatgggcatcagtgcgcattatcagagcagcaaaaggacgaagcagctggagtccgccaagctgggggctgtgtctggcagcacacacagtgcagttgccagggggagaggtgcgtggagctcattagacacacttctaaattggaaaaggactgtcccacatgcagcatggggactgccagagtcatgaatcgttataattgtacctttccagttaatccaaaccaccagcaataaagcttgatggtgaaggacattttcattccctcatggaaagaagtgcagagagggcaaaaaggagcagggaatgggtgctgcaggaacaagtaaggttagaaggcaaatgaaatgagagaaaatgcccagcctggtacctgtacatagtagatgttcaatacttggtggtcactctgctccctcccaccacctcagctgcctccatgcctgccctccccagcctgactcatttctgtctgcccgaggcctggtcaccagcctgttttaagcagttgtcacttgcttggagccttgtcttgccctccggaggaagccagagaaacaagttcttgggagccccacccatccagccaccttctctgccattttgcctcttgggaccaccttctagtttgctcactaatgagtgcttcctcatgcgggagtggtggggatctgcaggtcctgagcccagacctgtagaccactcattattttacagacatctgtggagcacctactgtgtgccagggactgggacacagcagtgaataaagcagagctcctgcctgaggagctcacattctagtggagagggacaggcaacaaattgcacaaatatgtcagtggcaccggatgtgacagtgatgagtggtggggaaaagcagagcctagtagggagacagcaagggcctcactgcgagggcagtgtctgaggaaagccctgaaggaggtgagaggacagccacctaggcctttggggaaagagcatcccagacagaaggaagagcaaatgcagagactggcaggcgagaagcagccccagatgtctgcagacagtgagggatgcagtatgttttgtggtggagttggaggagggcaggcaatagggaatgatctaagagatgaatatgggacctcagaggccagtgcaggacttggatttcaccctgagtgaggtagaagccactgcgggaaccagctctggctaatgtgttaacaggatccttctggctgcagacccaacagactaaaggggggtgagggcagaaggcgatgacctgagagaatgttgtgataatccaggaggagccagtggtgcttggaggtggcaaggaggggtcagactctgaaggtagtgacaacaggcggatacccacagggcggatgtggagtttaagagaggactcggggatgactctggcggtttagatctgagcagctggaagaatgaagttgtaatcctggtcaggcgtggaggatcatgcctgtaatcccagcacttggggaggccgaggcgggcggatcacctgaggtcgggagttcaagaccaacctgactaacgtggagaaaccccatctctactgaaaatacaaaattagccggacgtggtggcacatgcctgtaatcccagctactcaggaggctaaggcaggagaatcgcttgaacccaggaggcgtaggttgcggtgagccgagagggcgccatcgcacaccagcctgagcaacaacagcgaaactccgtctcaaaaaaaaaaagttgtaatcttactgaggtggggaggctgtggcgggagcaggtgtcaggaagctcagaggctcagttttggacttgttgagtttgacacacaagtaggcctccaaggaagacgttgcacgaacactagtctggggttcaggggaggtctggacagagggtgtaaatctggagtcattggcatatagatggaatttcagcgctctcccagggtgtcagtgatggttgatactcttctcccccaacaaatgcagcctcagacaccgagcagggacctagtgaaggactgttgaccagacagatgttcagatcaatgcgcttttacatcaaaaccatcatgcgggttccacaaatgcaacagacatcgctgggtgtggtggctcacacctgtaatcccagcactttgggggctgaggcaggtggatcacctgaggtcaggggtttgagaccagcctggccaacatggcaaatgccgtctccactaaaaatacacacacacacaaaattaggcaggcatggtggcgcacgcctgtagtcccagctacttgggaggctaaggcaggaggatcgcttgaacccgggaggcagaggctgcagtgagccgaggtcgcccactgctctgggtgacagcgagactccatctcaaaaataaaaaataaaaaataaataactagacatcattactataagaaaagggggattctttactaacagccccctaccatctctgtcccagccccacaacaagaagagacccctccagccactgagtccccgctggagccacgcctaggagagctgacagtgacagatgtgacccccaactctgtgggcctctcctggacagtccccgagggccagtttgactccttcatagtccagtacaaggacaaggacgggcagccccaggtggtgccggtggcggcagaccagcgagaggtcacagtctacaacctggagcctgagagaaaatataagatgaacatgtatggactacatgatgggcaacgcatgggccccctgtctgtggtcatcgtgacgggtgagtaatggggggactcagtcctcatctctggttacccagagctcccccaccccatggcccttcttccagccctgccttggtaccaccgcaccctcactgaggggctagatcccctcaggccctggctcggtgaccctgccagtctttctgttccctgacccctttactcctcccagggctagagccttctcagccctccagctccttccccatctccactctgccccccgcccaggggaatgtcttatttccatttggcctaaatccagccacagactttctctccccctctccgactgcccacagctgtttccaccccttctctttacaaccctgctgtgacttggacacagctgccacctcctgcttctgcccttttttgttgaggcgaagtgctttacatcctgagtcccttctcaggagtcctctgccacctgcctgcactgcattccatcccagccctggagagttttcatctctccaggaggctgcctcactcttgctctgggctccttcctgcccctcatggcttcctgggcacaggttctccatgattgttgtgctgtggcatctggtgaaacccctaccccacctgaaggcaatgtttttaaatctgtaaaataagctgtataggattacaaaggaaacattatatttatagacagttatcaaaatatttcttttttatttttgagatggagttttgctcttgtcatccaggctggagtgcaatggcgcgatctcggctcactgcaacctccgcttcccaagttcaagcaattctcctgcctcagcctcccgagtaactgggattacgggcacgtgccaccacacccagctaattttttgtatttttagtagaaacagggtttcgccatgttggccaggctggcctcaaactcctgacctcaggtgatccacccgcctcggcctggcatgagccactgcacccggcccaaaatatttcttaaaaatccaaagttacgatttagtaatacttggacttatttactagttcattaaataacaggacttggtggcgcgtttactaaactacaaaatttagaagcagtgatggatataaaaggtattttaaagtttctgcaataactctaaggtgacatgaaaacatctgtggtttctattggtaacaaagtcacaataattctactctggtgggttttctatattagttttggaaagaaatgctgcatttcagttagaggtctggaagtaaaggtgtaactattccccatctcagttcacagcccccctgaggccctcaaagcccaggggttctcccctcagagatctcaaccatgttctttgtcttcccaaatcccagctcccctcccaccagccccagccacagaggcctccaagcctcccctggagccacgcctaggggagctgacagtgacggatataacccctgactctgtgggcctctcatggacagtccctgagggtgaattcgactcctttgtggttcagtacaaggacagggacgggcagccccaggtggtgcccgtggctgcagatcagcgggaggtcactatccctgacctggaaccctcccgcaagtacaagttcctgctctttgggatccaggatgggaaacgacgcagcccagtctctgtggaggcaaagacgggtgagatgggcccctacacagctgagcctgaggccacagccttcccacccttctcttcactccctctgctgagtcttccctttgtccacctgctctgtctcatttgaaaagccacatggggctagcacagtgactcatgcctgtaatcccagcactttgggagtccaaggcaggtcaggagtttgagaccagtctggccaacatggcaaaaccctgtctctactaaaaagacaaaaattagctgggtgtggtgatgggtgctagtaattccagctactcgggagtctgaggcacaagaatcacttgaacccaggaggtggaggctgcagggagctgagattgcgccactgcactccagcctgggtgatagagccagactccgtctcaaaaaagaccaaaaaaaaaaaaaaagaaagaaaagccgcaaagcagatgaggaccaggagagtggggccagttcctgggtctgctgtcccctgctgactctgcctctcttctcgtaatttccacttttgttggatgagggaagcccctacaggcctcttcctgcagggtggatgtgggagcctgggggtgctgggagaaggggcgaggggagccaggaacccttcctgccttgcgaatccatcacctcctgagagtctttgttgtctcccctgtgactctcacccaggttctcaccctcctagctcaggcctgtctgggcccatatgtgcctcctacagaggctgcccttccttctctgccctcctcctgaagtctcagaaattgggaaccagaggagcccagcccagctgtgcccctttccgagggttcagtccaagccctcccctgcccctgggggctccctattgccagaaaacttgcaataacaatgtcgtcagcgtcctcaccgtccaggaaggcagcaggccagctccttctcaagccctgggatggctcctcaggcagacaccagatcccttccctgcctgagctccccggcatcatccccctcaacattctcacaggcagcccacgctccttcaccaggcccagtgggagccttagttctcccgggccagccggtgcagaataagaaagggaacggagaagggtgagaactacctgtgtcgtaacatcctgcctccctgacctgccgagtgcccccatcagggatcctgcgctcctcggggccggccaaatcacccctttcctcaggggccggccaaatcacggccaaatcgtgtgctcctgggtaagaggagatagagacccagtctgtaagaagctgcaccctgctggggaagcagtctgtgagaggcggaaagaggctggacagaaaggggagtaagatgaggcagggagctagggaatctcttttcctggaggtgactcaggacaggtgaccctccccacttgggtcaaggggagagaggcatggaccagacggagatggtggtgaggatgggaggtgatggaaatattttggggaagcactgagcatttgggcagttctgggtttttccagccccagagggaggcagtcaaggagtcgttttggaaaaaataaacacaagaacctttcctctccagttgcccgaggtgacgccagcccaggggccccaccccgccttggggagctgtgggtgacagaccccaccccagactcactgcgcctctcctggacggttcctgagggccagttcgactcttttgtggtccagttcaaggacaaagacgggccccaggtggtgcccgtggagggccatgagcgctctgtcactgtcacccctctggatgccggccgcaagtacagattcctcctctatggcctcctgggcaagaagcgccatggccctctcactgccgacggcaccacgggtgaggggcattccctgcaggtccctgctctgctcccctcaggccaagcagcagacggtcacttgtggtggctgccattaccattatttggccccagccactcggctcagatccagctccccacgtccctgcacaagcccctagcacagcccggcaggactcagccacgcaaagccctgtctccagacctctcaatcctgcccgtcgaggtcacccagtcttccagaaacagctcagccgtttcctctccgtgtctccatctcagaagcccggagtgctatggatgatactggaacaaagcgtcccccaaaaccccgtctgggggaggagctgcaggtgaccaccgtgacccagaactccgtgggcctctcctggacagtccctgagggccagtttgactcctttgtggtccagtacaaagacagggacgggcagccccaggtggtgcccgtggagggcagcctcagggaggtcagcgtgccgggcctggaccctgcccacaggtacaagctgctgctctacgggctgcaccacggcaagcgtgtgggccccatctcggccgtcgccattactggtgagtgtgcggcagctggaacacctgtgcctccttcccgcctggctctcctggtctgactgagccataagatctctgagcttcccattttatatcatttccattgatccagaaagtttccttgtgcccctttagagtcagttgccccagtcccagcctccagcaaccactgtctgctttcgatcatcctggagacagcattttgactctccatgtaatggaatcacaatacgcagtctcttgtgtttcatttcttgcaattagcacaatgcttttgaaattcacccatgtgcagcaaaagctggtctttcgattgctgactgcttgccctcactccctctcctccctcactcctcctgagagtctgggtgcagcgacacaccagccatctgtctctacctgtctctgtgaaccagccggcagggaagaaacggaaactgagaccacggccccgacccctccagcgcctgagccccacctcggggagttgacagtggaggaggccacgtcacacaccctgcatctctcctggatggtgactgagggagaatttgactccttcgaaatccagtacacagatagagacgggcaactccaaatggtccgcataggaggtgaccggaatgacatcaccctctctggcctggaatccgaccacagatacctggtgaccctgtatggtttcagtgatgggaagcatgtaggtcctgtccatgtcgaggccctgacaggtgagaactctgcccactatgcctcctttcagatggctgggagagtccagaggacagcagagtcccgcggataccctgcccacctcagtcctctctttccatgtctctgtccagtcccggaggaggagaagccttcagaacctcccaccgcaacccccgagccccccatcaagcctcgcctgggggagctgaccgtgacagatgccacccctgactccctcagcctgtcctggacagttcccgagggacagtttgaccacttcctggtccagtacaggaatggagatgggcagcccaaggcagtgagggtgccagggcacgaggaaggggtcaccatctcgggcctggagccagaccataaatacaagatgaacctgtacggcttccacggtggccagcgcatgggccctgtgtctgtcgtcggggtgacaggtgagtggatgatgggagccccagggtgggagccatgggagggtcaccctcttgctctttggtgatgactggtggggaatgggacaagggtctggtcagcaccacagacctgcttgtggctggggctggggctccccttgggccttcctgtgaggttgaccactggctcctcctgaacagagaggggccatcgggaattttgctgtgctggtggctgtcccaggtcccccacagctgaccctggaacttgtcatgtgtgttagctgtcagctgagcaggaccacccagccccaagagtaggcctctctgaactgacctcgggtcccccagtcatagccttggcttctccctccttttccccagtacccaaggacatccccctcactctctcttcctccttctcagctgcagaggaagagacccccagccccacagaacccagcatggaggccccggagcccgctgaggagccgctcctgggggagctaacagtgacaggatcctcccctgactcgctgagcctctcctggaccgtcccccagggccgcttcgactccttcaccgtgcagtacaaggacagggacgggcggccccaggtggtgcgtgttgggggcgaggagagtgaagtcaccgtggggggcctggagcctgggcgcaagtacaagatgcacctgtacggcctccacgaggggcggcgcgtgggcccagtgtctgctgtgggcgtcacgggtgagtgtgcactgcagagccctctgggttgggtcttagcaaagtacagcctccagcatctcctccactagggacccagaaccccaagacctcaaacctgtaatacaccctgttcactaaaggctcaggacaggtgtgatctggggacagagagagcaaatccaggagaagtgtcggagccatatgggaaaggcccccagggactgaggcctcttgggaggtgattcactggctggtttgtggctctccgcttttccttggaactctatacataactctttttgtgagattggaacacatttttgaaatacaaattaattaaattaataagtatttgttaaataaaatttcaaatgtataaacagaaagaatagtacaaagaccctgccatcctccttcaatcaaatatcgacttctggccagtctggctcatctctgccccacccacttcctccactagaatcactagaatgttttctttctttctttctttctttctttctttctttctttctttctttctttctttctttctttcttccttccttcctttctttctttctctttctttctttctttcattcttttctttctttctttttagacaaggtctcactctgtcgcctgggctagagtgtactggcacagtcacaattcactgcactgcagcctcaacctcctgggcttaagggatcctcccacttcagcctcccgaatagctgggactacaagtgcactccaccatgcccagctaattttttgtattttttgtagagacagggtttagccatgttgcccaggccagtctcgaactcctgggctcaagttatcctcccacctcagccaaagtgataggattccaggcgtgagccgccacacccggcctgaatgttttctttattaacacctttatggagatataattcatgtggcataaaatacacttgtttttagtgtacaacttactgattttagtatctttacctacttgtgcagccatcaccacgatctaattttagaacttttccatcacccccaaaagaaatcttgggtccagacccattcctacctcagccctagtttataactaatctacttttttctctgtagattgctgttccagaacatttcgtataaatggactcaaacaatatgtattcttttgtgtctagcttctttcactgagcataatgtttttgaggttcatcaatgtagcatgtagaagtactatacttactacattgctattgattgattgattgattgattgattgattttttttgagacaaattcccactctattgcccaggctatagtgcagtggcatgatcatagctcactgcagccccagactcctgggctcaagccatcctcccatctcagccccccaggtagctggggccacaggtgctcgccaccacactcagctaatttaaaaaaattttttgtagagatggggtctcacagtgttacccaggctgatatcaaactcctggcttcaaggaatcctcctgcctgggccttacaaagtgctgggatagcaggcatgagccacctgctctctctcagccactacactgctttttattgccaaacagtattgcattgtgtggttatactactgcagtattttaaaaacgaaccacagacatcctatgctttcatcactaaatatttaaaggtatatctctttttaaaaaaattatttttaaaaaatccacaatatggccaggtgaggtggttcacgcttgtaatcccagcactttgggaggccaaggcaggtggatcacttgaggtaaagagttcaagaccagcctgaccaacatggtgaaaccccgtctctactaaaaataataataataataataaattttaaaaagtacaaaaaagcggagcgtggtggcacgtgcctgtagtcccagctacttggcgggggttgaggcacaagaaattgcttgcacccaggaggtggaggttgcagtgagccaagatcgcgccactgcactccagcctgggtgacagagtgagactctgtgtcaaaaaataaataaataaataataaaattccacaatacaattagcataccttgataagtgaacaatcatgccttgatatcaagtatccaggtagtgctacagtctcccgagtgtctcataattgttgtttcccaatttgttgctgaaatcaggtctatagaaggaggatacattgcaattgagaaaactgaaattttaaatagagtaatcagggaaggcccacagaagaaggtggcttttgaacaaagacttaaaggaagtgtggggatgagccatgaagatatctggggaaagaacatttaggtagagggaacagtcattgtaaaagtactgaggtaggaggctgcctggcatggttgagggaccataaggaagccacaaaatctgattatgattataatcagaaatcgatcttaagttagggccagactgggcccaccttctgacctgaattcaagacagctggggcctcaacacctccttgcagcaagagaaaagattctgtttctatctcttcctagcccccgaagaggagtcccctgatgctcctcttgcaaagctgcgcctagggcagatgacagtgagagacatcacctccgactccctcagcctctcctggacagtccccgagggccagtttgaccatttcttggtccagtttaagaatggggacgggcagcccaaggcggtgcgggtgccgggacacgaggatggggtcaccatctcgggcctggagccagaccacaagtacaagatgaacctgtacggcttccacggtggccagcgcgtgggccccgtgtctgctgttggtttaactggtgagtgtgcagtagggcactgggccctgccctgaactagactcagtttcccttttattgtcagtatctggtggctttattttactttccctgagaccaagcctcccaagctcctgggaatggttctgctggtgccttcactccgagactttggtattgccccaggtcttctgcccgttacacatgggctttttgggttcccaaagaggtgggggaccaggaaaataacacagactgaggcacacctggggttgaccatagcttcagcccatttgagctgtgtgtcctcaagagactcacacaacctgtctgggcacggtggctcatgcctgtaatcccagcactttgggaggccgaagggggcagatcacttgaggtcaggagttcgagaccagcctggccaacatcatgaaacccccatctctactaaaaatacaaaaattagctgggtgtggtggcacatgcctgtagtcccagctactcgggaggctaaggcgggagaatcgcttgaacccaggaggcggaggttgcagtgagccgagatcgagccactgcactccagcctgtgtgacagagtgagaccctgtctcaaaaaaacaaaacaagcaaacaaaaaacagacacacgacctctctgtacatccttttcctcatctgtaaagaaggaataaccatacctgtcgtgaagggtgggcgggagtgtggcttggctctcacacacaatgagagataactgcagtctttcccttctgaggaaggtaggtagttcctgaaaaccgcttagggcaaattctcataattatcactgatttcagtgggaaaaattgtatgtgttctctaagctcccaaattaatacccatttatttttaaaacaacactgaatcctgttaacatggatactattactttaattgtaaatattggccatgtgcacaacttaataaggcattttcctttcattaccctgtaactcggctctttgatgcttttgtaagctcttttatagctgttaccccctagatgcttaagactcagttctcaaaaagaacagacaaatgaaatgtgatgaatttgtaataccactatcaaggcagaataaaaccctatgaagagcagaaaagattaaagaaatcaatgaaaacaaagcaattgatttcacacgggccaaaagaactggcatcactggaggtgctctctctgccgtaagttagcagagctactgcaggtccagagacaactcagctgcaaagatgccctcatgtggtctcatctctctaccctcagctataaaatctaagttggtttctaaaaatgctcaggattaggtggaatttccaagcccaggtggatgaacctcctgatacaacttgcctgttgtgtttggttggtgttctttgttttctttttttttttttctttatgttgagatggagtctcactctgtcacccaggctctcaggctggagtgccgtggtgcgatctcagctcattgcaacctctgcctcccaggtccaagcagttctcctgcctcagccttccgagtagctgggattacaggcatgcaccagcacatctggctaatttttgtatttttagtacagacaggatttcgccatgttggccaggctggtctcaagctcctgacctcaggtgatcctcccgcctcggcctcccaaagtgctgggattacaggcctgagccaccacgcctggccctgattgctgttttttgtttgtttgtttgtttttgtttgtttgtttttttcttgagaaggagtctcgctgtctcccaggatggagtgcagtggcgtgatcttggctcaccgcaagctccgcctcctgggttcatgccattctcctgcctcagcctcctgagtagctgggactacaggtgcccgccaacacgcctggctaattttttgtatttttagtaaagacggggtttcacagtgttagccaggatggtctcaatctcctgacctcatgatccgcccgcctcggcctcccaaagtgctgagattacaggcctgagccaccacacccggccctggttggtgttcttataaagcatcaattctgtcctgcaaaacaaatttgcttggcagctcctaagggtcccaggcctgcacactgagcatcacagggatgccacctgagcatcatgacttcaccacaggtgtggtgttaactgaacattcaaagcagaaaaatgatattctaagcttggggcaccagcatccagactgtgggcccttggtgtgtctaagagaatcccagagtcccttggttaaaaggaggcccaccaggcatgcccacccattctattttctgatgcagccccaggaaaggatgaagaaatggccccagcctcgacagaacctcccacccctgaaccccccatcaagcctcgcctggaggagctgaccgtgacagatgcgacccctgactccctcagcctgtcctggacggttcccgagggacagtttgaccacttcctggtccagtacaagaatggggatgggcagcccaaggcaacacgggtgccaggacatgaggacagggtcaccatctccggcctggagccagacaacaagtacaagatgaacctgtacggcttccacggtggccagcgtgtgggccccgtgtctgccatcggggtgacaggtgaatggacgatgggagccccagggtgggagccatgggagggtcaccctcttgctctttggtgatgactggtggggaatgggacgggtctggtcagcaccacagacctacttgtggctggggctggggctcccattgtacctttttgtgtggttgacccctggctccccctgagcagggaggggccattgggagttttgctgtgctggtggctgtgccaggtcccccacagctgaccctggaatttgtcatgtgtgttagctgtcagctgagcaggaccccaagaatgggcctctctgaactgacctcaggtcccctagtcatagccttggctatttcatatgtcccctagtcatagccttctccctccttttccccacgacgtaagcacatcccccagggaccctgccatcctctctgtgtccctttttctcagctgcagaggaagagacccccagccccacagaacccagcatggaggccccggagccccctgaggagccgctcctgggggagctaacagtgacaggatcctcccctgactcgctgagcctctcctggaccgtcccccagggccgcttcgactccttcaccgtgcagtacaaggacagggacgggcggccccaggtggtgcgtgttgggggcgaggagagcgaggtcaccgtggggggcctggagcctgggcgcaaatacaagatgcacctgtatggcctccacgaggggcggcgcgtgggcccggtgtccaccgtgggcgtgactggtgagtagtgcttggagtctcggggtaaccacctttccctcatgggtacctggtttactgctgtgccctttcaccaagccctgtgggtccagacttgtctcctgtgtcctgccctccctctgtgccctgtggctgtggcctatgctagcggtttgcttgttcactttggcgtggcctccctctaatggtcaaccactgataacctccaagagtgaaatatgtcaggcgcacaccaagcctgacttacgagaattttcctttctttccatcttaataacagcattctttgttataaccacatacacaaatgcacacaagaggaacaatccaacgtcaaaccacgttgggatgactaaataatttaggcaacatctataaaaagagctattatgccgccactgaaatgttttaacataagacccttactttataatgttacattgaaaaaagagagcctaggctgggcacagtggcttacgcctgtaatcccagcactttgggaggccgaggcgggctgatcgcctgaggtcaggagttccagaccagtctagccaacatggtgaaaccccatctctactaaaaatacaaaaattagccaagcatggtggcacatgcctgtaatcccagttacttgggaggtggaggcacgagaattgcttgaacccgggaggcagaggttgcagtgagccgagatcaccactgcactccagcctggcagatacagccaaactcagtctcaaaaaagaagaaaaaggagcccaaatttttgtaaggatgctaatcacaaccatttgaaagtaacaggcatggcaagaagactggaaagaaacacatcccacgggttgcctgatttgttagatagaatagaatattccagcacatttttttctgtattattctattctgcatagtccaaattttcttaaatggcaaacatttcttttacaatcagggaaagggaaaagagaaaatatataatgtcttctccttctttacactccatctgtcctactcctctatcgctcttgtggcttatttcatttatttccttcttttttttttttgagatgaagtttcgctcttgtcgcccaggctggagtgcaatggcatgatctcggctcactacaacctctgcctcctggattcaagcgattctcctgcctcagcctcccgagtagctgggattacaggcatgcgccaccacatctggctaattttgtatttttagtagagagggagtttctccatgttggtcaggctgctcaaactcctgacctcaggtgatctgcccgcctcggcctcccaaagtgctgggattacaggcatgagccaccgcgcccagccagacttatttcatttctaattatgaggaagttcaaaatttctagtccataagaaattggaggggtggagatcatgaggttaattgaattccaaatgctcagtcaggctgccttttctaagtcatcctcagccaggttgttatgcctggcttagagtatttttcgagaattcctaccgatggggaagaatcagccctgctgagaggcggtctcttgcagggcaggtcgccacctctgtggcaccaagtgaggtgcgagctcatctcccaaaggccatccagacagaggaagcactctcaatcggcatccccgattcctgggggagaggcctcatttccatatgcatgttcagaggaccatctgagtgttgggaaacagggggaatagggaaattattggaaaatgaacattagaaaaattcacattccgggggtaagctgtcctggtccacgttcagttttgtgttcctgtctccactgtggggaaccacagaactgacagaggacaggctgagggacccacccctgcccctcctgttctatgtgtattgctgccccacccccaccccacactctattattaattgttgtagcccagaatttctttctttctttttcttttttttttttttttttgagactgagtctcactctgttgcccaggctggagtgcagtggtgtgatctcagctcactgcaacctctgcctcccaggttcaagtgattgtcctgcctcagcctcctgagtagctgggattacaggtgcatgccaccacgcctggctaatttttgtattttcagtagagaccgggtttcatgatattggccaagctagactcgaattcccaacctcaggtgatccacccgcctcggcctcccaaaatgctaggattacaggcgtgaaccactgctcccagcccagaatttcttttttagcccacgtttttctagtgaaaataatacagcaacattatgtggaaagcttgaaaaacagaaaacaagaatctcatagtcctactttctcccccagctgccggcattaataacaatgtgtgtagtgcacattcccttcctgtattttgcatgcagagcgtgttttaaagttgcaatcagtgttcataaagttcttggcacttccttttttgtacacaagtacattgtaatcattcacctcacggctacacaaccagcattcatcatcgtttcaatggttatttgatgcgttgcggtgaaagcactataacaaaattaatcatcttctacgggtcatttgtgttcctgacacatctgctgtcatgaataaccccatcgtgagttcttccatgctataactttttcctgctttaataattttcttaggacagatgcccagaactgggattattgggtcaaaggaaatgagaattactttggctcctgacactatgtctcagttgccttctggaggtttctaacagtgcagctctgccagcagtacaggccgggggctcggggatacctcaccggctcttattccaagagtcactgaacggcgaacacaaagctgccccagccctcagcctgctctggaggggcgcatttgatgtatgacctctgttgacagcaccagcaaagcaagttgcccttaaacccttaaactctgtatccccctatattacctttcagccccacaagaggatgtggacgagacccccagccctacagaaccaggcacagaggccccagagccccccgaggagcctctcctgggggagctgacagtgacaggatcctcccctgactcgctgagcctttcctggaccgtcccccagggccgctttgactccttcaccgtgcagtacaaggacagggacgggcggccccaggcggtgcgtgttgggggccaggagagcaaggtcactgtgaggggcctggagcctgggcgcaagtacaagatgcacctgtacggcctccacgaggggcggcgcctgggcccggtgtctgccgtgggcgtcacaggtgagtgagtgtgggtggggcagggttggaagacagccctagaaaatgtgcccttctctaccattttcctatacatatttctgtcttgatggggctcacagtgaaaggaatatagcaacattatggaaagacatgtcatggagagacaggctgcaatccagcaaatgaagcaaaggcgggtgagcatgtgatagggaggcccagggctcaggtcaggaccagacagggacgcctaagtcaccctgcccatgggtacccaggggacagccaggacctgaggccaggcatgccttagcttggtgacagctttagagagaaggtgaagtgtgtcagataatcacagctggtgcaaaggccaggaggctagaaagagcatggcacgtgagaggcactgaggattgagtggggtgtcctttacggtgagtatctcatcctgaagtgtgggagcagaggaggggaccactcaccaggcctggggtctcccagggatgaggatgtggttgcccaggtctgtgctgagatggccccagcagctgtgcctgtgtgaagctcatccgtgggggctgaagatggggatggggtggcagggagcctggaggcagcgaggccagtaggcagttggtggccctggtgagaggtgacagtggctcaaactaggatcggggactggaggtggggtaggaaggtatccaggggaattcagggtaaagatgctctgaggctgctggcagctggtgaggagctggatccaggaacacaccccaggctctggcctcgggaggagtgtgctgagcttgttgcggagcaaagacagaagcccagtgaacaaaagatggcgaagagaccccagtgctgggaggccaggggtgcagaggccgagtggggctgtgctcaaaagagaggcggtgctggagggacagggagaggtggcctgggtgttgggaggtgggggtgaggtgggggctgagggcaggagggtcagggtgagggataggaaaggccacaggagaggagaggatgaagagctgtgctggaggggctgtgggcagcatcgtcctgctcttgggcactttgtgttttgtgacacatcctttctatgctgaactgaggagccagggacctcactgtccccacacgtgtctgtccaactccagaggatgaagccgagaccacccaagcagtgcctaccatgacccctgagccccccatcaagcctcgcctgggggagctgaccatgacagatgccacccctgactccctcagcctgtcctggacggttcccgagggccagtttgaccacttcctggtccagtacaggaatggggatgggcagcccaaggcggtgcgggtgccggggcacgaggacggggtcaccatctcaggcctggagccagaccataaatacaagatgaacctgtacggcttccacggtggccagcgcgtgggccccatctctgtcattggggtgacgggtgagtggatgatggcagccccagggtgggagccgtgggagggtcaccctcttgctctttggtgatgactggtggggaatgggccaggggtccggtcagcaccacagacctgcttgtggctggggctccccttgggccttcctctgaggctgacccctggctcctcctgagcagggaggggccatcaggagttctgctgtgctggtgactgtcccaggtcccccacagctgaccctggaacttgtcatgtgtgttagctgtcagttgagcaggaccacccagccccaagaatgggcttttctgaaatgacctcacatacccagtagtggccatggtttctccctccttcccttgaagacctgagcacatcccccaggcacctggcatcctctctatatctccttttctcagctgcagaggaagagacccccagccccacggaactcagcactgaggcccgggagccccctgaggagccgctcctgggggagctgacagtgacaggatcctcccctgactcgctgagcctctcctggaccatcccccagggccacttcgactccttcaccgtgcagtacaaggacagggacgggcggccccaggtgatgcgtgtcaggggcgaggagagcgaggtcaccgtggggggcctggagcccgggcgcaaatacaagatgcacctgtacggcctccacgaggggcggcgtgtgggcccggtgtccaccgtgggtgtgacaggtgagtgtttgtgagtgaggaagatggccctagaagatgttgctttctctgcaacttcatgaaaacaaaaatattctcaccagccgggcttcttttgcacgtttccatgcttggggatcttgctaagaggcagattggggttcaacaggtttgggctagggccagagattctgcatttccaacaagaaatgatgcggatgctgctggcccatgatcacgccccttgagtagcaaagttcttcacgacaaaggaattggaccctcttttgaaatctgttgaagagaatttttctgcgtccctgattcctggtagtgtgctttctctgtggagttgactaggggccgtgaaggaagacagaaggcagtgaggggcagcgcgtcgactgcacactctggaagcccactattggaataggaataggaacagacctttctcaccaatgggccaatttgttcattcagcaaagaattccttgccctgatccggacactgtaattttagggtatcaatgtcctctggccaacgacctccagaaactcacctaaaattgaatggatggaattatgctccatgcagtgcaggaggactgtggggtgacttaggaagaggctttagaaagagattgttaaggaactgggcttgtgtttggtgttttaggaaagcatttaaggaagcaaggttttgctctttattagacgctgtcaggaagaagggataaccctattaccgggcgtctcactaagtcttatctttggggaggtcaactagagcaaggccaaagctgccattggtaaagaagcagctatcactcagattagctggatgggtgatgtttggttatttttgtgctttggaaaatgttagagttcatccttactgagacatgatcacagactggccttgttcttgtcttgatccatcctactgacaaatggcctagtctgatgttgatgttccatgaaattgtctgttcaactggaccacgccaagaccagactgtgccaggccagccccaagcagccgtggcctggcagagggaaagggcagctcacgggtgtcagggctgcctttttctttcataggcggaagctggaaagtgacacacacaagttcatgttttcatggggctcacaattgtgggcacaagcagaaaaccggaaagtaagcaaagaaggatgagcatgtggagcccaggagccaagccaggattgggaagggacagtgaagtcactctgcccacaagtacccaggggacagccaggacctgaggccaggcaggccttagcttgatgacagctttggagaggaagtgaagcatgtcaaatcatcacagctagtgcaaaggccaggaggctagaaagagcatggtgtgtgagagacactgaggattgagtggggtgtcctttgcagttggtggatcatcctgaagtgtgggagcagaggaggggaccactcaccaggcctggggtctcccagggatgaggatgtggttgcccaggtctgtgctgagatggccccagcagctgtgcctgtgtgaagttcatccgtgggagctaaagatggggatggggtggcagggagcctggaggcagggaggccagtaggcagttggtggccctggtgagaggtgacagtggctcaaactaggattggggactggaggtgggggaggaaggtatccagggaaactcgggggagaggtactctgaggctgctggcagctggtgaggggctgggtccaggaacacaccccaagctctggcctcgggaggagtgtgctgagcttgttgcggagcaaagacagaagcccagtgaacaaaagatggcgaggagacaccagtgcagggaggctaagggtgcagaggccgagtggggctgtgctcaaaagagaggcggtgctggagggacagggagaggtggcctgggtgttgggaggtgggggtgaggtgggggctgagggcaggggggtcagggtgagggataggaaaggccgcaggagaggagaggatgaagagctgtgctggaggcgctgtgggcagcatcgtcctgctcttgggcactttgtgttttgtgacacatcctttctatgctgaactgagaacccagggacctcactctccccacacgtgtctgtccagctccagaggatgaagcagagaccacccaagcagtgcccaccacaacccctgagccccccaacaagcctcgcctcggggagctgaccgtgacagatgccacccctgactccctcagcctgtcctggatggtccccgagggccagtttgaccacttcctggtccagtacaggaatggggatgggcagcccaaggtggtgcgggtgccggggcacgaggacggggtcaccatctcaggcctggagccagaccacaagtacaagatgaacctgtacggcttccacggtggccagcgcgtgggccccatctctgtcattggggtgacaggtgagtgtacgatgggagccccagagtggggcctgtgggagggtctccctttctctggtgatgggtgaactggcccaggaagcccctctgctcttggctgagccatggtacttttttgtctttccccacttccctgaggactgacagatcttcctgggtggagaagggccctgtgagctctgttggtggctgtcccaagttccccagcactgacctcagagcttgtcatgtgtgttgactgtaaactgagcaagaccacccagctccaaagatgggcctctccaagctgaccccaggacccccactcatggccacagcttcgctctccttcctcacaagacccaaggacatcccccagggaagctgcctcaccttctctgtcccctcttctcagctgcagaggaagaaactcccgcccccacagaacccagcacggaggccccggagccccctgaggagccgctcctgggggagctgacagtgacaggatcctcccctgactcgctgagcctctcctggaccatcccccagggccgcttcgactccttcactgtgcagtacaaggacagggacgggcggccccaggtggtgcgtgtcaggggcgaggagagcgaggtcaccgtggggggcctggagcccgggtgcaaatacaagatgcacctgtacggcctccacgaggggcagcgcgtgggcccagtgtccgctgtgggtgtgacaggtgagtaagtgtgagtgaggcgaggtggggaagatggccctggaagacactgctgtctctccagtcttcgtgaaaacatactctgaagagtattccttcctttgtgtatccaaatgcctggagatttttgttaaaaagcagatttggattcagcaggcttggcctagggcaagagaccatgcatttctttctttttctttctttcttttttttttttttgagatagagtctcgctttgtcacccaggctggagtacagtggctcaatctcggctcactggaacctccgcctcctgggttcaagtgattctcctacctcagcctcctgagtaactgggactacaggcgtgcgccaccacgcccagctaattttttcatatttttagtagagatgggtttcaccgtgttagccaggatggtctcaatctcctgacctcgtgatctgccctcctcggcctcccaaagtgctgggatcataggcgtgagccacggcgcccagccgaccatccatttctaacaagattctcatctatcttgatgccactggtccaaggaacacactttttttgttgttttttattgtagtaaagtacacttgacataattcgccattctaatcgctttctagtttgcagtccagcatgaagtccactcacattgctgtggactgtcaccctccacttccagaactcctcttcccacactgaaacttcctacccactagacacgaactcccattctccccttgccccagcccctggcaacaccattctactctctgtctctatgaatttgactctaggtacctcatataagtgcaatcatacaatatttgtcttttttgaatggttcatttcattaaatacaatgtctttaaggttcatctatgtcgtagcatcagtcagaatttcctttttattttattttctgtggcaatgggggtctcggtatgttgcccaggctggtctcaaactcctggcctcaagcgagtctcccaccttgacctcccaaagtgctgggattataggcaagagccactgcacctggccagaacttccttccttttcaggctgaataatgtttcgttttacacatacagaccacactttgctcatcctttcatccattgatggacatctgggttgcttccacctcttagctatcaagaataatgctgctatgaatatttgtgtgcaaatcacagaacacctttgtagcaaagctcctcccagtaacagatttggaaactctcttagaatttgttgaagcgaatttttcttgcattcatgaatcctcacagaggttaggctcagagttagggttcctgtcctaatgggaaaagttcctgtcctaatggggctaacgtcatgggggacaggctgtggaccagtaagaaagcaaaggcgggtgagcatgtgacaagaagcccagagccaggcaggaatacctaaaccaccctacctgtggatactcaggggacagtcaggatctgaggccaggcaggccttagcttggtgacagctttagagagaaggtgaagcgtgtcagatcagcacaggtggtgcaaaggccaggaggctagaaagagcatggtgtgtgagaagtactgaggattgagtggggtgtcctttgcagtgaatagatagtcctgaagtgtgggagcagaggaggcctggggtctcccagggatgaggatgtgattgcccaggtctgtgctgagatggccccagcagctgtgcctgtgtgaagctcatctgtgggggctaaagatggggatggggtggcagggagcctagaggcagggaagccaataggcagttggtggccctggtgagaggtgacagtggctcaaactaggatcggggactggaggttggggaggaaggtatccagggaaactcgggggagaggtaactctgaggctgctggcagctggtgaggggctgggtccaggaacacaccccaggctctggcctcgggaggagtgtgctgagcttgttgcagagcaaagacagaagcccagtgaacaaaagatggcgaggagaccccagtgcagggagggtaagggtgcagaggccaagtggagctgtgctcaaaagagaggcggtgctggagggacagggagaggtggcctgggtgttgggaggtgggggtgaggtgggggccgagggcaggggggtcagggtgagggataggaaaggccgcaggggaggagaggatgaagagctgtgctggaggcgctgtgggcagcatcgtcctgttcttgggcactttgtgttttgtgacacatcctttctatgctgaactgagaacccagggtcctcactgtccccacacgtgtctgtccagctccaaaggatgaagccgagaccacccaagcagtgcctaccatgacccctgagccccccatcaagcctcgcctgggggagctgaccgtgacagatgccacccccgactccctcagcctgtcctggatggttcccgagggccagtttgaccacttcctggtccagtacaggaatggggatgggcagcccaaggcggtgcgggtgccggggcacgaggacggggtcaccatctcaggcctggagccagaccataaatacaagatgaacctgtacggcttccacggtggccagcgcgtaggccctgtgtctgccattggggtgacgggtgagtgaatgatgggagccccagggtgggagctgtgggagggccacctcttgctctttggtgatgactggtggggaatgggacaggggtctggtcagcaccacagaactgcttgtggctggggctgggactccccttgggccttcctatgtggttgacccctggctccccctgagcagggaggggccatcaggagttttgctgtgctggtggctgtgccaggtccccccacagctgaccctggaacttgttacgtgtgttagctgtcagctgagcaggaccacccagccccaagaatggacttctctgaaatgacctcaggtcccccagtcatagccttggcttctccctccttttccccaggacccaaggacatccccctcactctctctccctccttctccactgcagaggaagagacccccagccccacagaacccagcactgaggccccggaggcccctgaggagccgctcctgggggagttgacagtgacaggatcctcccctgactcgctgagcctctcctggaccgtcccccagggccgcttcgactccttcaccgtgcagtacaaggacagggacgggcagccccaggtggtgcgtgtcaggggcgaggagagcgaggtcaccgtggggggcctggagcccgggcgcaaatacaagatgcatctgtacggcctccacgaggggcagcgcgtgggcccagtgtccaccgtgggcatcacgggtgagtggggggacaggccctcgtccccaggtttacctctgcagcccccttgtgtttctcctttggatcttggcacctcttttgactgggcctctaggtttctgtcttttctcccatgttgctaatgatcctgcctcatccttggattcatggagactgtgtggagtcagatgggcaggtagtccatgccctgtttgttgtagcttccttctcccattgtgatctggaacctccatgttgctcgtgtgctcatttgttagtcttcaggctcccttaaggagtattttagtggctcagaaagtgcttcagatccagctgcccagatctgcatgtgccttcgaatgtagtgattgtgcgactttgcaggcgtttcctaaccttgtgcttcagattcctgcaaagttggggtgatgataataatggcacccacttcatatgttgtgcgagggttaaatgcaccactgtttgtgagctgcttacagcaatgcagggcacagattctaaaacaagcgttttagaggaggccgctaagaaatgctcactccagtcctgggagagcactgcctcccttgcgcagggtcctgcctcctgacccatgggcctgctctgctcttttcagcgcccctgcccacaccactgccggtggagccccgcctgggggagctggcggtggcggccgtgacctcggactcagtgggcctctcatggacggtggcccagggcccctttgactccttcctggtacagtacagggacgcgcaggggcagccccaggcagtgcctgtgagcggagacctccgagcggtcgccgtctcggggctggacccggcccgcaagtacaagttcctgctctttggactccagaatgggaaacgccacggcccagtccctgtggaggccaggaccggtgagtgagggctggaggcctcccgcggccagagccttcgcccccttgtggcacctgttggaatttcacgttctgtgccccacactccagtcctcagcacccactgatttattgggtccaggaaaacccaggccctgagctctcctctcccactcacactcatccctctccctactttccctgcaccccaggggacacttgctttcttgtctggctcctcttttattcctactcctggcccagtcaccctcccgttcctgggaccggctcacagagccatagcagcccaggaagctccgtggcccctttgcctccatcccactctccatgcacctcactgtcttttccagccccagacaccaaaccgtctccccgcctgggggagctgactgtgacagatgcgacccctgactccgtgggcctctcgtggacggtccctgagggcgaattcgactccttcgtggtccagtacaaggataaggatggtcggctccaggtggtgccggtggcagccaaccagcgggaggtcacagtccagggcctggagcccagtaggaaatacaggttcctgctctatggtctgtcaggcaggaaacgactgggccccatctctgctgacagcaccacaggtgagtcccagtccagcctccaccttttccagagctgcctctcatccgagccctcagagctggccctgcagccttcccgtgagattccctctatcagccctgacacaaccatcttaactccgaaagtgagtccctctgtgtgtcaggcacagttctgaagcatatgcattacttcctttcattcgctgactgctgaggaaataaaagggacacgggctttggggccagcagatctgtgttccagttccagtcctagcctttgccagggtgaccatggacaagccgcttcatccccgggacctcagtgtcctcacctgcataatgctgggaatggcgctggactcagtagtggttcccatcctcctccctcctccctgactcggagccgaggggtggaagaaaagggagggcttggctatggaaagacgatggaaaaacctggtgtcactatgcctatgactcagctccctgaggaaggggtgtggtgggtcaccgaccctcaccccactcccaggaccatgagtcactatgcccagaggaggacagagcagccggccagtctgggcctgggtccctgggactccgtaattctcttcccaaaccctcactgtggggacggggtacagatccccacccatcggccccagccccacccgggcaagcctctgctctgccctctgttctcccagctaatcccctgtcttctccctgccccaccctggctgccccggcccagtggggtcagtgtggggctggggaagcaggaggcacggatgttcaggctgatggccacaaggggacaagggggagatcacagcctggcagtgatgggagccgtgcattggccggctgcccagaccagctctcgatgtttggggtgtctccgtgacaacccagagacctccggggagtctctctcagctctggcctcattcttgctcaggggctgggggtcagggtaaacaaaggccctctctgcacccccagccacccatccctcgggagatgatctgtaatgaatttggcgcatcctcgatcacagcagggaaggggcggggcaggaaggagtttgggcagcagcctccagaggaggagggggctgttctccctcattcctgtggggcatggcgggagcaggcctgtgtgtctcctcaaggagctgtccctggggctacactggagggaccatttcccagaacctcacacctccgggaggctgccagggcttaggcaaaggcagcatgtgactaagagctttccctcctccctctgcacagctcccctggagaaggagctacctccccacctgggggaactgaccgtggctgaggagacctccagctctctgcgcctgtcctggacggtagcccagggcccctttgactccttcgtggtccagtacagggacacggacgggcagcccagggcagtgcctgtggccgcagaccagcgcacagtcaccgtagaggacctggagcctggcaagaaatacaagtttctgctctacgggctccttgggggaaagcgcctgggcccggtctctgccctgggaatgacaggtgaggctgctgtgcctggctatagcaagccagcttgtgtgggtttccttgtgcatttgggctgaagacaaagatgactgcaggagtgggcaggccggagtggggcgccctggcctgtccccaggaaggaggaggagtctgcagccctgtgggcttcaacatccatcaaggagtccagagcaggagccaggccaggcgggagggaaaggccctgggaggggctctctaatctcccagccccgactctgccccgtcactgccactgctcctcattactcgctggggctgctgtcgcctccccgaagggtggccttgtccagatagcggcaaacctccctgccgtggatgagtcaggagcattttcttaagaggaacatcactggaaaacaaaatgagcggggacacagaaaccaacagcagtggctgcatttgtggtacaggctcctcttccagagctcgctgatgcccacctcagacaggcctgaccacggcacggctggtgggatttgccagtcacctcaaccagccagttccaccctcagcttctctcagaagggagcaccacactcctcaagctcagtgaatgtatcccggcatgggtggggccagagcctgtgatatctcgaggtgggctcggcaggacaccggggtgtggaagggggaagcgagcacctgactcagacagcgcgggagctcgcaggagtcacgaggccacagcgacttcattgtctgactgggcctggacctataaacttcccacctcagccttgggccaagcctggaagataaaaatggagcaccccatggcgcccctcactcagattctcccctgggcttctcccacgcagccccagaagaggacacaccagccccagagttagccccagaggcccctgagcctcctgaagagccccgcctaggagtgctgaccgtgaccgacacaaccccagactccatgcgcctctcgtggagcgtggcccagggcccctttgattccttcgtggtccagtatgaggacacgaacgggcagccccaggccttgctcgtggacggcgaccagagcaagatcctcatctcaggcctggagcccagcaccccctacaggttcctcctctatggcctccatgaagggaagcgcctggggcccctctcagctgagggcaccacaggtaccaccaggcgtctccggcctctagcctaggactcagaagggagaaacgggggctcagaaggggtggtcgcagggaaagagcgtgaggcgggtaccagggagagaggatggatgggctggatgcgagtggcctttagctctgccccacaggacccccctgtggctgcaagtccctggttacagatagagaaacaggggcagggaggggggtggaagggacgtgctctgggtcaccaagctggtgtgcttctgtctccaatcccttctcccccacccactccgtgcagggctggctcctgctggtcagacctcagaggagtcaaggccccgcctgtcccagctgtctgtgactgacgtgaccaccagttcactgaggctcaactgggaggccccaccgggggccttcgactccttcctgctccgctttggggttccatcaccaagcactctggagccgcatccgcgtccactgctgcagcgcgagctgatggtgccggggacacggcactcggccgtgctccgggacctgcgttccgggactctgtacagcctgacactgtatgggctgcgaggaccccacaaggccgacagcatccagggaaccgcccgcaccctcagcccaggtaaggacccacacacactctgccccaaagtgggggtctttgtacttcacgggggggacctagtgcctcagccagcggtgggggtgggcgagttggtggtgggcctggaggaatctgcagagcgacttccattcctggggactagaggaaaaggggtggtgagcctgtgctggagcagaggcgagggggggactcgcagggagaagcctccctgcccctgcctgcgtcattgttccttgacccctctgcagttctggagagcccccgtgacctccaattcagtgaaatcagggagacctcagccaaggtcaactggatgcccccaccatcccgggcggacagcttcaaagtctcctaccagctggcggacggaggtggtgcctttgccatgtgctcatcgcctcgcatttcctctcccccctgcactctgcccaccctccagccgccctggggttccctgggtaaccctcgatccccaatgttttcaggggagcctcagagtgtgcaggtggatggccaggcccggacccagaaactccaggggctgatcccaggcgctcgctatgaggtgaccgtggtctcggtccgaggctttgaggagagtgagcctctcacaggcttcctcaccacgggtgagatggactgggacccggggcaagaggtgggagccaagaaaacggcatgggtgggagttgagagagaacgaggagggtgaaagggaggtggtggaggctccgattgcggacgggaggccagtggagtctggggaggcacggagtagagagagccgcggggacccttctgagcccctccccttcccccagttcctgacggtcccacacagttgcgtgcactgaacttgaccgagggattcgccgtgctgcactggaagcccccccagaatcctgtggacacctatgacgtccaggtcacagcccctgggggtgagcaggcctgaggcctctggaggggacttgttcagggtggggattgcaggggggaggctggactctggccgaggatggagggggcaggccttgatgcccctctctacactcccagccccgcctctgcaggcggagaccccaggcagcgcggtggactaccccctgcatgaccttgtcctccacaccaactacaccgccacagtgcgtggcctgcggggccccaacctcacttccccagccagcatcaccttcaccacaggtagggtctgtggggtgtgtgggacagggagaggaggtagagggagccaggttgggcctcatccccatctcctcttcctgctttccctcctagggctagaggcccctcgggacttggaggccaaggaagtgaccccccgcaccgccctgctcacttggactgagcccccagtccggcccgcaggctacctgctcagcttccacacccctggtggacagaaccaggtgccccggccccactgacccaactcccctccctgggtgattccaggaggtgctgcctctggccctcccggagggtctccacctccctctcccctgacccccccttgtctgtcccacaggagatcctgctcccaggagggatcacatctcaccagctccttggcctctttccctccacctcctacaatgcacggctccaggccatgtggggccagagcctcctgccgcccgtgtccacctctttcaccacgggtacctggacgcacgggcccggggccgggggctgggtgggcagccagggcctaaggcttggaaaaggactggcccctgctctcctctcccaggtgggctgcggatccccttccccagggactgcggggaggagatgcagaacggagccggtgcctccaggaccagcaccatcttcctcaacggcaaccgcgagcggcccctgaacgtgttttgcgacatggagactgatgggggcggctggctggtgggtggcattgggaagcccaggggtctgtgcagggcagggtctgttgccccgggagccagaggctgatggtgcccccacttgcttcccaggtgttccagcgccgcatggatggacagacagacttctggagggactgggaggactatgcccatggttttgggaacatctctggagagttctggctgggtcagtgcctcacagggactggggaactacggatggggatgggggccctgtggacaccaggaccctgatgagggcacgtatcccacccccaggcaatgaggccctgcacagcctgacacaggcaggtgactactccatgcgcgtggacctgcgggctggggacgaggctgtgttcgcccagtacgactccttccacgtagactcggctgcggagtactaccgcctccacttggagggctaccacggcaccgcaggtaagcagaggctgtgaggctgggagggtgaggctgggaggggaggccctcatggctccttcctccaccctgcccaggggactccatgagctaccacagcggcagtgtcttctctgcccgtgatcgggaccccaacagcttgctcatctcctgcgctgtctcctaccgaggggcctggtggtacaggaactgccactacgccaacctcaacgggctctacgggagcacagtggaccatcaggtgaggggtggggaggcggctcagagctggggtggctggggctcggcctgcctaggtttcagccccacagtgtaacaggcaagggactgagtggctgggtgaaatggaacaatcatgccagcctcgcagagggagctggagttgatttattggctggaaagggccagctcagaattaagcctcaatcctctgcagcggagggtcaggaagggagctctgcggggaggttggttgagtgctgggagctacctccttaaggggaatgggaggagcagatgggacatccggctttgactctctcttgacaacccctttcccagggagtgagctggtaccactggaagggcttcgagttctcggtgcccttcacggaaatgaagctgagaccaagaaactttcgctccccagcggggggaggctgagctgctgcccacctctctcgcaccccagtatgactgccgagcactgaggggtcgccccgagagaagagccagggtccttcaccacccagccgctggaggaagccttctctgccagcgatctcgcagcactgtgtttacaggggggaggggaggggttcgtacaggagcaataaaggagaaactgaggtacccgg

SEQ ID NO: 76 - DNA, 5766 bp, Homo sapiens
tatttagaattgtggagttgttgccaagaggaggaattagctcaattaaagcaccttccaaatgagactgtttagtcttagccatgagtaagttgttagtaatttggattattattaattctactgcataagtctgtggaatacatggagagacaaagcagacctttcttaatatatatgctttcttctagagcagtgctttggaaacttgtatgtgcattccaatcatctgggcattttttttttttttttttgagacagagtttcactcttgttgcccaggctggagtacaatggcactatctcggctcactgcaacctctgcctcctgggttcaagcgattctcctgcctcagccttctgagtagctgggattacagatgcccccacaatgtccagctaattttttgtatttttagtagagatagggtttcaccatattggccaggctggtcttgaactcctgacttcagatgatctacctgccttggcctcccaaagtgctgggattacaggagtgagccaccacgcccagactcacctgggcatctttttaaaacgcaggttcagattctacagatctgaggtgggtcctgagatgcatcatttctaacaacctcctaggtgatgctgatgctgctggtttgcaaactatactttgaattgcaagattcagatgttgctttttgtaaaaaacaaacaaaatcccccaaaaccaaaacccaaaactttgtgtttatattttataatttttctgaccaaatttttacctaatttacttactgaatcccaatttagtctttggctaacaattgggcactcaaatctttgctgaggaatgcatgtgttctatatcataatcaatatctttagaaacaattcccttaattaaaggcacccacaatttttagtattatctgtagaattttaattttattttattgtgataaatggctctttatgcaatggaaatgttgccagagtccctgttcttggacacctcttaaaccaaatgccatttaaatgaccacagactaaatacaaagtaggtaaatgcttacagggaaaggggaaagtggatcaaggtagaaaaaagacaatttgttttaaacactcttaatacaacttgttctctctccccttaaacatgtttaaaacaacgtaaagcacagatgattgtctgaaagaaaaagaaatcatttgcacagcccctgttttccagcttggtgccctttgatgggtggtgagtggtagcgatgtggcccagtgagacggcacagtcgctcttcctgcaggtcagaatcttcctaggctgttgctcttccaaggtactctgagtcctgcgatggtggcctggggttttgtttcctaagaagtagttgccattattttgattcatcctactgttctaaccaaaacaaaaaccaaaaaactccaaatggtaacagatattcatatacccggacacccaagtcagtgagtgtcacgtggcttccagatttgcatctgtgctgcagtagtctttcttcctggcaggtgtacttttgcatgtgatgggagatgccctggggtccgtggttgtggtcatcacggccatcatattctatgtgcttcccctgaagagtgaggacccgtgtaactggcagtgttacattgaccccagcctgactgtcctcatggtcatcatcattttgtcatctgccttcccgcttatcaaggagaccgctgccattctgctacagatggtcccaaaaggagtcaacatggaagagctgagtaagtagactgaattttgatccagaaccactctcaatttaatgttattcaggccaaaggacaagcattatttaagagcagtgtttgagttatgtattctgaaacaccttaaatcaccaggtggtagagatgtcatcatatgttttatagcctattaagatgactcagctccaagtaccaaaggtcctttgcaatccgtgattctctgactcaactgcaaatttttaagaatgcaatacttggtctgggcatggtggctcacgcctgtaatcctggcactctgggaggcagaggtgggtgagtcacctgaggtcagaagttcaagaccagactgaccaacatggtgaaaccctgtctctactaaaaatacaaaaaaattagccaggcgtggtagcacgcgcctgtaatcccaactactcgggaggctgaggcaggagaatcgcttgaacccgggaggcggaggttgcagggagctgagattgcaccactgcactccaggctgggtgacagagtgagactctgactcaaaaaaaaaaaaaaaaaaaaggaaagaaaaaaaagaaaagaatgcaatgcttggataatacctattcctgggctacttactttcatgtcaaagatttattttaattcaaataaggccatttctgccaagaactttattttattctccttattctaaaaacacaaatcattcatattctagaccctgctttctagttaatgcgggcatgcaagtcactgtgtctctcacaacactgcccagagctgcaggcagagcaggtggtgggagagggaaggagacagaagagcagacatacagcattgcctttgccttcccaggagctagatcatttcccaattgaggaaataagataaacatatacaaagaaatttgtgatatatactggatatgtttttagtaaagtaatatatttaaaaacagatatttttaaaaatagagggctactttttgtgactcattcctgtaatctcaccactttgggaggctgaagtggaaggattgcataaggccaggagttcaagaccagcctgggcaacatagtgaggcctcatttttagaaaaataaaaaaattattttttataaataaataaaaaagtaaaggttgtagtgtgtgcctgtggtcccagctactcagtaggctgaggtgggaggatcactggagccctggagtttgaggctgtagagagccataaatatgccactgcactccagcctgggagacagggcaagactctgtctctaaaaaaaaaaaaaaaaaaaccccacaagatagtaataacaatagcaatattttcatagcgtttactacatgctagaaatgtaagtgttccaagtgctttacttataataattcattttaatccttaaaataatacaaaaaggtactattatcatttctattatacagataaggaaactgaggcacagagaggttaggtaattgcctaacgtcatgcagttagtaaatgtctaaactaggattcaaactagctgactgcaaagcctttgctcaaatcagcactgaataccatctctctaaatacatactcattttggaaagtatagaaaatacagaggagcctaaatgagataatagaaatctttcataatttgaccatggaaactaccactgttaatattttcttctatatgcggtgtaaaaagaaagatcataccatacacacagtttagcaatttgctttttcacttaaaaataccttatgtacattttctcatatccttaaatatgcaacttacttttaaacaactatatcctattccattacatcattgatttaactatttccttgttggttccatctttttaatgaacacaaggagcattgtccaaaccattcttgtacatacatatttggttatttcttttaggttaaacttttagtactagaattgctaggaaaggttttttttgatccatgttgccaaatcatcccttttaagaaaaggcattgcactttatcctactatgggaagttcattcaagtgtccattcccttgtatactcagcaaccctggggacttttttcttgtcgttgttagacttactttcttaaatgactttgtgtggactaacaatgtgtggagaaagaaggttaagggcaaatgtacccacagaggtagaactaatttcttccagctgttcgtagtaagtaggcagccattttggtgagaatgcttaacggaaccatatccctcctgtagttccatgtttcaaatgcagcgctcaccttggcttttgtttgctcttctctgttatagtgagtaaactctctgctgtgcctggaattagcagtgtacatgaagtgcacatctgggaacttgtaagtggaaagattattgccaccctgcacatcaagtatcctaaggacaggggatatcaagatgccagcacaaaaattcgagaaatcttccaccatgcgggaatccacaatgtgaccatccagtttgaaaatgtggacttgaaggaacccctggagcagaaggacttactgttgctctgcaactcaccctgcatctccaagggctgtgctaagcagctgtgttgtccccccggggcactgcctctggctcacgtcaatggctgtgctgagcacaatggtgggccctctctagacacatacggaagtgatggcctcagtagaagagacgcaagagaagtggctattgaagtgtctttggatagctgtctgagtgaccacggacaaagtcttaacaaaactcaggaggaccaatgttatgtcaacagaacgcatttttaatctggtactcacataatcagaccatatagacgaggcactttggaaccacaagcttggctcacaaaaagagctttctgggttgtaggcccagactagacttgcagcatgcatgctctgtgttcactaggggttggctgtttgggattttagttaaacgtgtctgtgaatttttatgtaactaactcctttccattcccctgggtgtctcatgctgctctttgactgtttcagcttgaacatgcattttctaaagcaaactgcactagtgtatatatcagggacattaaagtctgggactggggctcaatagctgcggatacagtgttcaaagaagttcttgtttctaaactgattagaacttctagctaatgctcaggtgagatcatagcttaaatacattgaaaaaactaaagtaccacaatagctgtatttttcccaatccccttaacgatcataaaagaggcaagttaagtatttctggcactgaagaaatatcttttttctttgattcatttttgaataaatataaaatgaataactattaaggtagaaaatattctcagaacattctagaggaggtaaaggttagtaggagggcgttggccatctctacattttgtgaggtgagagaaaactaatgtttactttctgctgtgaactgaactgcagctatagaatgtttcaaatgcttaaatatataatacatttttttccatggaagtgagggaatatttcagtttcctgaagtatgacacaaatactcatatactgtcttttagagtcagtatagttggagctgttttcatttagtgctttgataatgatttacttatttttccaaatttcgtttgaattttctttcatatgattgcattgatctatgcagcatttaccagaaaagagtattcctgggatagcagaatgcataacactgagtgttaattcttgtgaaataaataagctagactgccttctctttaattagacatattttaaagtatttattatagttgtcaactagtaactcaatgaaaaagttgatgcccaagggagaaatgagaattagcttaattgctgcctttaatgtgtttttgaggaacttaaaattttctttcatgtcgctgatccatattaccaagttcaaataaaatttttataatcggattcagacccataaccaaact

SEQ ID NO: 77 - DNA, 165097 bp, Homo sapiens
agtagagacggggttttgccatggtggccaggctggtctcgaactcctgacctcaggtgatccacccgccttggcctcccaaagtgctgggattacaggggtgagccactgcacctggcccacagcaagaatttttttctgaatagcattttacgtgttaggcgtctggctgtttaggagatgaggaaactgaggccctcagttgccaaggtcacacagctggtaaacggacggagccagaatgcgagtacagctcctcctgcctccaaaggttctctgggccctgtaaaaccacgggctgcacaggaaaggcaggctatatattgttcttcccctggcccagcgccctgatccaatgcccggacacacatccacaccaagttggacgaaaaggtaagggagaaaccttccccaagagaagaagcggtaagctttggttctaaaggccctgggttgggtccgtcctttgccacttctcagctctatgcatttaggcaaatcacttatcttcttaaacctccgcatctgggcctacagggcctctatgggttttttttctatttatttatttatttattctttttttttttaactttacgttccgggatacacgtgcagaatgcgcagatttgttgcgtaggtacacatggcatctacggtttgattcagtctgaaatggcgctccaggcttcatttagaaggtgaagcactctgcaaactgcgaggccatacagagattccagaatatgattaaggccctaaccttgctaagctggattttctttatttcccaaaaagaagactaatactatccacttgtacaaccagaagggagctcacgtgtaaagcgcctcgtccccggccggcctcaagcggcgctagctctctggctggcgctggagtgtgccgcccctggcagccccgccgctgcagcggggagcctgggagagcggctctcggagtctcaggcagcaggaggagcgtgtgagctgtgggcgtccctttaagagcggctggccaggcacggcctccgcctctcagtacgcggagcgccggcggtcacctggggctcgcggagcggccagatcgcggcggagtcggcgcgcttccccgagggaaggtgggagaggggacccggacgcgaggtgccccgaagccctctcgagcgtaaccgtcccgcgcctctctgaggcggaggatgcgggagcgcatctgggcgccgccgctgctgctgctgctgccgctgctactgccgccgccactgtggggcggccccccggacagcccacgccgggagctggagctggagcccgggcctctgcagcccttcgacctgctctacgccagcggcgcggccgcctactacagcggagactacgagcgagcggtgcgcgacttggaagcggcgctgcgcagccaccggcgcctgcgggaaatccgcacgcgctgtgcccgccactgcgcggcgcgccacccgctcccgcccccgccccccggcgagggccccggcgctgagctgccccttttccgctccttgttggggcgggcgcgctgttatcgcagctgtgagacccagcgcctcgggggccccgcatcccgccaccgcgtcagcgaggatgtgcgcagcgacttccagcgcagagtgccctacaactacctgcagcgggcctacatcaaggtacccacagagcgctcctccactgcaaagcccctgcggctctcacacgctctcttgagccctccctgctgcccccgtcatctctgttcagtctttcgaattgggtctccttaaatatgtgtctcagtttgtgaatccagatatctggtggccctatctctgtatgcaacaattgattaacttggacaagtctttttctctctttctcagagccagcttctctctcaaaaagaggactgtcctgataaggtgatgtttaaagtacccattcagcactaattcatgaggcattgacaaagctgaatctagtacaatttatcttctcccttctcacttcccatttctcttctcccttctcacttcccatttctcttctcccttctcacttcccatttcttttgtctcctctctcttatccttcctatactgtagtctgcaccttttctctgaagtttaaaagaatcttcaaaatagtgaagttgaaagacctgttccaaaacaaatttctctctcttctccccttcacctacaaaaaagtaaagatcaaaggttaaagagaaggtatgcttggaggaggcgaagctgtttgaggcagtctcagtcaaagtatccaccctaagtgttgactttttctcctttgatagagggcttacgttttctggtggtatgcattggactgggttactaggcatcagtcctctctttctagttttatttttgtatgcctaacttgcctaaagttagcgtcaggaggtatagtatgcatattgacatattgttcacatccataactttgaagatctctctggatgcttcagcagagggaatttgaatgagttcttcaacctccactgccactcacccaattttccttcaaattgacactcttaacccttctttctcgttttctgtgttaatatatcaatgtatcttctacagctaccggaaaagtggaagctttggggttggttgttcatgctagccaatggaccaggctgctctgctctgctctgctctgctgtgctctgctttgctttcttttctcctctcctctcccctcctctcctctcctctcctctcccctcccctcccctcccctcccctcccctcccctctcctctcctctcttccttttcttttctttttttgacggagttttgctcttgtcacccaggctggagtgcagtggtgcaatctgggctcactgcaacctccgcctcccgggctcaaacgattctcctgcctcagcctcctgagtagctgggattacaggtgtgcaccaccatgccgggctaatttttgtgtgtgtttgtgtatttttagtagcgaaggggtttcaccatgttggccaggctggtctcgaactcctgacctcaggtgacccgtccgtctccgcctccaaaagtgctgggattataggcgtgagcacggctggaccaggctgtgtttctaaggagatgaaagtacataccatgttcaaatatccaaatgccttttgcagctcatcccacaagatctctgccctcatctgtggtagggttctctcagattggcaactgttggtggagtgcacgaaatttcaactaagtataaatcttaacttccttgtgttgtggctaaggtgttggagttcactggactagtatcttgggcaagaaatgaggagaaagtctgaatcctttccaggacttgtcttctgcttgcttgtgcctcctgattgctaaggcatgtatgaagtataactctaatttcttctaagtgatttacacaatttctggtggtcttacagaaatcagtcaacaccaggcagagaggggaccttgagtgtctgacggtgaagttatcataagctagttcccagagcagaacatgggtggtccctgtagcttggtcctcccaggagtctcggatgtaaggttagcagtcctgctgttaattctgtcacaaattttggacatattttcctttctcatatctggagaaagaatacatagtcaaggtcagtcctataaaaacaaataaccatgaggtaactctcaatatgtgggtttccctggttctggaattctgcttgcttcactgttaatgtcagcatttgtcagtcatttcccctccggttccctggttggaggtcaaagaaggtgaagccataggtttaacatacctcaaatttttgtggtgaattgattacaggaacaagtcacactctgtaagtgaattactgggtgttgtctgatgaattaatgaagtttaagaagttctttcaaagatccgtggcttcgtgtgttcatttcagttctaccagcaatatttctgagagcagaacaagtcttgcgtcttctccctacttctcttctctggcagtttcttggatctacataattgataatctcttaagaagaaaatattttatccttttggaaattcgtttttgaaagttggagtttgtgaacctctaaaactgcatcatggtttttctctccccttcacccccctcccccagcccccaagaaagccccagttttagcctttgcttggcttccttggaatttcacttatgaatacgcacacacaccatcttttgagactgaaaaaaaaaaaaaaaacctctcaaataataaaagaacatcctggagctctgacaggtctggattctagggcattgattccctgatgttaggatgaggaactccctgccatgtgactggatatggtcatggtgccctgtattgtttaattgcttttgacatcagtgatccagtttgcacttaaaaggataatcctggactagatcaaattcagtgagggaggactggaatgcttcataaagctaagaaagtacaattattctcagctaagagattttccaactatagaagctctcaggagatgttactgctcccccaaatcctgctgagtgggcctccgatgaaagcagattatttgtgctggtgtgttggaggggaagaaggatgaaaaatcatgaaatctgagacccaatgagttcaatttcttggttcacagatgaggaaagggatgtttctaaatgtttaatagaaaggtaaagaggtttgctcagtgtcacatatttagtggcataccaaatgatctgttgaaatgagcacagggctgggagtcaggagtctggattcttccaataactgattccgatagctttcctgtgcccactggcctgtaggttcacatcaggtcccagagaatgctgcataccccagggctatccttatgccagatttggacagctccagggatgagtatatccttgtcttgcagggtaacagatactcactacatctttcatgagccttgctctgttgaattttttcaaggcctggcatgttgggaatttgcctagacagctatgaggcagtagtttcacgtggctcctagccatactttttgtttaaaggcagtgtgagactcttcaaacttttgatttttatcatttaagattgttagagataacccatgattcatagcctaagacgtaatatatagcttttatcattgcattctctgctcagaaaccttcagtggacttcctcttgctaccatataaagctcaaataggttaccatagcatccacagcctggctccctctcaaccttcccagtcctatcttccccaactctgccgccttccagccaaaggtaacaatgagtgctttgtcttatgcctgacacttctgcatctcttggccttgtttagtctttcttgggaggtgtagaggctttagaatggatagatatgggattaatttttagttttcccagtctctatctgtgtgactgtcagcaaattccataagatttttcagctttagttctcccatctgcaaaatggggaaataatggggcctacgttcctattttaagttaagtttaagagatgagtgatgtaaagcacccagcatagggcctgattctcagtaaccattggagatacatttattctttttattagttaaaatagtagacctttcctcttcctcttctacatgttcaaatcataactatcctaacatataaatgcacctatttctgtgagttcttccttcactccatctacaactcccaaaagtataccatttctccattttctgaattcccacagtaacaattttgttcctcttctgtcatttttcatttttaaccttgttttggaaaaagtgataatttcgttattacttaggtgagcttcctgaaatcaagaactgtcttagtgattcttgtatctcctaaagcagaggttcccagatttggatgattactaaatggataattattattaatcatcaggggctttaaaatgtgattcaaaattacagatacaggctcagtaggtctgagttgggtgattcacaaccatcttccctccaaatacctaaaacagggggtggttcagtgtatgtttgttgaatgaataataacttggttccatgcatatgaaatgttgttgaggaagatttctgcatggtggcaggaggttttctcactttagttgtttggcttcctggctggtcagttggaagagaacgtttcaggactgttgactgcctgacttctcactattttctacttacaagttctggctaatgttgcaaactttcaccccctttcccaccccactttttcttctttagttcttattacttaaaactatacttcaaaatacccttgacatattgtacctgtttcatgcacaattctggaatttaaacaaacatgagggatacttttctttcttatctgtgtcctttataatcaggaatggtttgacagtgtctggttttttttttttttctcccacttttcccaaccatttaaaaaaaggaaaaaaaaatgctgtttatttattcatttttctactcaaaacaagcttgcccctgcttgttttgtttctgtgttgttgctttgttccatttgacctttgtttttcttcttaggattaaaaggaaggcgaaaaataaatacacaattacattaggcaattctgttttggtcctagagtcctctcttgaaacttcttgtatcttgaccataatctatttgattaggattaaaaggaaggggaaaaataaagacacaattacattagacaattctattttggtcctagagtcctcttggaacttcctttatcttgaccataatctatttgattagtggttcctaggggaaaacaaagtaaactctaggaatttcctcactcttactctgttttatcaactgctatctctttctataatgcatgccttaaaatgaaattgaaaacccagacaagtgcatcatatagatcttattagtttagaataaaaatgctttcctgaatttcatatttaaattatttttacctatttgtagaatatgtatattttatctgcaaattatttcaaatagaagattgatttcatatcttcttgaaatagctgttatgaaattgttctaatggttatttcctcaaaagatgaagcttttcccccctctctttaacaactgaacacttttttgtgcttaaaccatcaaaacttacaggtcaccatctttatgtctcactccttaggaagaaaacctgagagattgttcatctagctagattttaggtcccgtgtgctaaggaattagaatcacaattgttcctccttgggattgtcccatatctgaaagcctggtcagctccttaccagtcatctattgcccgtataagtgataagtgccacagaggcttaaaatttaattagatgaggctgggcatggtggttcaagcctgtaatcccagcactttgggaggccgaggtgggcgtatcacgaggtcaggagatcgagaccatcctggctaacacggtgaaaccccgtctctactaaaaatacaaaaagaaattaggcgggcgtggtggcaggcgcctgtagtcccagctactcgggaggctgaggcaggagaatggcgtgaacccgggaggcggagcttgcagtgagccgagatggcgccaccgcactccagcctgggcgacagagcaagactccgcctcaaaaaaaaaaaataataataataattagatgagggcagcaattgcttgcaagtattctcccatggttagtcagcttggttaatcagggattccttcctggccatttttttttttttttttttgagacggagtctcactctgtcgcccaggctggagtgtggtggcgacatctcggctcactgcaagctccgcctcccgggttcacgccattctcctgcctcagcctcccgagtagctgggactacaggcgcccgcctccacgcccggctaatttctttttgtatttttagtagagacggggtttcaccgtgttagccaggatggtctcgaactcccgacctcgtgatccgcccgcctcggcctcccaaagtgctgggattacaggcgcgagccactgcgcccggcctcctttaacaatggaaattaataaactgctgcctccctttcttcatagacctcgtctctcagaatcaaatggattctgttactaatatcatctgctcattgataaactccaaaggggtagctgtgaaattctcttggaaatgcttgataaaatgtcaacttcctcataggcgagacttgatacattttgaaaggtggataggttcacctaaatgaagacttgctggatttgatataatgactattcttttgtattgctaaggaattaagtaaactgtggatttcttagagtcacagattttatagctggaagagactccaaaagaacaccttcaagtcaactaactgctttggggcagtgacgtaaaagcaagggaggaaagggtaattattttgttcaagaaatgtaatctaacaagggtggaagtggtagttattaaaattataaaaatgctatagcttgaaagagccctcaaagatcatgaaaaaatctatccctgtcacttaacagatgatgacactggcctcacagattctacaacaaatcaagaagggaaagcaaatggagcttggcccagaataggttttctcacttccagtctcctactctttccagcctctatgtaacagtcatggctacctccttgaggggtggtctagtgaatcagtggtgcacttgagacctgcagtaaacccattgccttcagagacaaagtggacataagacacatcttcctggactgccccctccaccctgcactttcattcacatgatacataagttattcagccaagagtcacagttgtctggtggaaaatgttgcatttctcattaggaaaaataattcctcctgtcttttttttttccattcatctttcttctataattctttttctgtctttttattcatccctcctttcctgctgtctgattttctagccgagtattttccaccagaccttgtcatcatttgccaaatggcctacacatatctctaaaaaaaaaatttggtgtcagccttctgagtggcgttcctagtgttgtatgtgtgttttgctggttttagtactgaagaggactgcagactgttgttgaaagaagctatttctcttgaccacactcctttctgctctactgtactatatcgtttcctctagttatttctctgtttttccttggccctacccctgcattgtcctgttagtagtctacacaatgaaagtacatctgaaaagaagagagcagaggggaaaatggggaaagagaaaatattggtagacctaaggtcaggtttctagctgtattaaaataaaagccattgagcctttcatttaatctgataaaccgtcatagatatctactttttgatactgtttttatgtcacttaccctcatgtgtgttgtgcaagacctgggtatgggttagaggaagatgttccccaccagctctctatctttctgccactgcccgtctgccacattaatgaaacattagtactgcaaccattgcattttatggatgggaaaataaagctcaaaagagaatcgagttgatcaaagtaaatgcaatcaaatggaagatccaggattagaatccaggaacctagactccctccaagtcctatgacattgccattgaccactagttgtaagatccacactagaacagggttcctcccatcaatgagctcacatctaatatagaggatttcaaatggcgcataattataacacaagacccatggggaaaattgtcaaccataataccagttataggattatttttatcgcactccccattattccattaatgataaagtgacttaaccctagggacattaacgatttcagcaagttttacttttctctctctgagcatcttccatgaattcctgtgaatagaagtggctggatcagcttaattatttaggttccttcaggtctgtgattgtgacattgaggctgtcaagaatattgtttatggcaagaatccatgcatcaggtaaattagatgcatgggattctgtacaaaattttctgtgtctttgaaacctcataagaaagaaagagtcacattcaagtggggaataggaagaccagaaactggtttcatggaggaagtgatgtttaaaatcttttattctagaggggccaatgctagtttccagattggggttttgatacacagatgaaagctacagtgtcatttctatatatagtatattaaaatagagcccctttgactgattttttttaaaaaaggcattctttctccccaccctttaccaccctatctttctgcagctgcaccctgccacattaatggaacactagtattccaggcatcccattttacagatggaaaataaaggccaaaagagaattgagtggcccaaattttacagcactgtaagagaaggaccagggttagaatccaagaaccctgacttccattctgtgaaatggccgttgaccactatttgtaaggccccggtgaaaacacaagcttaacgaagttaaaatgaaacacacagcatgccacttgcattatatgccaaatgaaagagaccctgaaataaaagctgcaatcttcttatgcaatgttattccttgcactactgttcttcctacttctggggaaaactcagaaataagaacctgagtcaatgctgtttcccagttagcttaatgaaaatgagtgaggcaaaggatcttctttggaagggaagtagaagaataggagccagaaagagggagatccaaaacgtcagaatttctagaagtgcagggctatcagaatgatcctgctggaattcattatctacaaatattagattcagtttttgagcacataacaggaaacttctggggattgcagtttaattgtactgggaccctggaaaggaatggataaaagcaaaatatgtaataaaataaatgattacaaaacaaagaaacttctaacaaatctggaagcacaggaaatttgagccaattttgacatattcttcttgcttgaatgctaaatttgtaagtctgccaaaatcaatagatttgcacagagaaattgacacataattaagactctgggcatagagaattaccttaaaaccagatttggctgttttttaaaaatgagctcaaattatagtatcaaagactaatccagtagaccatacaaattatttctccactgaagcatgtgctattttaaaataatattttcatatgaaatccaggatcaacagtcagcatttgattcttatacatgccatttataaatgccgccagggacagagactttcacagtcaatcattgtttctataggattaccaagggctcagttaaacagtggggtttgcaggttttcaggtcaataagcatttcagtccgggtttctcagccttggctgattgatattctgggatgaataattctttgttgtggcaagctgtcctgtgcattttaggatggccagcaacattcctggcctttacctgttatatcagtagtaacacagtccactcccctccaagcagtgataacaaaaaatgtctccatatattgcaaaatgtcacttggaggtcaaaatcaccccagatagaaaaacactgatttaaacatttagccatatttaagatgactgggccaggtgcggtggttcatgtctataatcccagcactttgggaggctgaggagcgtggatcacctgaggtcaggagtccgagaccagcctggccaacatggtgaaaccccaactctactaaaaatacaagaattagccaagtgtggtggtgcatgcctgtaatcccagctactagggaggctgaggtgggagaattgcttgaacctgggagggagaggctgcagtgagctgagatcacgccactgcattccagcctaggcaatagagcgagaccctgtgtcaaaaaaaaaaaaaaaaaaaaagactgggcatcaaggttagatggttagataagtacagtttatactagattatactagaaggcagtttgcccactgatgaattataatatttattaaaaaagtttggctgcagctagatatcttttagaggagaaatctattggaaatagagcttctctcttcaagatgcaaagcacttggcttatatcccatatctggttctccatagctacagtaactcagcttatggaaaagaccagatagttttctctactgattgtcctaacatgatgagacagcttgctttaacaatacaaactaacacatcttagttgtgaatttcaaactccagaatgactatatttctcattcaccttgtaaagttctcaaacccaattatttataaataatccactgcaacctgtacgttttctttgggttagctctgtgtcacatctattcttaggaagcagcttgactgaaaacaaaaatgccaactcacagaaggctgggaagtgggggaaataagaggaggtcaggtgaaagaaaaaatattagagacagaaagaaagagaaagggagggaaggagggagccaaagactgatacagaaatagaggaagaaggatgacgagataatgaacaaaaatgaagcaaaggaaagccaaaagcaattagattgaagtctaaaggtctcaggcatgaaaagagtctcacgaaagaaaagtaggatgtttcccactctgatatctgtctcacgaaagaaaactaggatgtttcccactctgatatctatgttgtataattagtaattgggaagcagatgtttgtctttcttccactccgtattgccgtaaggccatattctattgagacacttctgccttgctgaagcccagaacagcagagttaatcagcttcttcaggaaagagaaggaagtaattcctctggctagaaattccacgtgtacaacactgaatatttaccaaatgacataattcccctctaaaaaaacaaaaacaaacgagaaagatctcaaacaaaaaatgctagctaatagttttcattaaattaaactgttttctctatcagcaatttaaaaaaatactgaggccttttagatgtaaccttcttttttaaggccctggagatatgaagatgagtaagacactcttcctatcttcaagtaagtcacagtccattgaaaaaaacaaatgtgtatatagctataatattaattaacgtaataaacagaggcactcctatgtgattatgtagtgtcaattcagagatgttttgtatcaaaaaagtgaaattaaatatgggaaagaaaaagtaaagatttacaggctgggcatagattggccacacctggcccagtcatcttaaatatggctaaatgtttaaatcagtgtttttctatctggggtgattttgacctccaagtgacattttgcaatatatggagacattttttgttatcactgcttggaggggagtggaatgtgttactactgatataacaggtaaaggccaggactgttgctggccatcctgaaatgcacagcctgtaaataatctcagtgctttgggaagctgaggtgggaggatcacttgagcccaggagtttgaggctacagtgagccatgattgcaccactgcactatagccagggtgacagagcaagaccatgtctcaaaaaagaaaaaaaaaattatggtgtgtgaaacctgccatttaaaaaatactggtaatttttaggctgggcacaatgcctcatgcctgtaatcccaacactttgggaggtagaggctggaagattgcttgagtccaggagttcaagactgcctgtgtaatataatgggaaccctgtgtctaaaaaaaaaaataagtaaaaataaaatactggtaatttttaatacttaggaaaaaaggaataaaaaacaaaaaatactattggaaacagagacagtgaaaaatttggagaattaatttaatcaatagtacaggcagttttaagaataaatttgactaatcatagtttgtaaaagaatctgtactattctgaggcttgaaagaaatgtatgtatagtaagatatgaaacaatgccttttagggaattttactaatagttataaaatccattacccaaagctaaatgtaagtgaattgtagctttaaagattttttaagtttgataagggaaatgttattttgccatttcaggttcctttgaaattctaggtgaagctcaaccttcccttttacagttctccaaattgttcaccctctttgtgtctcaatttctatctctgtgaaaagataataataaaaactgctcaactcatagggttgatgaaaggacaaaatgaggaaatatttgtgaaagtcatttatgagggataggatacataaaattaggagtgagaaaatagagaaattaaaatccttattcgtagactaaattattcacacaaaaatgctatgaaagcgcaacaagaagaaaatcttctattcacacagctgaaacacaggtcaaagaatctccctattttatcgagataacttgttgaattattttttacctcaataggtataaatgtatatccatctatcatctatctatcatccaaatatatatcaagaaagtcattaaactaataacgaaaaatgttttgtgtatgtgcaggaagaatcagactaaatactcatatagaaaaaattgtcagcctttgaagaccatcttatattatcttcttgatacattttgttttcaaaacagattttgaagaaacctgaaatagcaaaatgacatttcctttaacagacttaaaaagtcactgaaatcaaacacttgatcttagttttgaagacagttatgttctatgactatagttattagtgataacagatattattgactattactgtgtacccggtattatgctaaaagctttatgtaaattttctcatcaaattctttcaacaatcatgagatccaaactctagtatattcttcatttttcaatagggatactgaagcctgaaagattaaataatgtgtctgagattatactgctagtaagtaacagaatcagaatctgcatccagatttttctgatcacaaatcctgagttgtcatccacttctcatagcttgagttttgacatcaaacaggtatatagtcaaaaaaagttctgacatatcggttgtttgagactgtatgaaacttgtctacgtgaatcagaattttgtatcgggaaaatgacaataatcatacctattttacaaggtacttgtgagaagttaaaaaaaaaaaagattgttccttgcctcatagtttctaggcagatggtgaatttctaagggaatataaagggcaaaagaatatttaggcaaatatatcatggtaagtggagaaaataattacatctataacaggtacagaacactaggggacatataaaacaggtgcttgacccattcaatctgagtaactggcttcacgttcaacactgcgcactgtagcacagacttacctgcctctccaccatcaagataaaacaaaaatcatcctcttaatggaaattcgaggctgttcatttgctatgttaagaaatgttcttttctttcttccccattaaattctcccattctctgatttcacaatttccttgagattgtgtcctcttctttgtattttttttaaatggactctgttcaaacacattccaaatcttctctgtttcatattaatagataaaatctcttcccacagacacatcttgggaattttaaacctctttaagcctccttcctaccctgatttcttgtacccatgggagatgacttaagtttgagaatcaacaaacatttcttcatcatagacaccaaaatgaaactgctttttgtttagcagtcaggtaaatgggagagtagctcacaaaaagtagtagagggttacaagtctaggaatcaagcaatttaatctctacacccagctctgtcataaatggctttctctagtccttggggtttgcatttggactagggcagcattgggccagttacttaataagagctcttctgcatctgccagcttgagatgctaaaatactttagtggattggtacagcaagccaacagtctacctgtggaaacagaaaactgatgagattataaaataatggaatataaaatgcaatggacataaattagtttaaaagtttacaggaaaggaattacttccagtgtatctaatgctggtcctcatcttggggcagtgaatccctttaaagtaaaacttgaaaggaagttacacaaatatttaatttaatggtaatttaagaggacagaataaactaggcaatgttcaagagagacaaagaagatagataaaaggctcaaaaccatatatgagaaacagctgatatagaggatgagtaagctaatgaagaaaagacaagcaacaacaacaaaaaatctccttttgcagtttcaaaaaagattatcatttgaggcgattgttcctgatctttatggcactgaagaattgaagcactaggaccaaataacagaaattacagaaaacaagatctcggctcaaatgtgaaagactttcctcacactattctgagatctaataggaagccctagaaggtgttcaaacgtgagtcaaacaaatacctaatgtagaggttgtatttaaggtgcaagcaccagagtgatgttgaaatgaatgagatttaaaatattttccaatccaaagtctataagactccatgattttgtgaaatgaaaatttctcttgtactcacagaaaggatcattaaagtctttttcattgaaaaaggcatacagttttctagcttccttttgaattctagttaatgtattttaggccatggttgccagcctactccctataaatagttacataatgcaaaaaagaaaagaggaaaaaacagtaccaaggccctaagacacacatgccagaacacacatgcatggaatatttagcagtaataatatccacatgcatgattggcatcagtcctctgatttccgactcttgtctccatgagatgacatctgagatggatttagttgtggttacatagtaccactgggggttttaagttaaatttattacaactgatcaggacatccgtgctaggaattgaaagtaggtatgcttctctgagcgaatatatcgtgatatactaagtaaaagcaatttcatttatagaggctttgcaatcctattctgatttgcttcctgtatgtactgtccagaggccaatctttaaacctggtggtgttctacactgtagttcatttctcaaactttgatactgttaaagaaatttaaagggtattaaaatattaaatattttataataatatttaaataatccctttatccagctccctcctctttgaagttcttccctcactctctagttgggagcgggaggagtgccctgataccatcactggagtggaggggagtgggtggaagtccatgctgtctcggaccagctgacataaaggtgaattgagccgtggtttttgccccatgctgtttggctggagtaggatagatattatcactaatatttctgttctgctatgcctaatcctttgactagagagagcatgctttctaaatgatctttgaatgatgatgatgatgaatataatttggaatggatatgatttcagatctctagcagagttttgttaccaatactttaccacaaaaagctactgaaggcagggtgcagtggctcactcctgcaattccagcactttgggaagccgaggctggcagatcacttgaggtcatgagttcaagaccagcctggccaacatagtgaagtcccgtctctactaaaaatacaaaaattagccagatgtggtggcgggcacctgtaatcccagctacttgggaggctgaggcacgagaatcggttgaacctgggaggcagaggttgcagtgagccgagatcgcaccactgcaccccagcctaggtgacagagcaagacttcattgaaaaaaaaaagctactgaaaaacttttctaatgttgaataaaaatctctaagtcaactttgtcaccactactaaattaaccataagtcggtgaaccggattgtgctatagttcatgtcaagttgttgagtattctttcctacctctgctttagaagtatggaaaagtcccagtgctctttcagccttgccaccagcctgccctttcacttgtttatatgtctgtagatgagctcctctagaacactgtgatttaactcttcataaataaatacagatttgatcatcctggtccactttcccaataagatagttaacaaaggtttacctaatgtgttatttatggaaaaccaatttacacagagtttggaatagggaaaaaaagtttctaagtaatgatttcttttcctgtaacccattgtcccagattaagtctgatagtcttatgatcaatacctcctaaattccagattattgtgtgtgaatctttgacctaaacatttacatatggctgatagtactatttgagtcttgcacgtgatggaaactcatgcttgttgaatttgaattgtcagttctcctaggacataggtttgtccatatgattttacacagttatttagaaaactagcatacctcagaaatattgcaggtttggttccagaccattgcaataaagcaagcctcacaatttttattttttggtttcccagtgcatataaaatttgtgtttacattataatttagtctgttaagtatgcaataacattatgtctaaaaaacaatgtacataccttaattttaaaaaatactttattgctaaaaagtatctgagccttcagcaagatacagtctttttgctggtggacagtctttcctcagtgttggtggctgctgactgatcaggttggtggttactgtaaattggagtgactggcatttaaaacaaaaacgaaaacaaaaaaacaagaaagtttgccccattaattaactcttccttttttgaacactttctctgtagcatactgtgctgtttgatagcattttactcacagtaaacttctttccaaagtggtcaattctctcaaaccctgccactgctttatcaactaagcttatgtaatattctcaatcttttgttgtcatttcaacagtgttcactgcatcttcaccaggagtagtttccacatcaagaaaccactttttttgctcatccttaagaagcaactttttatctgttcgagttttattataagatttcagtaattaactaacatctcaggctccactttttattttagttctcttgctatttctaccacacttcagttactttctccactgaaatcttgaattcctcgaaatcatccatgagagttggaatcaacttcttccaaacttctgttaatgttgaaattttgaccttctccttatgaatcacgaatgctattaatgacatctagaatggtaaatcctttccagaaagttttcagtttactttgcccagatccaccagaggaattactatctatggcagtcataaccttacaaggtatatttcttaaataataagacttgaaaatcaaagttactcctctattacaggctgctgaatggatgttatgttagtaagcaggaaaacgacgttaatctctttgttcgcctccatcagagctcttgggtgactagaagcattgtcaattagcagtaatattttgaaatgaatcttttattctgagcagataacagtgggcttaaaatactcagtaaaccatactgtaaacagatatgatgtcatccagtctttgttattctatttatagagcaaaggcatagtagatttatcataattcttaagggccctaggatttgggggatggtaaatgaacattggcttcaagttaaagtcaccagctggattagctctaacaatagagccagtctgtcctttgaagctttaacatccggcattaacattttctctagctaagaaagtcctatgtgacatcttccaagaagatgctttatctacaatgaaaatttgttgtttagtgcagccacctttattaattactttagctagatcttccggataacttgttgcagcttccacattaacgcttgctgcgtcatcttgcactttcatgtttatgaagacggcttctttttttagacctcatgaaccaacttctgcttgcttcagactgtttttctatagcttcctcagctctctcagccttcacagaattgaggagagtttgactcttgccctgaattatgctttggtcttaaggaatgttgtggctgattcgattttctatccagaccactaaagctttctccatatcagcagtaaggctgtttcactttcttatccatgtgttcactgtagtagcacttttaatttccttcaatcgcttttttttttttttttttttttttttgcgttcatgatttggtgaactgatgcaagaaacctagcttttattctattttggcttttgacctgccttcctcagtaaacttaatcatgtttagtttttgatttaaagtgagagatatgtgactcttaacttgaacacttagagccattgtgggattattaattggcctaatttcagtgttgttgtgtctcaggggacagggaggcctgaggacagggagagagacaggtgaatggtgagttgatgaagccatcagaacacacacaacatttttctattaagtttgccatcttatatgggcatggtttgtggggcccgaaccagctgcaatagtaacatcaaagatcagttatcacagatcatcgtaacagtaatggtagctatgaaaaagtttaaaatattgtgagaattaccaaaatgtaacgttgagacatggggtgagcacatgctgttggaaaagtggcactgaaagaagtggcctgatgcaaggtcgccacaaaccttcaatttgtgaaaaacaatatctggaaagtgcaataaaatgaagcacaatcagaagcggtatgcctgtatttacatacttcaaaaacaccattttctgcacttgatcatagttttgtaaagacagacctttcatgatgataccaacttcatatgtcagtttgagaataatagcatgaaattgggtggaacattttggaaactgtattagagtgaggaatatagaaagtgtggctctagttttaattatgttactaactctgtagggctttataatagttaaccttttcttggcctcagagtcttcttttacaaaatgaggtgattgtaatatgtaatcttggaagtctctgccagcttcaatatattttaatatttggcagaatatttccactgataaaaaaatttattaaatgctactaaactatgaaactctcagcagttgttcactcctcattttaataaatcctagtatcttatcctcaataccaaaaattgtgacatttagacattaagataataagcttaggtaatataaaatattgaatacattgcagagaaaaatgaccttggcaagccttatgcaatcatagaagtgttttttttgggggggggggcggcggggggggcgggggacggagttttgctctttgtcgcccaggctggagtgcaatggcgtgatcttggctcactgcaacctctgcctccccagttcgagcaattctcctgcctcagcctcccaagtagctgggattacaagtgcccaccactgcacctggctaatttttatatttttagtagagatggaatttcaccatgttgggccggctggtctcgaactcctgacctcaggttatccacccacctcggcctcccagagtgctgggattacaggcatgagccaccatgtccagccagaagtggtattttatagcagtgtcagggttctgaagaaatattttagttttcatcactcaattctacaattagcctcagtacctcttcctcttagataaaggtattgtacctgccacacagttctgcagactccgctctgaaatggtgtaaaccagtggttaacattcaactttcttcacaattttccttattttccataatgctaaaaaagatcaagatatatattgttaataccatcttttttctatgaataaagcagtttatagattgtctttcaggtaagacttcttattagaaatgtgcttttttgctgcacaaaaaaggtcagttctgtatcattctttatttcagccaaccttggttcaacacatccatgttctgatttacacaatattgtgaattaaaccagagcaacagaatctttcttgctatgtgataaagaaacaagaagtttctgctgataaaacctttataaagatataaagctttagtgataaagaaaaaaggagttattccacactttccccctgcatatatacccgttgtccaagtgtaattcttctctcgtggtttgtccgactataaagcaatatctgttgtatctaaacatgtggtagtaattgtctttcctcattgtgtgtattgtattacattatgtgatatcctacagcgtcatttgaaaatgaagttttgccagaagtttattcttcgttccacgcataatttgttgttcatgttgaggcattttttactagcttcttggcaataatatttaatgtaagtatttttgctgcaagaagtgaaacttgacaaaatgtttttattagttaaattacttttagatctagtatttgttattattcttatatctactattaagcttcagtaaatcatgaaagaaccctttttcttaaaaaaaagcacagctatagcaaaatacagcaatggcattaaaactgcaaatgtaataaaagtaaacagcgttgtatcaacaatattaagttagcaagatcaaataaaccttgacaactaagtggtatgtgacagaaaatgcctggaagaatccaatgaagagcttgtatgaccttaagaatgtcataattattaagaatataatggaattgctaagaaaatcataattaaacttgcattttaattctgcgaaatacacctaaatcaaatcattgttaagtctgaaactgttggtggtccgtgtaataaattatgaatgatcaatgtattttgagaaacactgatctagagaaataaacgagacactattttttgatttggggcaagttactcaaagtctcttttgcctctgttttctcatccagaaaggaggggtaagtgacagtggcattgcgaggatttcattagtgaatacaagttaggcacttagaatagtaacagcttattgtaagccctagtaaataataattgttattggtgctatcattatcatttttctaatgggctatctatcatctattatcctgtctcatttatagcaactacggaaaattatgactgttgtcactttcagacctcatctcttaatttttaattttgtagcacgagattaacctattgtcatttggaacctaaactgtacacaatctgattataaaacaataagagcgattccacagatccctgcaaaagtcatacattttttggaaacttagtttctccttctgtaaaatgggggctactaatattgattatggaacacgtatgcaataaggactaaggaaagtattttgaaatgttcaagttctatacaaatgtagtgtatacaaatgtatacattttacacgactgtaatttctcatatgagaatttgcatcacctaaaattgtttcatttttaaaaaattacttttaccatattcataaaatgtttttttatttttcaccacagtaattgcttatttttactttaacaatgacaatatccatactagccataaggcttaatgtgacctaaagtatttttccaaatgctattgcgcttacataaattagacatggatagtgcagacacagagagcatatgtagggttttttggggggccttgaaaggtttaaggcctctgacctcctttaatacattccagactcatgcatgcctttatcctgcgggggtggggcgtggggatgaaagctgctgcttaaaacaacacttccagtaggaattgtttgataaggccaatggttagaatatttgcagcttcttgttttgaattcttatgataatatccactgccaaagattatgtagcaatccaacaacaataaaataattttattgtgggtaatccaacaacaataaaaattaggttttcaagtaagactttgtagatatgatacctgaggcagaaagaaagaaggggaatatgtacctgtgagggaggtctgaattggccccagagcacagtatgtgggggcctcattgtttttcatgtcataacaggtggaatcgttttgttttatttttcagtccacagtctgtttgtttgtaggtataagtcagtctcttattgacttctttattgaactatatatgaggaaccagcaacattatttctgattttcaaatatatgggaagaatcagtattggggaaatcatagcggtttttttggttgtttgtttgttttacttttagtaatgcatcacatctgtgagagtcagtacttgcatgatatgttccagcactcagtttcacattgattctccttgcttttgaatggtgagaattacagtgagaaggaagataatcacctctcatgtttgcattatgctctgaaattcatgctctgaaacttcatcacacacgtcttgccttcctcacgagagccctgtgagaaatcggaggtttaatggcttgtccattctcaagtgtggcagaactatggctcagtagagaagtttcctgactccaaggccagtgctcttgccaaaatgtcacagttgctgtctgttcagatttgaagttctttgtagacacaaagctacaaactaataaatttctctttcaaggctctcatctctcatgacgctgcttttatcttttcataaaaagatgtcttttcatgatgctgtctttatcttttctgataggtggtatttccaagctgaagagattgaaatttagcaattcaccccactctttaatatatggagaccttttggccaagttgggtgtctgtgttcattgacctatgataggcatggaagaaggtgggtgtgagaatactgtttccagccagatgctaacacaattgcatgactgaatgtgggattgcccaaaagcttttttcatctgaagtgaaagctacatgcttctctttctttcttaagcgttctgaatgtattagttcattttcacactgctatgtatgaactacctgagactgggtcatttatgaagaaaagaggtgtaattgacacaattccacaggaagcgtgaggaggcctcaggaagcttacagtcatagtgaaaggcaaatgggaagcaagcacgtgttaccgtggcaaagcaggagagagaaagtgaaggagggagtgccacacacttttaaaccactagatcttgtgagaattcactcactatcatgagaacagcaagggaggaatcagcctctgtgatcaaatcaccacccaccaagccccttctccagttcaacatgagatttgggcagggacacaaatccaaaccgtatcactgaataatattcccaattgttcattattgtacttaaaggaaatggcagttgtatgggcctaggtctatttgtcaggttcttggcgtttgtttgtattgtttgtaaacattctgtttgtgctctgtgtacacgctgatgtgcagtgttgtatttcattccctaatcagttaaaggactacatgattttcagaatccaagatagggcatcaaaagagatggtttacattacacatgggtttttgttgttgttgttgccttttatgctgtatttacttgcctttcacttgagtcgtaatgagttagaattacagcctgtttttggccgggcgcggtggctcaagcctgtaatcccagcactttgggaggccgaggtgggcgaatcacgaggtcaggagatcgagaccatcctggctaacatggtgaaaccccgtctctaccaaaaatacaaaaataattagccaggcgtggtggcgggcgcctgtagtcccagctactcgggaggctgaggcaggagaatggcgtgaacccgggaggcggagcttgcagtgagccgagatcacgccactgcactccagcctgggtgacagagcgagactccgttttaaaggaaaaaaaaaaaaaaaaggaatcacaacttgtttttgttttttaatttccctctaaattacatatcttcatggacttagctctctcttattgttgctcactgtggaacccaagagaaatttgaaattaaattctccttgtaaacttttggatgaggtttttttggtttgcttacattgcagaattgtaagcaaaatgttgaacattgtataactcttcttggtgtagatataggttcattgcttaacattttgaggtgataatccatatatatatatatatatatatatatatatatatatatatatatatgttttgagacaatttgtctttgagacatgagtcagcttcaagttcctgtgtataggtgtgtaaatttgggttagatatttaatgtctgtaagactcggttttgtcatctgtaaaatgaacataataataagtctcagttttcatgtctgtacaatgagcaacttctaaaagtgttataataattaaataagctaatacatataaaattcttagatatgcctgtcaaaacctaagaataaagcacatgttcacttttctgtgaaaactaatggaacttactttgggaaatactggctctattcttttactaagttttcaaacttgtgatattgattatatttggcctgactgtggcagaattgtctcgatacaatgacataatcatggatgatcagtcaaaaaatctgaataattgttctagtcattccttttctagctgcctgactttggaccagtcatttacacctctgagtcttgtttcttttgtcttctagtgaagaaaagtggtcctcttcctttacaggatgaacagaaggatgtttctctgtattggctgtgttaggtgttttgcggattacaaagtactatatatgtctttttattatctcagttttatcacttcctgttttgggttgggcagaatgtcagagagacccagtaccccactgttgttgctgtattgtactcaggacatcaaggctatgagcttgagtcagcctttccaaggccaccattgtcccaatggttatggagctgtgcctgggttctgtggaacctgtagggaaaatgtgaatcagtgggctgttttacttggctgctaaatttggttcactgtttcataaatcagaacaagtctgtctagaatggttctggttgccatcagcaaccagggtcatagaattcaaggacatcagatatgtaagagaaatggaaaataacttttcaaaggaatgccttctgcaagaatcccgaggctagttgaaatactaaagaaagctaaatagaaactataacttcaagcttggaatttcctgcttgttacttggatgttgtcatgaggacttggtccaagattttgctttcctgggtggaagaaatagtgtcagtattggattactgattagtgtctttgcaatgtacagagctccatagttccagtcagtagagcagatgttaattttccagagaaacacattctcgattctggttttacagtgtatcagattgtcacctattgctctatatcaatgtttgtggaattcttaaaattaatcaaaattattttagttcatgctagctacatagcaccacttttttattcttgggagccaagttgataatgggaaaaggatgtgaaatttttatcatgtaaaatgaaaactaaatgacttcatgagaatttttcagtgagccatttaaacttatagcgtataatcttcaattttaatgaaattttcattaatgattaatgtggtgaatttttctaaaacttaccaaaaaagccaccagcatattaattattttcagtgtatctactgcaaatcattttgacaacaatgttaaaccaaacccaaaacaaagcaaacaaacactgtaaatagtagcaatcactttttttcttccactcagtcacattttcagcagtgccatctactctctctcttctccatcctggacacctttgatgacttcagtttctgaagatgacttgtggttcatcacgatccttcctttttatccactctccagctaccaatgcctgtgagttcaacaaccgtgaggacactgccttaataattttcctttaattttctcagatttctttatctgatttcaccctttctagctatccagcagaactttcctctatggccttcgttcctctttccctttctctccagaccaacccccaactcatggccaacctctttagctagtcacgtgtatagaagggtagggccatttgcattgcaataaggattgatgatcattcttttcctcaactgtctgtcttgtcaagctttacagcactccaccactgttcactgagcactgcagacaaatgacacagagctatgtctctgccgtctactatgtattcgcactgcatgatcacaactaaggttttagagttgtttatcaattttctattatcgttgcttagtattatttcttagaattgatgtcagaattatttctacttctcaaactgtgtcccttcattcttttcatgattttatctcccacactactaaggaaagctctaataaagggaggaattttgggtggtgaattggagtaggagaagagagatcacatgtatgagacactaagcaggtgaaattaataggtgtttgtatcatttttgggggggattagaaagtaaaggaaggggatcagaattgactcggagatttaaagcctgggtgattgatggattgtggttctatgagcaaaaacaagaactacaggagcggatgtagaataggaaggaaggatattattttcctttgccccttcttttcctctttgtctttttaaaagtctcattatctttgcttaattgccttaaataaaatataaaaatttactgcttgaaatgaatgagctttcaaaataaaagggcacataccagtaagactgaaaagagttcagatcccagcttcccgaaagaataatcctcttaataaggcagctgtaagctctctaatgctggataactagaacagcactctgcctttggaaaaatgccataagtcccttgcacttttccttatttttaaagatagccatgtaagcaagatgtagctcctaatgagagtattttctagacttcgttccttgccttaagcactagctattttgctaagcaactgtcttcttggagggttttgctttttagcaaaccaaagattgacaaagttggtgaggaagtgactcatggcattggggttattttagtataaactacttgccctgagtacatggcccttttatactatttcagctgaagtatttctcctttgatagaaatatagagttgctaagaccaactggatttttttttttttttgacggagtctcgttccatcgcccaggctggagtacagtggtgcaatctcagctcactgcaatctctgcctcctgggatcaagccattctcctacctcagcctctcaagtagctgggactacaggtgtccaccaccatgtccgggtaatttttgtatttttagtggagacggggtttcaccatgttgaccaggctgatctcaaactcctgacctcaggtgatccacccacctcggcctcccaaagtgctgggattataggcgtgagccactgcgcatggctggaaaacatttttacatgtaagacatggccccacttatttaatgcacatcagtaaaacctagttccacgttgttcctattctaatacatcaggttatgctctctcttccctttctttaatatctcagcctctttgcatgtaacatttcctacttcacagagaatgtcaaaacaaaacaaaagaaacaaatatggcatctccaacatctctttgctttcacactgtcagaatactgttttcctctgccagcctatgtactctttaaaaagcctcatttgccatcattcttttcagaattatcaggtactctatttgttaaggatctggcttgtgccatctttcctttgaaacttatattgattggtatttataaagaaaactttctagtacaatatatataagcaaatagccatttacagacattaagatgtaatcacctgtcctaaattgatattgtagtaacacttcctttcttttcttagtaataatgggaaataggggcatcctattatatcatttcattaactatgaattatgcagaagtgtaaagttgagagtgtatagtcattaaaagaagttactgttaaggtaacaaatgtgtccacttcgtgtttccatatggcaatcatgactcttagaaccacttccatcaatctgaatgctttatatcagaccagaaagcatttagcaaatttgagcttaatgctgtaccttggtaaacacaatccagaagctaaaatggtctccacaaatccaaatcaatactaaaagccaacacataatttttggattacttggcttttgattttttgtggctgaaattcctcttcacttgcacaataaaaaactagctttgatatttattttatttatagaacaaacattatattccaaataagactgaatacctgtgttggcaggtagaaagaagcacagtcataccttatttgttcatagttttgagagatggcaggcggaataaaaaaataatacatgagaaggctatgatagtattgatgagggagtaggtaactgagtgaatgaaggaaacttctgtgagaaattgacactgaagttacgtcttgcaaaggagtaaaacattccacacagaggaaatggggtggggctctccaagaaaaaggaataatgtgtataaagacttggtagtgttcaagtgcctggtgaagaattctactaggtttacagtttgttttctaaggtaataggtggtaaattttttttttttttgagtcagagtcttgctctgtcacccaggctggagtgcagtggcacaatctgggctcactgcaagctccgcctcccagcttcacaccattctcctgcctcagcctcccgagtagctgggactacaggtgcccgccaccatgcccagctaattttttgtatttttagtagagacggggtttcaccatgttagccaggatgatctcgatctcctgacctcgtgatccacccgcctcagcctcccaaagtgctgggattacaggcgtgagccaccgtgcgcggccaataggtggtaaatattttttgagtctaaaatatgctcagtgagaactgtgaaaaatatgtccataaaatgtttatttacctttctgtacagattaatattttgttttcagtaagcattttactcagcatattttttagtgcctttgatccggtatactccacaaggaaaaggagaaatggaaaaaaataaaaacgaatgatatcttctaaagaaatttccaatctatttggggatgtagccatgtttatttagttaagaagcatgtttgacctgatgcataatgagaaatggaaagggtctgttggggcacagaggaaggagcaattctgaaggctggcaggcaaagcccaaataaatctacctacagagaagattcattgacttcggtctttgtgcttcatgacacagacaccaaaccacaagttctttacctcactgaccactgagactctgccagacccaggaagcctccccaacaaacgtccccattcatcatttcttcaccctgtgactaaaatgtgatgtggtgtcaggcattactagctaaatatgggatcaaaaaccccaattgcaccacggtggtagccttgtggtatgcaagtctttttaaacaggccccacagattggacacccatcttgtcctacccatattattatgactccatgggtttggaaagtccggcatgacaaccagcacttgtttccaagtttctgacatacttgccctcccatgtctcagatgcccatgacttattcctataaatgctacatccctttactgacaaaatacagaaagaggggaggtggagaatgaggcataaggtatgtgtgaccaccctctagagtcaggacagaacatccgtccagtcctcctgttgggagggcgggaacagaaggtcacaaggaaggagacattaaggtgttttttaatgagctagtctctggacatgtatgcccatcctctgttgcccttgtttcaaacaactactttggaatttttggtgaaatttcaacatctgatttaacaatgaattttctttctctttttttattatactttaagttgtagcgtacatgtgcacaacgtgcaggtttgttacatatgtatacatgtgctatgttggtgtgctgcacccattaactcgtcatttacattaggtgtatctcctaatgctatccctccccgcttcccccgccccacgacaggccccggtgtgtgatgttcctcactctgtgtccaagtgttctcattaacaatgaattttcaacatctgattcactcatttggaaacttccttagtcacttggcatgaatgctggccctaggagataagataaagggctagagaatatggtgtcagtgtggagctcccaatatctgcctggggacaccacgggggccatggcgaagacttctgacaaaactgggtctatttcttgttccctctggttttcacacactttaagtacttagggtggtgtaagtgtgggagagttaaagtgtgctataggtaggggtcgaacacgctatattccaaaggtagagggagtttggtcatttatgaacatctgcaggtattgcaggaactgttttcaaggctgtagtatatataaaaatgctacataaaatttttcattttaatcagaattaatctcattaagtttcttacttttttaaaaaatgagaaaatcaagtacaagggtcattcttttcaatctttgacattctcacaagcccgtaactattattctgggaagaaaaacctatacccatttgccctccttctgatctggtctctgttaatgttctattaattttgaccctaataattcagttatcaagtaccatccaagagcagaatatgataacagagtcaaattttatccttcccttcccaattatgactaattttggtaacaacctaaatacaagagagatctatgtgttttctttatacatcagtgtagtgaaagggaacacaggcttaccttgtttgcatttaccactttccaaattaacaaagaaatatagaatcattgagcttaatgaataacctgccttctctccctagacatctaagaatgtgtccagttaaggtttttcacttaatattgccaagggaattatcccatagcatgcttatccagatgtattgtacataataatattctgaggaaataatattttagggatttagtttttttaaatgatgtgttcattttaagaacctaagaaagaactcctttaaaaatggctttaaatttttttattatcatcaatgagactttagatctattgaaataaagattatttccatgtgtttcatatgaaattttatgtttggtctctgttgcgcttaccttgagtaaagccaaattgaaaactagcacattaagttttgataagaaaacttgcacaacagaactcgtgttgagagggcagaaagtaatcactttcaggaacttgttgaacacttggaccaattcctttatttccaatatttgttaatgtgtgatatataataaggcatctttgagatcatttagctgtgaaaacacagatgatcaggtctgcttttaacttacagtaagccagaacaatttttgttttgaagtcttccttcttccacttttgcttactttttcccactcctctcctaccctctcctacccaagaatcattaccagaaacaaaactaacaaaaacccacaaaaattgggatcattatggaattttatagatctgaatttagaaatactgatcgtattcaaatactgacttcccataatgcatttagatatttaagttataaagaagagccaaataaatggatgacattgccttttcttgatggttttttttttttttttttttgagatgtagtcttgctctgtcgcccaggctggagtgcagtggtgtgatctcggctcactgcaagctccgcctcccaggttcacgccattctcctgcctcagccttcggagtagctgggactacaggcgcccgccaccacacccagctaatttcttttttttttgtatttttagtagagatggggtttcactctgttagccaggatggtctcgatctcctgaccttgtgatttgccctcctcggcctcccaaagtgctgggattacaggcgtgagccaccgcacccggcctcttgatggtattttattaaagcagatgatacagatgtataaacagcagtgatagaatttgaaaagtatttttatagagttaaattcggtgtggtataaaatatgcagagtaagaatttgttctacctggtagtatttgtaaggctaatttaatttagtctagggagatgaataggagttcgctggattttcaaagtggagaaaatagcatggattttcataaagggattgtagacttaattactactgctcttatgtgtaaataagttaaagcttatgctccacatcagatcaagtcttcctctcaagttcccatcttaggctgggctatggagaagaattttaaattgccaatctgtccccttctggttttgtttgtttaaatggtgcaatcttttggggaaaatacttggtctttcagatttcttctctcttctcaatgcccctttccaacacaatgcctggatatttgagaggctttgtgtgacttcttggtagcagagagtatggttctttcagatcttcatggagtcccctggatgctggtctggttgagtccctgggctagcactaactgaggtatggtgtgtcccacttgacctttaagggagaatttggattcatgatttccctagtcctaaccatttgtgaaattgagaaatctgtatgctgaaactctaacacagaacctcacgcctatgcacatccatgatctaatcaattctgaggcttcttctgcacaagcaggagttctgattcttactcagctatatgcagggtaaggaatccagcagaactgctgcaggttgggaattagagagatgagctgggcatctggaggtcagcaactacccccgggaaacactcagagaagcagacacctcatgctgtggcactctcttttgtaagtatctgtttctttctacagaggtttcactctgagctgtcaatctttgttatgcagttagagggtattcagtgatagcccttaagagactccaagtgagagacagtgaggttctaaaataggttctaaaataggatagtggctttggggaataaaaaaagacagtgagtcccagatgtattaggaagattagaatcaaacagatttagtttgaattttggggatgagtagatgacctcaacatttgttgcttgggtcatggggtagctaatgataccatcaagcaaagtaatgggtttgggggagaatttactgagggcagttttggtaatgaagaataatctttatttaaatcttttagtaaattttgctgcacccaatggaatattcccatctctctttacctgtccagtgaaatgtgttactgtaaaaattcaagaattagaccattacatactattaattttgtaaaattactagggatatatacaaggatgggtttttaggtttgagacccaactaaggtaaagagaatattatcaacaaagtaaaataatgccatgattttttgatctatattaatgaatagagggataattaataaatatattaaatatgccaataactcaaaagtcacttttgtacataaatattagtattttctgtctctaggttttctaatctgtctcaaacaaagggttagaagtagttgttattgagcaatgaaaaataagctacaaaagggaaaactgtgtagtcagttccagtaggaacaacaattttaaagagttatttatttacaaggaaggagcatattaatcgatcagactgtgtggagctgcaaatgcttagataatttgtgcaagcacatgtcaagcaattgggaaatcgatccttttcctgctttggcaacatttctattctccattcagaagtttatatatttaatcacatgtatccagagacttttaattaggggtaagctacctttgagtatgtctgtatcaataaacagaaatgtcataattttgaccttcttagttaacatcacacttacactaaaaattcagtaaaaacagcagacatcaccaatggctgcgtcattaatgttgtgccaacaaacaacattgggttctagctccttcttctttctctgatttattatgcccccaagcaaaagtcatgatttttctctgtgctttggttgagaaattctcatcccacagatgagaatttcaccagaagcaacacgagaataattcaacgtctgctccccaagcaaagaaccttaggcccaggcagcacatcccctgtaattctgtatttgagatgaacaccatcttaaatttttatctgaaagctttatagttagttttctttctttcttttttttttttgtttgtttctcttagctctcgacaaaaactgggtaaaaggaattacccttaggtacagagctatgaactatgtacatactatcttacaccagaaaacacctactgagcgaggtattaagtctgttccacaggttgtagagactgtggctaaaacaaaacctcagttcagaaaagttgtactaaggtctgtgttaaccctaaacttgtatactttgcattgtttcatattacttcattataggagaaataaagaaatggaataaaggcatttcgcagagttggtttatttttatacaataatattttattcttcattaatattgataagattttaaaaatgcaaaaaccacttgccagagtaacaatttcagattcagcacctgtgattattaatttattattaagtctgcagcatcacagcttttacaatatccacacctaccttttaaatgtgcgtttaggtcttggaagtaacgtgagctaagactaaaggtatgtcttctggccaagagatggagaaaattaatacaactttctgaagaaaataagatacaaaataatgctattagtgtgctacttaaaattatggcaaaagtttgtgaaatcatcagattaattgtcatccttattttcttctttagcggagaccatttatttatgtcatcctcctattctgaaggttgttagctgcaaacatgttgaagaggttttggcatagtgtaaaggaagtgaatggtgagaaattattcgggaaattcttgctctatatgcaatatacataatcagctcatttgagtcctaacttgatgtgtagattcaggtcctttctcggctttttaatagctgcttgaccttggctaagtcactgagggaatatgccaccatttaaatcatcttcttactgagaatccaagttgctataagaaatatcttttgatttgatgacttttttaaaaaacataatgagaatggagtacattaggtacttagactcttaacctagaagaatgttattaaaatgaaaacatccacgtacccttttaaaaatccagccaagcttgtggttattgttcgttcacttttaaacaaacattactctgtcagacacaactacagcccccatgggagccaccagggagggttctgttgtctcatgtagccgagagtggctctcaggtccagttggcaaaagggagagaaaaaaggtttgatgttaatctgaaatgtctctgagaggccatacatgatttgagaatggattaaatatcaatgggtgactaggggattcttatactcagttaattttagaaagaacttttatttagagctgcctttatgcctgtgatggggcgggatacaccacaattacacattttcagaagggtggatcctttgatgacagatgtaatttctacccccttatttctccccagttaaaagattgccagttaaaaatcctttgaaaatggtttgatccttttcatacatgcaaatttttttccagtctttaggaaatttatataggctgtagtttttagccaaaaagcacacaccaggagttgagtcttttccttatccaaaatagaaagggtgtggattttccttctttgatgtggataaggcacaacttcttctctaacacttctgatggctgtggtgtttcctctttgttagaaatccactgtgaacatcccatcccttctgcaggtctttcccgtaaaataagatgttttgcatttttcagaccatatgtcttcttggtaagttaggctaaagaggcaaaaaaggcaagttattttcatgattgtgttttcaagactttagaaaattaattttatcataagagaaagacctggacaccattatgagctgcttggttgtgagaatttgatgaccttaggtaaatgcagataagctgcatgatcctctgcattatgggatcctgattatgtgtacatatttattcacctaatcttggagtattatgttcctttgtcaaatcatgagtatgatataattttatttttgtttataaatataggtatacaatctctctaaagtgattcttcattttcttttactgttcatattaatggtaaacacaaggtaattatattcttcccacttgattaagtaacaagaagaaaacattaaaaaaaacccacctctgttgtctacagcattggctctcaatactctatgcaaagcattctgctaagctcatcaccttcacaaattcatttattcctgttaagaatcctaaggttgaaaatacagttcaataaagggaataaatttcagtattcaatagtatggtagggagactatagttagtaataatgtattgtatatttcagtgtagctagaagagaggaatggtagtgttcctagcacaaataacagataaatgtttgagttggaggctatcccaattaccctgacttgattgttctaccttgtacatatatcaaaatatcatatgtaccttcaaactatgtacaactatgatatatcaatttaaaacaagaatctttgggtgggcattattattagtctttttttatagatgaggaaaccaagactaccttgtatgttttcacacaagtagaaggcaaactcaggacttgcatccaggttcgcctcaagctaaggtcaatgtttgttgttttgttgttgtttgttttgttttgtttttgaggcagaatgttgttctgtcactcaggctggagtgcagaggcgtgatctcagctcactgcaacttccgtctaccgggttcaggtgattctcctgcctcagcctcctgagtagctgggattacagacactcaccaccaagcccagctaatttttatatctttagtagagatgcagtttcaccctgttagccagactggtcacgaaaactcctgatctcaagtgatctgcccactttggcctcctaaagtgctaggattacaggcgtgacccattgtgcccggccacaagctaaggccattgttttaaccatgtttagcatgtacagctgaatgccttaagtttgatgtctcagaaagccttagctgttcagcacatttttatacttcataaattataattttgccaaaatgagtggctgggtatcatcctacagccccagccctatgattgactcttcaacttgtctgcatttcatattataacttagtttgtattctaaaatagaagtggttgaattcatcattcaagggttttgaggaagttaatgcatgcaaaacagtaatatgcagggctagcatggaaacaatgctggcatctgtctcttagtgcctctcctccagactggaacggtagtcacttgtcactagtcactttgtctctcaggcctgaagaggagaaagtggcgacactagatggtagtacacttttagaaatcagactcattttcttgaaacaatttgaaggccctttctcttttttccaaatcattcttttttctttccatttatattcattttattattgtaaagatacactacatacatacaattcaatttggaaagcctttttaaaaataatccacttactttagggttgatggtaacatgaagctaccttgtttttgcccttaattatataccaaagtaagaaaaataattcagataagaaagtcttaaagacttctatctctttaagtgcctcatactataatctctattttatttctaggcttccatgtgtcaaactaccttgcctacacaaacgaaccataataataaatatcacagaacacataaaatctttagagtttacagattgatacatattcataattttatttgataatttctttagttctatgtaaaagacaggaatacttctgctttttctattatacagttggagacactaacaaagagaagagccaagggtttgctcagagtatctgtaagcgttagatattctgagtgtgactatcagccagagctgttcacataaacatggtaatctaagctctgaacttctttggaagtaaattattgtctgtgacagaaagaaagagcagcatatttctttttatttaattatgaggttctggagggtttctgtgaattcaagagatgggaaagtcattatttttatttcattctctttcatgtctccactacagatgttgccatatgtttttcttttgtttgttatgtttttatggtttgcctctcaaatttacagacaccatctacagttggggttagaaaaaatgctcaaatctcagctgggcgcggtggctcacacctgtaatcccagcactttgggaggccgaggcaggaggatcacctgaggtcgggagttcgagactagcctgaccaacatggaaaaaccctgtctttactaaaaatacaaaaaattaactgggcgtggtgttgcatgcctgtaatcccagctactcgggaggctgaagcaggagaatcacttgcacctgggaggcagaggttgcggtgagccaaggtcacgacattgcactccaccagcctggccaacaagagcaaaattctgtctcaaaaaaaaggaaaagaaaaagaaaaaagcactcaaatttaattctctcccggctatgccaacatgatcagatgttgtgtggccaaaactcttactatggcactcaaggtccttcatacactaaagcctggcttactctgtagcctcagtgccctctgctatgcccgtatcttgttatccaactccaatcaaatactgggtttgcctcaatgcatcatgctcacacatgtgtctgtgatttttgtctatgctcttccttttatctgtcaggcccttatgccacctctgaactgattttcaagattctacggttactttccttacccatttatgactttgaattgtcacactaattttttatgcctctacttaataagggaaatatataacttgccttttcctactctattataataacaatgattcattgagtagttttattgtacaagcactgtcctaatgacttttcatatattatgttatttaaatgatgtatcacaaatctctgaaattgccattaatactctcctgtccccttttatggatgagaaaactgggcactgacaggttaactgcctaggtcacagttagtaaatgatagccagtatttaaagtcagttctatctgctttgaggtaaaggttctcaccactgtaatatacagcttgaaatcagtgaattaagaagggggaggttcaatggctaatgcattcctgtgtaacagttgctagccccaggtgtggtggtgttaggtactctgttgagaaggtggaaagggtgatgcacactgggcagtgtctctgtgttttgggacattagtggactttcaattcataaatatcaggtattaagaaaataaggtttcatgagcttttggcatatatctaaaatgattctgccaaatcataacctactactagtaaaatttaaattgatgtatcattcatctgtgcttacatatactaactcaattctcacaatacttctttgtggtaggtactattatgtccccagctttacagataaggattatttatttatttatttatttatttatttatttatttatttattttttgagacagagtcttgctttgtcacccaggctggtgcagcggcgtgatctcagctcactgccacctccacctcctgggttcaagtgattctcctgcctcagcctcctgagtagctgggattataggaatgcaccaccctgcccagctaatttttatatttttagtagagacagggtttcaccatgttggccaggctggtcttgaactcctgaccttaggtggcccacctgcctcagcttcccaaagggctggaattacaggtgtgagccaccacacctggctcaaatatggattattaagtcatagaatgttgatgtcagaggttacatagccagcaagtgactgagctaggattggagcatgtggactccagagtctatgctgtcaaccactgtgcatacagtctcgtgtaaacagtcctttcaccctcctgcacttcccaagggagctgtctgaccactcttccacccttaactaagaacattagggcatccacacggatttctttgctacttccctggaagaacaaagtcttcatgggaaggaagagaatgatgatcctataaagaataaataaaaaacaaataaaaagtttgggtatacagttagagctcagggaactgagcctattttttcttacctatgagattatgagtgaggataataacactacatttctgtgtccttttccagtttgtgaatatatatgccattgggtcatagtatgtctcccttgtctcatggggctattatagctcgttggtctcctttgcttgattagaagtttcctcatacacaattccctctaatcagttgcctttagtaggtggtaatgagtgatggttgaaattgataatagtagaagataaaacaacagatttcatttattgaaatcctattaagtactaaatgattgacatatactttcttgtttaatagtaacctgtaagttttaattaaattcatcataaatgcagtaaaaactgctaaaatgaccaatttcatagccctgactattgaatttgtcccatcttccaacaaatgtttatcaagtgactatcaaatgctaggcactgtcctaagcactgaagatacaataagtaaaaaataatacaaacagacataatttttggattagtggagcttacagtccagggactttgagtgctaaataagtctcactccctcaacttatctacttacaaattttagttctactccattagcccttgagaaaggggatggagaggatttggagtcgctacccatcaatactttcatctcttgaactatgttgaaagcaataggaagggcccttgatttatttgccttgggccagttggagcagttttgggtcatgcaacaattattcaatttaatgatatgttgctatccctggtcttatatgcctcatcagttgcaatcattactctctatgggtcccaggaaggctctggtacaagttgaaatttggatgattaaagagaataaattccattcatatcttgataagagctttgttcttaagtgagtagtgactttttcacaggcttgcgtagttgcatctcttcctaaatacatgtctaaaaacatttcctctgcttataatgtaataactgtattaatctgtatagccattattgttacaaaacctttcatccttcattgtatcttttgagtctcacaatgacactttgaattgagtatttatcatctcccttctacatgatgaggtaaccaaagaggcactgggacttgtctgatttcttcaatagacaagaacaattctatgcttgttgtactagatagtattcccatctccaggacagatttcaggccattcttttgctggtttgtgtgtgtgtccatgtgcatacaaatgtttgtgtgtaaaaaagagaaagaaggagagaaagggaggtggagacctaggaaggaagaaaataagttcaatttcaactgattttccaggtctgactttagacatcagacccctttgattacagggaaggtttttggtttgtctggactgaagacaagagcacagccatgaaaaagaaccaattgctacagatgactaggcagagaaaatgttcagtgttgctaggagaccaggtctgctgtcaggctcaggaatgagaacatgtcggatggagggcactgggctggaatttgtgtttgacataaactattgaatcatgcatgccagtaggattaagtcagaatcaactgaagctaaaaacagtcaggaaagtttttctacctctttttggtttttcccttaaattttttttcttttcagttacaaatgcctaatgaaaggctcagcagtagataggtgatgcttaaaagtttttagtaacaccctgaggcagatggtactgtgtgtaaaccagcatttagaatgaaaaaccctttcctccaaaagactaagctggaggagttttaacttgcttgtcatcagagttactttgaggtagtcaaaattattgataaaatgaatcatcattactgagttagagtctagactttttgcagtgtttataagagaaggctgtggtgtgtccttacctggacttggaagaactcattactaatccctgtttccaccaagcagccatgtgggcttggacatgtcatctttctctaggagtctcccttttctcagatgagtgaggctagaattgtgggttataataccttataaaatattcagctttatttggttctgggaccacaggcaaatgtcaataacccagatctgcttatattaattctaaagcacatggatgctgggatcacaagatagacctagggaggtggatatgtgaatgagtgagcaggcattctcactttgctgcagctgtagtaatagctgcctcatctttcccatctttccatgattaaggtagcctggcactgtactgaagaattgcccagtgttccatttcctagagccagcaaagaacttcagggaatgttctggcttttgatagtttttggtcaaacacattctcttttttgtcaagtttccaggaagcagggagcacttggccctgaaaatccagagtgtgctcctgccaaagcacataaatatctcaaaattaaggacacttgtgtttaattgtttctgtgtgtgtgtatgtgtgtgtgtgtgtgcatgtgtgtttggtggtttttttttttcatatcttaatatggctggaaatcaccactgctgacattgaaggttcagcccaggagaaacaagcccaaatttgtccaatatatgaactaaatagacgaaatgaaatctgcccaattcaggtctaagagtgaccatttgtgttaccatgaggagtacaagacaaagccatgctcaaatttcctggaggagttttctgaaaggtagttgatacatctgcagaaaaaagtgttagttgtgggaagttaatacatttctaatgtaaaaattcaatcacattattcctctaaaatacaacctgtagtgagtcctctgtagacacagatgtgactgtcttcatctgaaaatcaaggctttcaagatctgacccgacctatctttcaacctgatctcctattaatccttttcaggtaccctaagtacataccaaatgtctcttccacttctctctttcttgatgtttctccctcttaatctccacatgtccaaatcccacctttgttttcaaggcacttctccagtgccatatattttgggaagctttccctaattcctgtagtttaccaggaagatttcccttctcagaaatcacatgagattttatgtgtatctgtcttggtgcactttttctttttgcttttcttttctttctttttttcttttttttttttgagacggagtttccctcttgttgcccaggctggagtgcaatggtgcaatcttgactcactgtaacctccacctcccaggttcaagtggttctcctacctcagcctcccgagtagctgggattacatgtgcccaccacactcaactaatttttttgtatttttagtagagacaaggtttcaccatgttgggcaggctggtctcgaactcctgatctcaggtgatccacccgccttggcctcccaaagtgctgggattcctggcatgagccactgtgcccagctgcacttattcttttctactttgcatgacagttattagtttcatatcctagccttttcttcactactagactatgaactccttgagaacaggatctctgtcagttttgcctctgtattggccatagcatcactctcattatatgctaaaaggtgtgagtggagtggatgaatgatagctgagggaggtgctgttggtcagatgttcttcagggagaattgagagtagcacagtgcaaagttagagagcaaatcccctctgactaagagaagaagtttcaaaaagaagtgatcgtagactgaactgtacacattgaccatgtatttgattgattatctgtgtatattttcttctctcgtgctttcaggtctttcttaattttatttttataatctattaaagagaacttagaggatgcataaggaagtgagagaaaagacataaagcaaattgttgaaaatcaaaagacagattggttaagaagatgttcaatttacattcagttgtacatgcaccctccatctctttttagtttttcccctctggttataatgagatggaactgggtctgtaataaatctaggaattacattgtgttatgataaattaggtgatatctttttttttacagtgatgcttttggtgtgaaattgtacctttagaatcatagtattttactttattttatttattttgagacagagtctcgctctgtcactcaggctggggtacagtggtgcgatcttggctcactacaacctccgcctcctgggttcaagtgattctcctgcctcagcttctggagtagcttggattacaggtgcatgccactgtacccggctaattttttgtatttttaatagagaccaggtttcgtcatgttggccaggcaggtctcgaactcctgacctcaagtgatccattcacctcgacctcccgaagtgctgggattacaggcatgagccaccgcacctggccaagaatcatagtattctagatttaaattcacaatttttggaataaatgggatctcaagattaagttatccaatcacactttactaatccagaaactgaaacaccacaagatcaaataatttagagtcatatagcttgtacatgaaggctcaaaggtaaaatccaagtgtcctaacttacagtttaagtgtcctgtcttttactgatacgagagtatttcttaatctaatgacaaatgatattctgcatgatgtgcttcaatagctgatccttcctcaaaaaagtgaactgtcccctaaagcgttatttgttaagttttgtttatcactttaaaaattcaggcaaagttcacacagctgcagacataattctccaaacagccttatttgtagctcatttgaggtatggccttggcacaaaaagagcaaaagtccttgattgcagttgaatcatttccattattgcaagcatctcttcttttaaaagcatacatttattggatgtatatataccactggctttgaaatgaaactcagtttgccgtaactgagccttagaaattctggccctactatttacactcagcctatgatccttgaccacactgcagtttctgggcacactgctgtcagcgaccttcaatcatgcccaccagagctgctgtggcagccacagttcccaggccaaatgacaggatgtactctaggccttggtggttaatgaccctcttaccatctatgctcaagcatgcctgtaactgattagctcagaatcgcccggaagctgaaaacaagcagattgtttatggctcattttgaggaagagggcttttatcagggctgcgtggcaatggaatgatactcaaggatcacagcacttcttatctgtggaactgaagaaatgggatgagaggttggaaatgacctcttgggtttcctgccagctttgctgtgaatctaggaaataacaggctggagttacttgtaatctttttaattgaagtataacagacacacagaaaagcacattgattagaaatcacaaggtgagcatccatttaatgaagactaaaattccaaattaggtgtatctgttctttagtgccaaattctgataataaatattttcaccacattgatcacaaactactgtttctattacctcttttataccacgtgactttgtgatttttaaagtgatatgaatgcagttaaaatggtacaggagatatgatactctgataccagactgttacaatagtgatttaagaatgatatttactttctctggaataatttatgttcatggtagataatttgcaaaatatagagaagcaaagtatagataacaaatctcagaaatcagtattcaacatcatcatccagaactaatcatggataacattttccagtataacatttgaaatgcacatatgccacatgtacatataaatttaaacagttgtttgaattatattgtgcatgttgtttagtaacttttattaattaaaaaataaaatgatacttacaaaatttttgaatagctgtagtataactgttatatgagcatattggcatctatttaataaatactgatttttagttatttgtgtgcagttttgcactaataaatattgcttgatggtcactgttgtatctgaatattagttttttaaaatttttaagtacatccttagaagtagaattgctggattaaatagcaaacacactttaatatatttgatatatattgctaaatcatcctttagaaagttggtaccacttaatactctaattcaacatcagtggacgagattgtctgattcctagagccactgccaatgctctaaattatactttaaataaaagagacttaaagtttaatggattaaaacttcatcttgaccgggcatggtggctcatgcctgtaattccagtactttgggaggccgaggtgggcagatcacctaaggtcaggagttcaagaccagcctggccaacatggtcaaaccccgtctctactaaaaattcaaaaaattagccaagcgtggtggcacatgcctgtaatcccagttacgcagaaagctgagacaggagaatcactgtaatcatgcctgtaatcccagctatgcagaaagctgagaaaggagaacctgggaggtggaggttgcggtgagccgagatggcgccactgcactccagccggggcaacaagagcgaaactctgcctcaaaaaaaaaaaaaaaaaaaacccttcatcttgttttaatatgcattttttattatcagtataaaaaattttaaatgtttcttgctcattgtttatgtcttttgtccattttattgaagtatttttcttattgctatgttagatttgtttatagataggtatgcaggtactgttcccagttcctcattgtcctttcaattattgatcacctataatcatagctgagatcaacagacttaccagaactaatttgacgtgaatcctagatactaaaaagaaatgttctttttcatcactctcaaatgactctttaacatctgcagctttttctttttgatttcaatatgtatgtgcctaggaaaaacccatgaatagcacaataagttggtgactatgatctttcctcaaatggaaaggagtaaaacagcacaattgtgcttttacattcttcattggaatgatttggaatacaattaattgccttatttttaacttttctgctactgtttatagtggctattaactaatatttgcttagtgattaatgttattcagaattagtatggaagctgattggatttacatgtttctagaactacgagtggatttaactgatttgccaggaaagaacttaaacatattttaagttttaattcaatatttattctaggtgacagattctttttaaggactggcattgaaaagtctgtttattgtggcttgtaataagacatttcaaaattaatgtaggccctttgaagggtatttatttcaacatttacctagtaaatatttggatactatctgagtgcctgaagcaaaccgtaatagctaaagtcaatgtcacagggatttgcttagttcatcagtttcaatgcaaacatgtcatcctgtaacatgatagtatttattgagaaaattagatacttcacatttgatgaatatcttagaagctagtggaaagtgttttataatccggaaaaaagccaaaattattttactcattaaaattgttctaataaattgttttccttcatttaatttattctgctttaagtcatttaaaaagactgtgtgcagcctacatgtaatatgattatgatgttctggtcgggtcagctaaaagaacaacattttttctcaatgaacaggagttaatgaagtgtgagcaatgcataagcgtgaaaatggaagctgtagcaaggggctggaatgtaaggcaagtttgaggtcatggaaattcccgtttcaggcagacaatgtgttgtttaactgaagatagcttttttgagaatgatggctgttcatatggattgttagtaataagaactttaatgtgagaaggggaattggctacatatagatagtcaaaatgttttgtcttgtaagtcgttgcctctttgatggaactgtgaccactccctccttggaccgtgtgctcttgattacagcactatgactataatgctggaaaagatgagaggaagcttcatggctagatgaccctggataccctcatgaaggacactttcacatttttatgacttcaggaactgacttgatattcctgtgactcggttaccccaaatgcaaggcaagaaagttgaacctgatgcttactagaaccccttctgtatcttcctatgtactatgacttctaagaaaacaagatagatcagatgaggataatcctatcctcttaccaccaattcctccaatgcactgagccaaaatctgcttctcttcctctctcaatagtaaataataataatgataacaataataataaatctctatgtaagaacaatgcaagttcaacatttttgactaaatccctggatctgacctatttccgctagccttcataaggacttcatgcttggaactatcctttttttctgttttcctatgtcatcagtttctccatagccaccacgtgattgccatcagcacagccttcatgcatgcatcttaaaacaagtaaaccacctttcacctcacttctccgttaccacaacttaaaaagaagaagaagaaaaaaaaaaaaaacttgtctacacttgctggctttacctgctggctagctttacccccaattttctccacaatccatgctaattggatttccatctacaccactgctctgaaatgtcactcataaatgtttccagttgtctaccccttgctagagccaatggtcagttactggccatcagctttcttggcctgttagcactatttcactttcatgaccttgcatcttgaaaccctttcttctccagacatttcttcccaccctcgctagatttccttctatttaactggacattttctctctatttgtttgttggttctttgactggccctctgaaagttggtgtccttcagcatcttggttgctaaggatatgggtagaattttaacacacagagataaacatgaggaggactgggaaaagaagaaaaggtaaacatgctgtaaatcttacagagaagttctgtttggctggagaggaggtgaagaggagattcatttatgggagaagtttgaaacatcccatcaaatatataagatttacactgagactagaagaagatttctagggactgtgaactttccattttttctagtcctgaaatcagtgaaatgtcaaaagatgcttactcagtggggttggtcagttaactaggcctcatattgaaggtagcaatatccttttattggaaacccacatcttagcaatgtcccagtagagaaaccaagactgtgtcatcatagattttttcttcttggtatggtttattcagaagacactctagggtctggagctgagcctatagatatttaatccttaattacccaagtatttattgaactttaccatgtgaaaggcacagataggtgaggctctcttggattaatataccagaatttttgttagaatgagctaaggtgccgcctgtgaaaatactgacctcactcatataaaacattttttctgtggtttttcagtgtactaccaaacatgggatggtatcgatagcaaacgtttagttggttgtaataggatattaaatgtgattgttctcttttttgtatttgcaatttttttgtaaaagtcttataaattatatattggtttgaatttcttgtgtgcaaaagcatctatatgtagagaagctgaaaattattgccgaagaagaaaacacattatgtagatcaacaaatagctgtcattttaccgagaaaaatcggtaactcttttaagtgataagccttctccctcaggaaatcgcaacttcagcttttaggaaacagctctgtctactcgtccaccttcatccaggaatgaactgagcaagcagtagtttttcaaagaaaacaaatctcctacatagatttactctatgtatttttgccagctccttagtaactgttcagttttgatatcactaaagatttagagtaagcctgatttaccaaatctagcagttttaagacccaataacttttgtgggagacaaagggtgtggggtaacttcccaccaacatatgtgtgtgtccagggggctgagtccaccctcatgtgaccagaccgcttggccacttatagagtggctgtcgaggttaaggtatctggaatctagtaatatttcagaggatgggacaaggtagatttcccaggcttcttttcagtacttgttacttagctattgtttttcattttaattattgttgaaattcaaccagattgattttattttgaaggtcctttcaaatgtttgctaacaatgtattctctttaaatgtttggagaaaattataagtgatttataagatttatcttataaaatttttataaacaatgtaattcagacatgagattatactatcccattcatcttaacctttcttgatttgagaaaaattatataaacattttaagcataaatttgacttaaaattaaattaaaaagttgtatattttattgttatcatatgaaaaatctaactcatgctatttgtggatgaagcctaatttttatatttaaattgttataactatgtacatttttttcttaggtcttcttttcaaattcatttttcaacttaaatattgagatgctgatgcacacaacttgtacttgcatgtattatgtaaataatgaaatgcaatattttatctttttattggattccagatatagataaataatttttgtatacttaagaataaagaaaatattcccccccagaaatacttcataaataattttaaaactttttaacgaacacttaagaggaggagaagaagaatcaaaagtatatgcttagtaggtaaatgtgccagcaccatatgtagaattttatggctggaggggaggtgaagaggagattcgttttaaattaatataccagagagtgacacagaatcactagttattcaaaagcaaaactctagagaaattgagataacatagaatggtagcatttatctgagaatttgtcatagggagattttgagtgactaattctttgtttttattttgtttggggtgtatgagggaaatacttagtaaaaggggtatggaggtcatgcaaggatttgtctctttgcttctgtggaagaaacatggagctcaagttcctgggtacatgaagactgcttgataattcatattcctcccacttcttccttctcctttctcttccttcactttttatttagtaaatatttcttgaatgccttgagtctgaaagatggattagactcaaatcatgtctgcaaaaggtatgaatctgatagtagagacatctacaaaaatacacaaataataggtaaatgtaagaataaggctgggtgtggtggctcacacctgtaatcccagcactttgggaggccaaggcaggaggattacttgagcccaagagtttgagaccaggctgggcaacaaaacaagaccccatctctacaaaaaaaaaaaaaagaaagaaaattaaaaaagaataaactacatgtgaatgtagtggagagaattattgtccatccagcgactgtcaaagaaagctttacccaggaagtggcatttgagctgggtctggaaaggtggaaggagaaggcactctaggcagaaggaacatcatgagcaaaagcacagatgaggggctgtctgactttttcagggagccatgaatagacagggctagagctctggcttggagtctgattgttgacgaatgacatagtaagaaatttggactatagatagtaagtcccaaattatttgaagtagagggatttcactatcagatttttttcataaactttttttatattgcattcttttttccatttttttatttccataggattttggggaacaggtggtgttcagttacatgagtaagttatttagtggtgatttgtgagattttggtgcaaccatcacctgagcagtatacactgaacccaatttgtagtcttttatcccttacctacttcccatccttaccccctgagtccctgaagtttattgtgtcatccttatgcctttgcatcctcatagctcagctcccacttatgagtgagaacatacaatgttttgttttccattcctgagttacttctcttagaataatagtcaccaatcccatacaggttggtgtgaatgccatgcattcattcctttttatggctgagtagtattccatcatatatatgtatgtatataccacatatatatatattccatcatatatatgtatgtatatgccacatgtatatatccatattccatcatatatatatgtgtgtatatatgtgtgtgtgtgtgtgtgtgtatatatatatatatacacaccacagtttctttatccactcgttgattgatggacatttagatctgttccacattgaaattatatcaagtactctctcagaccacagtggaataaaattggaaatcaattccaaaaggaaccttcaaaaccatgcaaatacatggaaattatatagcacactcctgaatgatcattgggccaacaatgaaatcaagatggaaatttaaaaattcttctacctgaacgacaatagtgacacaagctatgaaaatctctgggatacagcaaaggcggtactaaggggaaagttcatagccttaaatgtccacatcaaaaagtgtttcataaacttttataaattatagattattggaggggagactgatgaaagaccaaataggaggctattgcagtagcccagaatggtttacttatatcttggtaacagaggcagatatgatgaccaaatacgtgtaggacatttcatataattaaggaaatgacagaataggccaaacaatatttttttgaatcctgtattgactaagactttgactagagagagtcttcagttagaaagtaattctataggagcagtactgaaaaaaaaatctctatgtcgttactgattaacataacactgactgttgtaaaagagaaactcctaaatctcagtggcttaaaacaataaaagtttatttctcatataaagttcaagaggtgttgggtgatggggaggagtactcttcctctgacgtcttcaacaaatggcttcaaaatcctcctgggtattgacactcatcaaccagttgatagacaaggaaagggagggagggtaatggattccatggaaggtttttatgggccaagcctgggaatggcatgtatcacctgcatccatattctgatgtataactcagtcttgtggtcacattaatgcaaaaggactgaacaatattgtctcactttttgcccaggatgacagggaaacaagtttagtgaacaaccagatggaatctgaaatgctgtcattgccttggggagactcggttttttaatggagacagtgctctcctggagaccttggacatcagtgccttctggcataagcagtttttaggcagggagtcctccaattatggagagccagcctaccagaaaccaagagcccaaactctttacgcaacaacaggcttttcctagaagatggaattagctgaacagcccctgcagtctactgtttgcacctaaggaagctgctttacattttgattttgttgtatatcagaagactggctgacacaaaacaagaaggcttatcttatagcctctgatatgtcctgttacttcctgctgccaggaaaatgcttaagacagcatgttaatttaggagggattttcaaaactatacggtatgactcaaattttatatttttcaaatatagacatctttgttattataaatatgtacatttagactgttacttcagtgaagcctcagatatacccatttttgctctgcacttgtccctggtgacttccagagtatctggcataccattgtctcaataaaaataggctgaatagataaatatatatgtgaatgcacaaagactggaaatgtacatcagatgttatttaaatatattttaagttacaaaatatccccttgcttaaacctgtcgacttcagattcagaagagtcataccgtgatgagatttactgagcagctatcagcctagcccttccagcacagccctatttgttgactcactccctaggaaggatcagaaacaaagttactgaagtgtagccaagaatttagttattaagaatatttattctggctgggttcagtgactcatgtctataatcccagcactttgggaggccgaggttggagaatcacttgagctcaggatttcaagaactgagcaacaggagttcaccctgggcaacatagtaaggcctgttctccactaaaaattaaaaaaaaaaaaaagttaggtgtggtggtgtgtgcctgtagtcacagttacttgggaggctgaggcaggaggatcacttgagcctgggaggtcaagactacagtgagctatgattgccctactattctccagcctgggtaacagtgagaccctgtctcaaaaaaaaaaaaaaaaaaaaagtttattctaaaatgatttcttaaatgtttatttaaatttaaatgcttaaatagatatatagttaagtataaacattctcaaatctaactcatggtgaaaagagcaaggaggctcttcaaattcatttctcgcagaaagtaacaaattggctgctctctttaaagcctctgcctatctgctccccatctttttctgcatatcctggggtaacagcttatgttccagaggcagctcggaagtctctaatggtcaccatacaggcttcactcactccaaaaataaacattgtaattacaaccaccaccacagtgggcgtgaggagactttcacacatttatatgtcacagaacatcaagggtggaaattgtattgaagcactgttatctgaatctctaacaaagcacacacctggtatttagtaacacattaatcatgcaaagggaagcttttaaacttaaaaaatggaagtctgaaagcaactgcaggtatgatttttaaaaataactttggtagcaagcggtgtctgatgtggttgtcctatttaaagagaaccattagtactgtctgtaatgcaatagccaaacgtattgaccagagcaaaagtttagcaaaatgcctttttcccaagaacatttgcttttgcctgtggaatgctgacaagtaggatgctgtgctcaggcatggaaatgataaatactgtctcttcatgtcagattactgatcacattaaataatccacagcccttgctatctgcagactccagcactaactaactagaagcagcttatcatttaccagtagttgtgtacaccccatggcaccattttcatagattatgaagccatttgtaaaaagtagaactcctaaatttaaactaaaacatctcaggagccatttgttggggaatgtggtttgggcccaaatacactggcttaatagaagaatagctttatataacttctctgattgattaaaagtcttaatgatgaaagctcagagctaatcttaaacaaaattattcaatagaatttgctcatggccctcaactactgcctgctccacattcttgctcccaattctgatgttatcccattctggtattctgttcccaccagttcattatgccagggtcttgcttcctgttcaagtccttggtggtggttaggatatggagtttgtaaatgtaagattgaatcagtggggaataacgttatctcactgatgcaagatactattattaattccattttacagaagataaaaccaagccacagagagattgagtaacttgcccaaggttatgtcactagttagaaggtaagctgggattccaacaaaggaagtctgggtttatttcaaaacgcaatgcttatacataataatagtgccaggcttattattaatcagtaaatattcactggacacctattaagtccacgacttacaagtgtggatattctacatttagtgataaagcagtgggtaatgtatgggccacagttttagttattagagctagttcttaagagtgaaaaattatttctttattcaatttgaatttgttaaatggggatattctgtgcaaggaactttgagactagagcattaaataaatgatgcttgcatcaaggattgtgatgggaggggatttgtcatgtacattagtttatgatataggacacagaattaggagatgccaaaagacaggtaattataaggatccatggatacagggggaaagattagggttgaagcaaataaggaagggtttgagagcaaagagatagtattgcagcttaattttgaaggatggatagcatatgaacacaactgatataaaatgactgtgatgaaggattaagaaggctaggggagaattttagaggaaagagtttgattatctttgattttgcctgttgaagggtagaagtaagctaaggttggaaaagtaagttagcatatcatggaggacctcgaggagaaagaaaatccaactaccatgtattaagtacctaatatatgccaggcattttatatacttttctcatgtaattctcacaaccacaaatagtagttgtgttttgtgttctaccaagaaaagaaacaaaagcctggacagactgaggaactttctcaaagtcatttagtaatccactaggatttgaattcatgcttgtgtggatcctagcatctgttctttccatttcatcatgacctctttcttttgaaggcaataagaaacccttaaagacttcttaggacagtacatggtatctggcaccagtttgcctgagttagaaggaggcaaggctaagggatatgagtgtccttagcaggaaactggcaggtgaatgaagagtaagaaatcatcttcaggacatggcagaaatgaactctaaaaggtttagtactatttagattttgtagtatagtaggatgtattgataaacacaaacagggtaacctgtttttaactctgaagtttgtggttgaacctgctttcctgtcatctagctgccagtctttgtaattctggacccttccttgagccatttttatcactttcaccttcatatgagggtttgcattaaaaacagaaccatattgcactaaataaaatccacccatagctcctggcatcaacctttcaatggaatgtgtgttttaatggttgtcagttttccctccattgggattcctatggcgttaattcccaaacacagaacggtatttaaatgctctcctaaggtccagaggaaaaaaagtgaaggagctattctcaggcacttgtggggcaagtaaggaggatgaagagtggaggaagaaggtgttttagttttgtttttaattccagttcaatcttactttgtatattcctctatagtcagaaacaatggaatgtcctagagccctttagtgaagaatgaagcaagataagaaattagtaaatgagtatagtgtacactatctgggtgatggaatagcctggaagccctgacttcaccactaagcaatctacacataacaaaattgtacatgtgccccataaatttgtacaaataagaaaataaaaaataaataaagcaggtgcttagtgttccataaaggtcatcaaaataaaacaaaccatgtagcatggttcctgccatttctatactccccttccctatatttttagcatgttagtacatgggttttgatttacaatcaattttttattctcagaagttcttttaagcatctttatccatttatgagacagtggaacaaaatagcaccaaattatagtttgatgtgaaatctttggttttcccttggagatacacttcattcgagtaagtagagatcataggctaaattaggccattgtgactaagatacagtgcatcatccaattctataaaaacagagtgcttgactgaaagcaatgatagctattaaaaaatataaaattggaattagaagaattgagaggaaaccacttccaggagtcactgactatttaaaatatccaggaaatttttctcttaagtctggcttggcattcatgattcttctaattcccagaaaattaatatgtgaacttgaacggattttgtgatcacttgtaacctccagaaaattggcggacttggatgctgaatgcattgtaagcttccttacagatctccagcctagttttaaaatagatgctttgcattaggatttagccaaatacttcgttaatagtggcaaatgttgtatttttctgtgactactatttttttttccttaacatccaggcattttaggaacctccaaagcagtgaatttcaacaaattgggtgcttcatctgcttcaggacaaacactttcagctatttgttacaaaacctgggtatttttcaggcattggattagtcttaagaaaaatgttttcatcaaaatgttctaaattcttacattaagtgtcttagataaagccatttttagaagaaaattcttgatgttggcaaaaggtagatacctggaaaaatttcctgtcttttctccttaaactggaactataccaattagagtttcccagcgtaacacacttcattcatatggtaccatgtgactttaaaaaatctcagatgacgagaaggaatcttcattttccaagcttgaaaaacaagaagttagtcagacttgtgaacaagaagacactgtggagagtggttagggctcttgcaggatactaaaaaatgatcaagaattatgtttggttttgtcccctagccatcatgcagtgtttctttcatatcctaaagatgctaccaggatgaggaggccagcattcgtgggaattggtggcaagtgttggaggggtgggtggcagaggcagtgaaggtgagtgatgctggcgttggaggaaagcagtgaagtaaggataatgacaaataggaaaatgtcactttttccaattctggtagttcagagctttctcattctcttagtctttgcttctttcaccatgacactatggctggagcccaggaaggaaaaggatccccatgactaaaaccagtgacctttccaattttccatcctccagtgttgtatgacaatgctgtgcttttgatacctctcggtgcagctgtgctgggagtctcttactcatgagactatcttcctggaatacagttgccaaacacatactgacccacctactgtctgcatcagctattaaaacacagacctgctactcaagaaactcaccatcagtaggggagacagacatgaagacagataattatactattatggcacaggttgggggaagtaggagaatcctcacaaggctatgggagtgtagggtaggaagctactgcagcctcaccaactgccatgaagcagggactgcctgtctgagtctgcatcctctgtgtagtccagcctttgtctaaaggaagtcctgggtatcagaaaatgatcgagaaaggggatcagcaaagcagagatttaacaactgaatgtacaatgttggtagctaataagaatgccctccttccccaatccactaagctgaaaggatagcagggaaagaaggaagccattgtgtttcactgtaaagtctcctcagcaaaaatcagttgttttctcgctgaactaaatctggcttttgtttagtgagtttcctttgtgtgtgtgccttctctggtcttttcccagcatccttttattatcagggacagaacactgtgaccttttgcgcagggttaaaataacagcagtagctgaaatgaaggttgaattttgctgactggtttacatcctccctataacttgctgtctgcatcagcaaagcaggtcgcccttctgcccacagcttccagtaatgttgaagctgtcaaggcaattaagtctttttacccttttaagttgatgtaacatttcaccctttccattcctggacatctactcactcccattctgttaccaagttgtttccagcattcctgggaccatttactccccattccattttacaactttgacccatatttgaaacttcacaagtttaacccattgtagttcctatggcttccgtagttttcgccttgttttaggacaggaataaatacttttattccttgggggcggggataggtatcatcaatacctggtatcttcactatgaggtgaataaattgatctataggaaacaataaatgctacttacacgagagagggtagcttatccccatcttactgaaaaagaactaggacttcaacaagccagttgacagatagggactaaaatctatgtacaaggcattttgctggccccttagggttatgtgttgaggaatatatattctcctaaattatattaagtcaggaatgactgaggtgatattgggattttccatgctcttccttacagtctttattttattttattttttggtgttggggagaccctttcaatcctgttttttatctgccccagctattcctctgtctctaatattcccatctttcacaaatagacccagattttttttctcattaatgagtacttcaagttgaaggtcagctatgccttagttctgggaatgactgaggaagagagggaagaaggaagggaaactcaagaactcacccatcttccttacactctgaaaatagattcctactgctgaatatgttacctattccttcatctttcctttcactcccatgtttcgatggaaaaatgctcttagtagccaaagtttgggtttttattgaaatatagatgaatataaagctgtctaaaacagaggccacaccacatcatctgtttgcctcagccttccctctgcaggatgatcctgtaagataaagtgtgatggcttttttctttcctctcagcgtccacaccattatcccaaatagaaatctatatgaaactctcaaaggatagcttgcttcaggtggaggagtgatgtgggattctgtttccagggaactagggaaaggaataacactggtagatggtaggccttagaagaaagtcatgagaaggagcagagaatttcattccagacatgattaggaatcagaaccagcggggttcagatacatccctgggacttagccttccatggttcttactcctaacacagaaaagctgtgcttctcagactttcgtgtccatacagatcagctgggggattttgttaaaatgcagttttaattcagtaggtctgatctagtttgagatttgcatttctaacaagttccctttgcttctggtctaaggatcaccctttaagtaacaagactcttaactatccatcattatgtaaaaagaagcaggataagaagatacttaaagttaggcctactaaatttttcaagttgatttgtaggtaatacagacatccccttttcaagtcattctccttctgctccagttccccacttccccttctctcatgtctgaaaggttggcagccgtttcatcagtcctctctgctataaatgaatccaagttatcctggaatgaggtcgcattttccaaaagcatgtttctagtctatggtgaagggggagggtctacttgaacagttgaggcttgggaagcatattctttgtaaaacacagcagtgtctgagtagagtgtggatctgaggactttccctaggcaaaggaagtggggaggcccagagcagctgcgtgtgcttttctaatccagctccttggatttatagaaatagaccgctggcatgtttaaggcatcccagttaactgcagctgagaaaaagtctccatcatttctgactgagctatccagcctcacaccaaagtctctgtcatttctatggacccccagaagcttaatcgtagtttgactggtgatgaatggattaatccagattatcatcacgacttcttgaaattacgttccctgtagatttggcttttcagaaagagtccacctatcaaacattctgaatgcaatgaaaatatttaaaggtttcccagaattcatttgagaacaatctaatttaaaactgcatatttttccatgaatgtttagtgagcccttgctatgtggaccctgtgttgagtactcgggaatatagcggtgaaccaaatgaaggcagtaactgccctcatgaccgtagggaactgcctgtggtctctatcagggggacagcttcttaacaagctgtattagcttgggctgccaggacaaagaccacagtctggatgacttgaacaacagacatttattttttcacagttctagaagttaaaagtccgggatcaaggttccaggtggtttagtttctggtgaggctgtcttcctggcttaaagatggccatcttctcactacgtccttcacatggactttccatgtgagaggcagagagagagagctttctggtgtctcttcctataaggatactactaatcttatcatgtcatagccccatcctaaaagaccccaccctaatgacctcatttaacgtgaagtacttccttagtatcccctatctccaaatacagccacgctgaagttagagcttcaatatatgaattttgggtggacacgaacagtccatagtacaagtaaacacacaagtaaatcccaattacaaagcatagtacatcccaagaaggaaaaagaggctctttttagagctacattccatggaattgttatagaaagcttacttttattatccactaaaaatataaatcagaagagccaggagtgtaaaattgagaatgatattgtattctgtattctttcttggaacgctgaatctattttgtttgtacttgcctcaaggcccacataataatctttgacttccttcaagagaatatgatcgttttgtaaaatgtaactatggccattgcctgactcttgaaatgtaattacatttctaagtacttcactttttggtattcagcgaaatgagagaaaggagaaaaaaaaaaaaagcactctgtatagagtttcattcccaattttttttttcacattttgtttaatatctaaagattcttgttataatgaatttaaatcttttttgttatggtgattcttttttaagtaaaggggtaaaattgagaatgcactgatgtgaatttcagtctttcaaactgaagttttagaaattaaatataatgtcactttttggcagaagaaaattaatgtgggaaatttttagaagttttatccaaacgaacacaaacttggctaagtactgaggagactgctgaatgtaagaccctatgttacgcacagcttgtagttattcccgattgtaagatgcactattaaaagttgtttgtggacaacaggggtcagtggtctccttaacatctgatgcccatgttacactttcctgtttctattggggaagacgggggagtctcctgttcgagagaggcctgtccctcagagaacaagaaagatgtgcatcccactttaactgctgaaggaaggaaaaggaattgggaggcctaatgaacatggaatttgactttcacaatgtatttctcatggatagattcttggagaatggtgtctgtttgggggcatttaagagggatattgaaagagaagagctgttacagatggagaacaagatggaggggggcatacaattctgtaatgtgaagaagaggcgggtagtaagcttagttcccttagtttctactcataatactgaatgaagtgaggtgaggggatgggggcagtgcctgagtcttttcatatgcctgatgcccaggtagctgaaatccatgaagggatacaaggtgtggatgaatgggtgaaaaattcagaatcttagaaattgtacaacgtgagaacaatctttaaagcagttaggactctccatagataaatgagctgcctggagtagtggagggagtgatactggcatctctgtagaggtccaatcaaagcttcatgactgagcaaaggtattttacatgactgaaaaaaaaataaagatcctagtgtcaaacagctgaactacaggcccagtagtatctctcccaatgttgatattctatgatcttttttttttctctctaccacattccaaagatatgacaaggctggatgtcactactgacgtcggctctcagatcagtctgtgtcgtggctgatggcttcaccagatcctcagagaccaggctagttgccctgcaaattattcaagattcaattttctcagactatgaacttcctttgaataccatagttatataaggcagaatctttcatttcctaaactgattaatgatgataaataaggcatttagaaaataaactataggtgggggtggagggttctgattaggcattatttcagtaacctcactgttccagtagtggtcttggagtataatgcagcatagtggctaagaacattagaatacagtgcagataaagcccctgcatatatggccagctgattttctactaatgtatgaaggaagttcaatggagaaagaatatttttttcagtaaatggtgatggaaacattgatataaaaaaacctcaatagattgtagacctatgtgtagaagctacagttttgaaatttgtttaagaaaacagggaaatcttagtaactctggatttgaaaaatacgtcttgattagaaaataaaatacataaactataagagaaatagatcaacaaattgggccccataaaaattaaaagtggttgttcttcaaaagacacttttggctgggcccagtggctcattcctgtaatcccagcactttgggaggccgaggcgcgtggatcacctgaggtcaggacttagagaccaccctggccaacatggtgaaaccctgtctctactaagaatacaaaaattagccgggcatggtggcgggtacctgtaatcccagctactaaggaggctgaggcaggagaatcgcttgaacccaggagacagaggttacagtgagccgagattgtgccattgcactccagactggggcctgggtgacaagagtggaactccatctcaaaaaaaaaaaaaaaaaccactttatttaaaaataaaaataaaaaggcagtcatagactgagagaaaatatttgaaaaatatatacctaacaaaagacatgtgtctagaatatataaagaattcttaaaattcaataagaaaatccaattttacaatcaaaaatatttgaatagacacttcaccaaatatgatatgtggataacaaataaatacattaaaaatgctcaacatcattagagaagttaaagacttgtatctgaatgtttttagaaaatttatttgtgatagctaaaaattggaaacaagcggccctcaacaaatatataacaaaacaaattgtgatattgtcctagaatggaatactactcggctattcaaaggagtcagctgttgatatgtgccacaacatgattgaatcctaaaatagttcttctgagtgaaagaagctagataaaaagatttgctgtatttttcttttcatataaagttttataaaaatttaaactaacctatagaaatgaaagcagatcaacggttgcctcagtatggactaaggaagaaagatgaatttgaaagtggcacacggaaacttttagggagagtggatatattcattgtcttgatcgctgtgtggattcatgggggaatgcatatgccaaaattcatcaaattatattcttttacatgtacggtttactgatcatcaattaaactcactaaagacagatagatagatatgtatgtgtatatacacacatgcatatatatatatatatacacacacacacatttatatgtatatatacttatatacacataaacacacagcaatatgttcttagacacggtaataacctttctatcttcgatttacatttgtataaattggggatataatattacttacttcatggagaacagtgctaagcatggagaaagatctcaatcaatgtgagctaaaactattactctgtagtatagttcacttcttttaaaacatattttaaaagaagtttgttttaaaagaaatatgctttaaaagaagtgtctatgtcctttgcagggacatggatgaaactggaagctatcattctcagcaaactaatacaggaacagaaaaccaaacactgcatgttctcactcataagtgggagctgaaaaattagaacatatggacccagggagggtaacatcacacaccggggcttgtcggggggtgaggggcaagaggaagggagagcattaggacaaatacttaatgcatgcgggacttagaacctgaatgacaggttgataggtgtagcaaaccaccacggcacatgtatacctatgtaacaatcctgcacgttctgcacgtgtatcccagaacttaaagtaaaatttattttaaaaatgatttgtttattctatttctccacttttttctttgtttttgaggatattcgttaccaggaaagatattgtgtttcctcaaggactattttgtggtatgtagtttttagaaggtctgactcctgggcaagtgtgaatagaacagatgggtgaagaagcctttcaaatggcattcccaggcctgagaggggaagtccttgtgcttagaaattttccatcctcctccacagctgaaatgcctcccttggctgaaatgcctccctcagcatttttgttttgaacgccctttcttgggggatcctaacccagctgcaagaattcactgtgggctgaaacctggcagattagatcttggagagggaaagtgatttgaaagtaatgtttgttcttaaaaatgacaaacaagtattgcaggtttctgttattttttgtgttccaattaaattgttgaggattttgaagatcagttacaagacctttgaatttgccaaatggcaggtttcctttgctccttttaatttttaaaagaaaataagctgtaacttgtaaaaattggctcttctttaagcaaggacttcttattacagctactaaatgcccaggatttatctctatatgcttttcaactatggcctctagtatgaaaagttgagcaaatttttaccttttccgtattaaattgcattgtttgaccaaagattaaatgacatcttaatgccataaaattctatgtcattttttcctatttccattttttatagagaaaaaacaaatgttattttgtattggttgttcatcatcctgacaaaagtaactttttcttcagttgcctcttcactcttttctcatccagagtaacctcccagctattaatagcctatttcctttaaatcctaacctgtacccgcatcaaatggcattagcattgtcctgtttctgcattattgattctaacttatcaaattacatgatgatacagttattgatgtcacaggtgaactaacaagacctgcactacctatagctatgactggtctgcttcagttcgcagattaggaaattgctacagattaatatcctaatttcagaaggcatttgacagtatcttttatattatgacttcatgaccagctagataaatgtattatcattggtattgtgtaggtttgtgaaacaatttacttggtatcaagtaatgaattggtattaagctggaaggaggtcactagtataggtagtaagtttcaggctaatactcttcattcttctaatgtaatagaatttgcatgaagctgagatattataactttataagagaaggtaactgagaaaagatgaccaattttattataaagcacagtctctgtcatgaaggacgaataaaatctaatggacttgtgttttcctaatattcctcaaaaaactcatatatacacaaacaaatgatcatacagatatagaactgtagagaattgacttagccacaatatttatgaggactcgaaagttttagtaaattaattggaatcaatgataagacatgccttccagaaaaaaacaaaacctgacatctaagtctgcatctatagaagcatagatacttctagagatctgaatttctgtaatcattttgaagccccatgtcttaagacattgacaagtagagaggattaatttgatgcattcatttaagaactagagctgtgtcttcctgcaaaatggaagagtttgtgaatatgattgtcgctttcaaatatctaaaaagctattgcaggaaaaaggaattgcattactcttctttttgttcttccaaagtgcaaaatcaagagcaatagtggaagttatagagagatagattatggttcagcgtaagaaagaaatcccgtttgacttagatctttcgtaggacagaatgaactcttttggaaagtagcaattttgttcacatggggaaaatttaatcagagactggatgaacattttagattgatttatattagcatttttcactgcatgtcctgcaaattaccacccttgtaagatattttgcaagtttctgggtcaaccagctttgagagatattacagagtatgttgacctcttgaatatttacaatgtgcatcagcatattagagactctgaaagttccacaataaagaaagctgtttaactttgtgtaacccggcatttcccaatttatttaagcccctcagtttttcacatgtcgtggaacaaatatgcttcagaactcacattgggaaatgcacttaaaggaggtgaaccagataactttgattccgtgaaactattttctccatatgtattgacaggttattttataaattcacacacatacatctgtgtgtttgtgtttgtgtgtatctatgtagccgagggtgggttttaagtcttatttatagataggtgacaattttgaaagagtttttatgaaggccaataaattaatagcatgatgaataaatactcctttaagaatctcaactgcctcaagaaaactacaattcttaattttccatagagatgtcatgaaagcgaaatgtatttgtcacatatcaacaaccactcatcaacctgagaataaggctaaagctccagaacttttttttcttctttttttccctttccctcccctgccatttaggcgaaaagccaatttcttgaaagtggtacaggaggggatgtgagcaaatacagcgtaatgattgagctacaatttaagcatctggttttatttatgtgcaagcaccgtgcacagaacttaattaatatgactgaaaaaaaaaaccatgtgtctattgaaatgttaggtagtgcctcacatatgtgtgtttctctttcctaaacactccccgatcctgatctttttatcacaccttcgagattcagttttgtgcaagatttatgaacatgcagtttttcttcctcttctgactttctatttttctttccctgtagttttatatctagaaaactactactttggcaagggttgaggactgagtcacggacgtgcccttactcacgtcttctgtgatttgaaggcagaatctgaagcaaattccaacacagctgtgagaggcagcccgtttttgttcttaaaatgctaactacacacatttgcaaacctgcaaagctatttttctccttcctttggaaggtgttaaggctaaaaggacatgtagacaggagacagcaaggagagtccctttcctgtctctgttatagaacttctatttatttttagtgtttattttttcacttgtgaatgacatgatactgacctggaagaaacattgcttctgggatatgtagctgatctcctgctactgtccctatagtccaccgaaaagttaaaaggcttcaattctgatcatcttctccaggagaatttttatagccagtgatgtcaagcttacattttaactttgttttcatttgtttgttttttaatatacttggttattaatgtcatagttcatcaatagcctaccaggtacaaaaatcatctagtaaaataaagcaaaatctatggtagttatattattttcaaaactattttttggcattctcattgtgttgcccagtctggagtgcagtggtgtgatctcggctctctgcaacctccacctcccgggttcaagcgattctcatgcctcagccttccaagtagttgggattataggcacctgccaccatgcccagataacttttgtattttttagtagagatggggtttcaccatgttggccaggctggtctcgaactcctgacctcaagtgatctgcccacctcagcctcccaaagtgctgggattacaggtgtcaaccaccacacccggctcaaaccatgtttaagttagcagaagccatttttaaaataaaatctcttgaatcattgtaatttttttaaaaagagagaagaaaaaataataaatgaagatagttgtgttggtgaaactgctcctcttctgtattcaacagtccttgagggacctctaaagtacctccagaagtcattgtgacagccacttctctcaaatgcaagaaatcagaagaaagacctgtatacataaaaaaaggataaaacaagggtaaagcatttctttgtgttgagaactttccaaatcttaccttctagctattttgcaatagattataaattattgttaactgtagtctccctactgtgctattccatactgtaacttattccttctatctaactgtatttttatacccattaaccaatgcctcttcattctcacctctcccactaccctttccagcctctggtagccatcagagactacttactacctctatgagatcaattttttagcacctgtatatgagtgagaacatgcaatatttgtctttctgagcctggcttatttaccttaacatactgtcctccagttccatccatgttgctgcaaatgtttcttcacaggaaacatggtgtatatatacacacgagaatattattcagccataaaaaagaatacaaccctgtcatttgcaggaactcttatgtttagatatctgtactttcatgttcattgatggacacttaggttgatttcacagcttagctattgtgaatactcctacaataaacatgagagtacagatacctctttaatacactagtttcctttcccttggatatatactcagcagtgcggttgctagatcttatggtaattctacttttagttttttgaggactctccatactgtttccatattggtttccatagtggctgcactgatttgtatctctaccaacatcattgtcaggtcaccatttgctatatgaagtcttttggattatagccattttaactggggtgagatgatatctcactgtggttttgatttgcatttctctgatgattggtgatgttgagcaccttttcatttacttgttggtcatttgtatgtcttcttttaagaaatgtctattccgatcttttgcccatttttagatcagattatttgtttttttgttttgttttgtttgctattgagtttcttatatattctagttattaattcctcattagataaatagtttgcaaatatttctcccattctgtaggttatctctttgctttgttgattgtttcctttgctgtacagaagctttttagcttaatataattctatttgtcaatttttgttttggttacctgagcttttgaggtcttctacaataccaattagagtggcttaatagggtaaattaccctaaaataaattaaattaaattaaaaataaattaccataaatttctttaatttacattaatattgggcatttagttagtttaattctctgtggttcaattacaaattttatagagaaatccatttgcatcaattttgagtttatatctgattgtttcttaaatctatatctgattgtgagattatagtgttgaaatgtttagttttaatgttactggctactatgacaagctattctggcaatagcatccacagctacagtggcccacacatccaaaatggatgagggctctctaactctgctcctctcttcatcatcatctaccattacttcatttggccagaacaatggaatttggcagcattatacctgagtagactgttcttcctttcatcttccacgtaattgaaaccatattgtatgggtcacagaaataaagggattatgtcgatcttacccctttggtgtttggcatgagttatctttaagacgtttattcaaaataagtgtgatatcttgtgtaagtcaggattcaaccagaaaaaatagaaccagatagatcacaagagatgtactgcaaggaaacggcatacacgattgtggaggctggcttggcaagtctgaaatccttagggcaggcaccaggaagggcaggtttgaactcttttttttttttttttttgagatggagtcttgctctgtcgcccaggcgggagtgcagtggtgcgatctcagctcactgcaagctctgcctcccgggttcacgccattctcctgcctcagcctcctgagtagctgggaccacaggcgcccgccaccacggctggctaatttttgtatttttatttttagagacggggtttcaccatgttagccaggatggtctcgatctcctgacctcgtgatctgcccaccttggcctcctaaagtgctgggattacaggtgtgagccaccgtgcccggcctaggtttgaactcttaaccatgagctgaggcttctgtctacaggaggaatttcttttttttttcaggaaagacgaaattatcttcctaaggtgtttcaattctattcttaagggctttcaactgattgaatcaggcccaccaggattatctaaaatactctgtcttacttaaagtcaactcattatggactttactcatatttacaaaaatacctccaaagaaacacttatattggtgtttggggactgtagtctagttaagttgacacatcacagctctgtagctggttcttgttctgcctctctctctatgtctctctctctttctgtcatacttagaactaggatatatgaaggatttggttggggggaaggaaaaatgaataaaaggcagcaaacaggaatgcagaataatgggaagaagaaaatttgaatttttttcagatgtctcttcttacagcaagagccctatttattcttgctaagggaaaagaatgtttagagatcttagctgccacgaagcttatatctaagtgtaccacacaattgcattaattttctcatcattgcaaaataaatccaagcttttcacattggcctacaatggcttagatgatctgggccttgcctgcttgttaagccttccctaattttattaggtcctataaaatccagcatgtttttcttttcctcagagatgccaaaggtcttcctcaaagagcctttgcacttgcttttctctttgccttaaagatcttcctcaacgtattttctctcctgggcattttattgagttcttagctcaattgttattaaatacttactcagaggcctttctggctaccttagctaaaggagtctcctcctccccaaattactgtatcctaccatccaatttcaatttttagtgagaagttgtatctatattaatcttagcgatttcacacgtttttctggttactgcatgtcttcactttattcatgttattgagaacagagaccctttttcttccctccgctaaatcatagtgacaatagccttacctgacatttagacgaggtttacctcatactcgtggaataaatagaggcatcgcaattcactttccaagtacaatcaatcactcctccatatgtgatagtttttgtcctagcttgtaccattgtattttctggctacatatattgttattgtaagttaccttacactattatttttggaagttgttagtgtatagtgtatgataagtgcatgcttttgcagaattaatgaagtgtccctggtgaggattctcatgctccagtcctgagtggaacagcatatatcaatgtcgagaattcttactggggaccacaagcgaggcagatgtcagaactgttttctgtgtgcactgcattctagcgagaggtgtggcagctgcaaaggattgagagcccagagaatgtgccttggctaaaagtttctgtattactccaccactctgatttctctgtactgtaaaatgtctcccatttggcatctggctcatctgaaactaatgtgtcatgtgttaggattatgcagagtggtgagaaggcaatgagcatctgggaaacaacgtgtgctcctgacaagtgctcaagtattagctaatgattttcaaaatatcctgggaatggagttggacacctattcattctcttacttgtgcttttgttttgtttttattttaaagaaacacttatttgaccctgcatttattttaagaggtgtgcaatatgctaactaaaaatgaagtaaaatataacaatctctctttcattttatacttctttgtaaagtgtttatgactaccttggaagttcaggaaagcaatacagttctgttgttttgttttgacatctccctggaattcatccaaataacactataaaactcctatttcagtaataaaagcatgattttaaggcagatttgctagaaaaatgctcctgaggtgcattgtcagagtctgctgccctgagaatcttccatctgactctgggagacacagctgtgaacttgtggaacatgttggctcaaggttcataattcctactctcattattgtttctaattatgatatataaacacttgattgatatcaacaacagtataaagtctggatagtggtaactacggaaggtgagggatgtgttagtttgagtgtagtgatcattttattatatgtatatttcaaaacatcaaattgcacacattaactatatacaattcctgtttaccagttatacctcaataaagtgagaggggataaagatcaataggaaattcttgtgtagtgaaattgtggcaagttctcacgggtgacctgcactctgctgttctttcttccacctgtgtaaagtacaagtttaaagagaataagaagaagctgagagttgcgaattacccataggaagtcagcactctttccactcatcactctgcagcctcatcatctccattcatcagtaggctccacatggcttcctggaggttagcaactctggttccttaattttgatttgttgctttggcgcttaaaggatgacaactgcctgaattttcatgaaggtacataataagccttatatgagatcttactataattaggaatatgataaatgtatatgatgttccatctgagcatgtgcacatgaacacacacacagacgcttctattattttgtgataattataatataaaagtgattttgaaattgtttcatttcttacattttcaaacactttcctatacttactctctcacaaccctttgctaataggccatgtatggtactctgttctgctactggaaattagtttaggaagaaaaattaacgaccatttctagtgattacatttcaaatgaaaaaaatctgccttcattttcagcgttaaaattgactagcctttgtttctagtctggctttctaccaaagcattattttatgagtgaaaaaaaatgttaagggctcaacagttttctccaaaatgtggaactctggggataaattttcactgccttctcctgactcttgtttctaagaacagtcagtatgctggaatcccacttacccctaaaagggaatagtaactatgccaatgtaaaataggaaccattcctttgaattcaggtcaaaaggtttactgtagggactggaaatgatgcaaagtagaacatactgtacttttattcataaggttgttccgaaggaagattctacattaattttgaaaatcttttattacaaatatactaacatcttatattgctatacagctttagagtttgcagtatattctgacatactttgatatattccacaatatgcctgtgagatagatggccagattctacatacacacacacacacacacacacacacacaaaatcttacaagacaatgaagttcttaggatatcctgacaccaaggacacacagagtaaacaagtaaaaatttttggaaccgtgtcctcagattcctaataccatatactttctgctgtcagtttcatagttacttgccacaaactttgtggactggataagttaaacaaaaaacatcaaatatggcaataaccctcagtccctaatagagttcagaatctcaacttcctattcatgtctattaggttagttacacatcagaagatcctagtcaggataggtcttaaccaaaataaataattttcttccacccctccctctactcctccaccattgcattcagacgatagaagccagttttagagtttaaagccactaattaccaaaagccattggtttaggcacttacagactttaatcattaagaataaagaattgccccgtggggaatgtgttttccatgcatatgctgttctaaactgaaaacaaactaggtaagaaaaataaacaaactgggtaagtgattactttctttttactttcttcatatgcttttttgtatgttaaaattttttttaagttgaacttcccatgaccatgaatttttaagttctgttcacagcattgtttttcacttaaaaattaaaaattgcctttgtgtaaaaaattaaaaatttaaaaagcagagtgtctctttcctggtacttgagaacataaaaaaccatataaaagtaatagggagaaattagctaattcaggttttaacatgttaatagaggggcaacaatgactagaccagctgtgctattgacctaggtctttgaggcctttcaggttgcaaagtagctattattctccttaagcatttgcaggtcaggcatggaaacttttaagcaggctctgactgaagtactagtttgcattctgtaattgcagtaagcagagccagctgtgaacctctcgggatttccccttattggactaagaatttaaacattttgctgagtaggcggtaaagttttcttctcttcactgccaccctcctttaaaaaatatactcttaatatgctaaaaagaaacagggtatgaaaataaaaaatgaagaacttatgtaaacacaaattttagtgctttttttttttttttttttttttaagacaggttatcactttgttgttgcccaggctggagtgcaatggcacaatcttggcttactgcagccttaacctcctaggctcaaatgatcctcctacctcaatctcccaagtagctggggctacaggtgtgcaccaccatgcccagcttatatatatatatatagtatatatatatatatagagagagagagtgtgtgtgtgtgtgtgtgtgtgtgtgtgtgtgtgtgtgtgtgtatatatatatatatatagtagagccatggttttgccatgttgcccaggctgatctttaactcctgagttcaagtgatctgcctgcctcagcttcccaaagtgctgtgtttacaggtgtgcaccaccataccagacctttagtgccttcttgaaggtcacacacgccaacatatggaaattaactggtactatgtgtactagctttgtagtagctgatacatcataatcataaattaaatatttgttgaatggattgcatgctaatcagctcattttttgcatagagttcataacagaaatgtatccaatgtatctgctattccaataactttccacaggcaatgatgcagtttgtcttaagtcagggatactttgtgtgaaaccaagaaatcagaagatgtaaatgacttaaggcaatattatcaccattcctggaaaaacactactgtctatgtttgtgatagcaaacataaaagcattaccttccttaggtgatgaatatgaacatttttagtcgtatatctggtgcccttagatgaccagtcagatcagattccatgtctttatgaaaagatggtgttctcgtgtcttgactctgatggaacaagctgcttttccaaagttattctgcaggtggtggattcagtaaccattagttggcattctcccttacaagcctcaggtaatcctgtgtgcacaccaggtttatggaccgaatgagtaccacaatggtttatagacccaataaaaactgtttaaatatctggtggtgctttacaaatatcttcatcccaggtttttcaaatctcccctggaatctatgcagccaaatgtgcagttgttctgtaactgatggtcgcctggatatcatttgataaaagtgtaagacgggttttttgtgtgtgtgtgatgccaattactgaggacttgaagatacgcatcttgaattattacatataaaaagattaaaaggctaaatatctatttaagaaatatctaatgcaactatagtcactgctctcacttctccatattcctgtgagtttttgttctgttccttattcttagagtgtaaagtgaatcattttaggaatgaatatcatagaaagtaaatacagggaacagaaagcttaatgcattcattattcattcctttccatcaatactctgaacacctacagagtgttctaggctcactggggaaacaagaatcaataaatctcattttctccccttactgacctcatgatcagtagaaaatcaacccgaataatctcatactgattcctccttcctgtgagtcctcatgcgttctggaaacctttggagggatttatcatagtccatattacttaagagtttgtgggcatttcttttatgctccttggtagatgttgaatgcctggaaggcaaagactttgttttccctatctttatatccctggttccctgtgtagtggttactccatgctatgggcttaacacatgtttttaaataaaaggttcaacggttttgcaattaacaatatataagactcttagctagtaattttgtatctttggggcctgttttctcatctgtgaagataacacatgctatatttcatgaagttatcatatcagaattagatgcattaaattttgcaaactgagaagcaaagcattataccaaggtacagacttattaaaattgaatatgtgctttcatttaaacatgagttgccatttaactatggctggtagttgcgtttgggggattctgttactattagtggaggactcaacaatcatatgctccataaaattgtccttccttacagtgctcaattcttttttatttttttttttgagatggagtttcgcttttgttgtccaggctagagtgcaatggtgtgatctcggctcaccgcaacctctgcctcctgggttcaagcaattctcctgcctcaacctcccaagtagctgggattacaggcatatgccacctcgcccggctaattttgtatttttagtagagacagggtttctccatgttggtcaggctggtcttgaactcgcgacctcaggtgatccgcccgccttggcttcccaaagtgctgggattacaagcgtgaaccaccgcacctggccacagtcctcaattcttaaacatagagttaaagagtaggatttcatgaagcatactaactgcagtttattctttaaaacttttaacctctgccttgtccataaatgtgaattattgtggcatatggtttcattcagtgtatgataaatattgtatgtcctttaggaaggaaactataaggtatatttctggcttgtcttggggatgaaataaatggcctctgcagtcatttccacctctggcttcagtgattaatgcatcctaggggaccaactttcttttagctataatgccagcttctatccttatttcatccctggagctttaggcagaaagggaactaaaaagtcatcagcttttattttatgtgacttttttctactcctgtttgggtttcacttttttttttttttttttttttttcattctgcagttagttcttcttgttgaatatctaggtttttatctaggaggacacctggggtgattgagataatgcaggggtgtatctggtgtttggaggaagactgtatgctcaggaggctgagaggccacagcacttctagtgccaaaagttctgtttatctcatcatgttactcactcatagtctccaggaagcttgcagccaatcaggtttccttgtttgtgacagttttttttttttttttttttttaaacctagtcttgctctgtgccccaggctggagtgcagtggcgcaatctcggctcgcgacaggtcttgacttgcagtgtgttaggcacagtagataagcattttgtgaaacagtatgaatggaaatcaaaagcaatttgatctaattttctcttagatttagttatatctcaataccaacttctaattcagttttatttttgctgattttctaaaaagatagttttcatcaccagtgtgaattagcttgtcattagatcttggagatctttgagatcagtggagaagtttcaacttaggcaggagagtggctttgtacaaaaataaatgttggtgatggcttatcgatattgttatttgagcccatgtgtgatgctttcattgcaatagaaatattctgttgtctcattttaaagaaactattattttgcttaacaaatattgagtgtctgcaatatgtgacataaaggaggcgcaagaaatgttttagacacaatagccatagttaaattgcttataaattgactttattaaaatgtcttaccatataatcattaacattcatatctcaaataagtgtcagtaatttaaaatgacctttaaagtcatgctgatcagtaattgtaaaaagaaaacagagagtcatgctaataaggtgaatagatgtgacagattgacgtgttgacatcaagggacaagaattgattcaggtaactaagtcaaactatttgctaaaatctgagccacggtatcttattttcttctgcagactctatccagagcaatgattcttccctagggtccatatttttcctgaagcttagggatctatgaagcacataaaattgtgtagatgtgatcatctttctggggagaaatctagagcttatactagattctaaaagtaatgatccagtaatgttaagaatcattaatatagatttttacttataatttgcttctccttttagggaaggcagtgtcagaattctagaattaagttgaaaaggtataaattatacaccttaatgctctcctttccagctatatgatctcaagttatccaaccacaatgtttttttaatatatgaaatgggcagataatcccttcactcctaagtgtcaaatgagatgagctatatgattggccagaataaactataaaatatttgcagacataaacattattactattgtttgggcttctgcatgtgccaatccatgatactattttgttgttgttgttaattgaaaattttattctattaccaagtaaatatatatatatatttttatctttccaacgttgccaacatagtttctcaaagaatgatgattcagtttttccatgcctttggaggcctttgttgttaaatgaatcagtgtaagtatctcatgtaccatggctgctgcctggtttacatcacagtggaggagaagggatcatcgctcaagggcagagcagagggtgtccctggtctttgtcagattctacagagggaacttgggggaactaattctgtttccttataattgaagtcaaaggtagactcagtgagtgagactgagggagaaaaagaaaagtggaaatgaatgtgatttgacattagattatgagttttaatttctgtcttgccatcatgcaatcttaagcaagtcataattcctttaagactcaatgttaattttttttaaaatggagattttaaataataatctcacaagattacgttaagaatgaaattatcatgtcgactataaagtgatataccagtttagatgttattaattattaaggcatagtcatttgcacaaaattctaaggtgcaaaataatttgatcactcccttggacttccttttgatgggctttcaatactgttgtatttattcaaacatgtatgaagtctatatgtatgatttaccattcctttggagacacaagaaatatgtggaatgcatcattaggtaagagcaaaattctcaaatcagaaatttgagactaactgaaaaatgagaaagtttgggagaaaaggcagagtgatgtggttatacaaaaaagggagacaaactgtgacttcattttagagaacaacagaagtgggaaggagatggtggtggcaactgagactttcagaagaaaaaatttcattctgaatatggcaaaatgggaaaccaaatggtgcagaagtagagacaattcttgcaattgaataaaataactggtcagaaatattcatccaactaacaaatggtttccagggacccttcactgcagcttactgtgtagaatttaaactaagtaacttaacaattgataacataacctgtatgtaccctttgtcccctgcccccactccaaatattactgctaattagaagcacatgttgaaggaaaaactctaataagacattccggtataagatctgggtttgctttaaatcccccaagcagcctaaagcccaacagaaggtatttagccttttgccttttgtttaaatggagattattttgagttatcaatagtgcaatactcccatcctgctgtcctttagtgtaaattaaggcaaaggacatgataacagtatcaataaaagagcaaaagtaaaaaataaaacgcataagattattaatgggtgacagaaaattgctatatacatcatagctggtagattaaaagggagtgacaaagagatgtcctgagaaatttattcaagggtttacaagagaaaaaaaaatgaaggatttaagactgtttaatctttaagaatttaaaacttttaaatatctctttaataagctttatattcacataacattttaataggattttatatagactaactcaattgtcaaatatactgaggcaggttgggtatcaggtatcctctaatacctattaaatagaatgaaccagagaagttaaaatatttttgtaaagttatgcagcaaataatgtgggagccaatatttaaactctggtcttctgatataaaagcttttgttttatgaactattcctagttgccaaggaagcaattacaaacaaaaaaaccaaaaaaaagaaaagaaaaaaatagccatttgggggcagatgcggtggcttacacctgtaatctcagcacttcaggatgctgaggcaagcagatcacttgaggtcaggagtgtgagaccagccagaccaatacggtgaaacactgtctctaataataatacaaaaattagtcgggtgtggtggtacatgcctgtaatcccagcgactcaggaggccgaggcaggagaatcgcttgaatctgggaggcagaagttgcagtgagccgagatcacaccactgcactcctgcctgggcaacagagtgaaatgccgtctcaaaaaaaaaaaaagaaaagaaaagaaaagaaaaagcgatttggccagatatttttaaatatttgaaattatttaatgtaatttaaataaacatacagcagaattcccatttttgatgtatagatcgattcccatcaacaaattcagtcatgttgaccaccacacagaaactaagatacagagcagttacgtcaccacccaaaattccctcatgcagcccttttataatcaacccctccctccttcccaatctgtgacaaccatttgtttgttctttcttcctcaagttttgcctattgcaaaagtctattaatgggatcaaacaatatgaatcattttgtttctggcttctttctgttttatgggtgaccaaaatcacatggagagtatgttattattttcctatgttttttacatatctgaaactgtgcaatactgcagaaacttctgaattattgtgtttattgtgaaactcaatgtccaaatagtgagacaaattattgttcaaattctgtcgcttaaagattatacctaatatgcctagagaaagtactaccaccaaaagtgcaagtccagctgtcatcttttttaggtgtctctctcattactaaacctgacttttgacagagtttatgaggaacaattattcatatgtgattatttcaactatccctttatctagtcctttggacaggattatttataaaagaggtctatgcacatttttagatgtctttatatcatgttgagtcttatcttgccacaataactacattaaatctttttttataacatcgtgttccgtctgaatattgtttacgaaagtattctgtaacgtgagcttgaaattgtagcaaaacccatgttaggaaagtaaatatctaaaagcagaaaatataagcttccctggttgccaagaaaaccactgtacgcaaatttctgtttattaaatatttggcggtaaaataacaaaattgttgaaaagaggagattgtcttaccctgagcaataggatatgaatatcatccattttttgttggaaaaataaacaacaacatgggattttaggataggaggtcttcagcagtctcttgcaaatagcttaaatcatggggattaaaaggcagcaaaaccaggtacagataacttggtaagaatagttacttcttttgggacttttacagccaagtttacaggaccagccacatccaaatggaatgaaggccgtatggtttgcaaatgaagattgaaatgctacggccaaacaatacagaatggatcctgagctcataaagaaatagacatgtactaaacatgagattactgaaagaaaaaaatcataagttttctttttgcagtcataaatgacaaaaatgtttaaaaataatagataattttctctcaaggagtatgagaaaagtacccagttggttctagatattttattttctttcacagatttctctctatatttttctaaatttccaatattaattttaataaaggtatatattctggttattttgaaaagagaaaacaccacaatattactaattcagttaaatcaggagtccacaacccccaggtcacggacccgtacaagtctgtggcccattaggaactgggccacacagcaggaggtgagcggcaggtgagcaagcgactgtatttacagctgctctccaccgcctgcattactgccagagctctgcctcctgtcggatcagcagtggcattagattctcttaggagcgcgagcgctattgtgaactttgcatgtgggggatctaggttccgagttccttatgagatctaatgcctgaggatctgtcactgtctcccatcaccactagatgggaccgtctagtttcagaaaacaagctcaggactcccactgattctacattatggtgagttgtataattattttattatatattgcaatgtaataataatagaaataaagtgcacaataaatgtaatccacttgaatcattctcacaccatcgccctaccctacctcctcacaatccccaccgtggtgcatggaaaaattgtcttccacgaaatcctggcaccaaaaaggctggagaccgctgagttaaatcacacctaccaaaaaagccaaaacttgaacattccttctcagtgactctgtcatagggtgacaatttaattttattgtagacaaagtttctaggaggaaatagtaaagcttcaaattctaatcttacaaatccaaagctctaaatgtacccataaatgttctcatgggttttgagtctgtgtccaaagttgaccttcatgtgttgtgagccaacctgcttgcctgcatttcctcttctcctctccttcctatccttttcctctttctcatccttctcttcctccttctttttgtgatgttaccaaaactttaatgttgaatttttactgtgaatttcttgagactaaatcacagaaattatggaactgaaatcttcacatgttgatttaagacatggaatttggaaaatattcaggctcctaaggcaattcatatagtaaattttatacttgagtgaatgagtcagcattttgacaacacacctacagaaatatagtgctttgaaaaaaaaatatttctctgttgaaaataaacaatgtagaccaggcactgctaccataaacatttctggaattgtagagataacaaataatttataaaaatccacttcagaataggatatggaaggaagcatatcctccatctcgttggacatgcatttctggagtttcagctcatgccagctaaatgccttgttactcccataagacagggatcttgtccaatcattcttgcattatgaggtatagcagtaggtctagcacttagtagacacttactgaatgttttggaataaactaaaaaatgataaagcccatcctggatcccacattgcccttaattgttgtctttttagtctcctctacactgtgccagtttcttggtctatacttgtcttacatgactttggtacattgagttctgatcaattatttctagctgagtcatttgaaatatgtatgtcacaaatcttagcttaaattttaaatttttgttaccaatctgcattttttttgcaaatttatctgattgtatctattagacttttagtgattttccttaaaagttagaaaagatctttgtatattaagatattaacagaaattacatttcttttttttttcgacatggagtctcgctttctcacagaggctggagtgcagtggtgtgatcttggctcaccgcagcctctacctcccaggttccagtgattctcctgcctcagcctcccaagtagctgggattccaggtgcctgccaccatgcctggctagttcttgtatttttagtagagacagggtttaccgtgttggccagactcgtctcgaactcctgacctcaggtgattagcctgtcttggcctccaaaagtgctgggattacaggcatgagacctcatgcccggcatacacttctttaaaaatattttttctaacatgataatgtaattttatgtacacaagggtttattttggtcttatttttcttcattttatgtatatgcatgttgaatgacattttttggttatatcttccatcacttttaaacatgagaaatcctttcatctataaattagaaatatctgcatatattttagtcttgttgttttatgtttattttagagcatttagtattttaattcatttttagtttattttattgtgctgtctttcatcacttctcagcataggaaatccatccttatctaagtgtcagaaatattcacatgtattttattccagctttttaaaaaaatatataacttgaaaaagcattcactacgaattatagtacgtactcttaattcatctgtagtttatttttagcaggatatgaggctaagatcaaagtgatgttttccaaatgatcaaccaatttttctaacatcatttattgattttatgtaatattctcattaattgacattgcctcatttttcctatattaagttcttttgtagtctaagatctctttgggggctaatttgttccactgattattttctcccattttctctcactaacagattattttagttattataaatttactatagcatgtttactttcattacttttaattttcaaaattttacctcttcctttttgccttttcatttttccattcaaacatgataatcattttgccaacttccaatacaatctcattgtttttattatttattcatttaattacttatttatttgagacagggtctcactctcttgccgaggctggagtgaagtggcacaattatagctcactgcagccttgacctccctgggctcaggtgattctcccacctcagcctccagggttgcgtgccatcacgcccagctaatttttgcattttttagacaagaggttttgccatgttgcccaggctcatcttgaactgctgggctcaagccatgtgccagcctcagcttcccaaactgctagaattataggtatttaccaccaccccagccaaaatctcattgtttttctaatattttaatttttcatatctcagtgaaattttgtatttttttcatgtagctatgacacattgcttataaagatcatgtgttcaggttctgtgtatggaatatatagatattatcttttctcattatatgtttaaatttatttttaaaggaatatagaaaagctaaacattttatgtaattatatatttttatacagctatttaactgaactcttagcctgatagttcagcacattatctttttttctttttttttctttttttttttgagacggagtttaactcttgttgctcaggctggagtgcagtggcacgaccttggctcactgcaacctctgcctcccgggttcaagcaattctcctgcctcagcctcctgaatggctgggattacaggtgcccaccaccatgcccttctaattttttgtatttttagtagagacagagattcatcatgttggccaggctggtctcaaactcctgacctcaggtgatccacccaccttggcctcccaaaatgctgggattacaggcatgagccaccgtgcctggccagcaaattatctttgtttcctcaaataatgatacattttgtcttctacttttctgtaattttttgacatcttgtttattggtcagaatttctagaacagggttaaataacaatgtggataaagattgctttaatatttaattattaagcatgtttttttgagtcagaaattatatcaagtgcattggtcagatactttaattaaaaaagcaaaaaaaaaagaaagtcaccaatttccttttgcctgttgatacttctagaggattatcagttgtgacagcccgaaacttggcatgtgaatgaataaacagttctcaccaaatgaaattgtcaagttgatgatatttaagaatagataggggtaacagtatggtgacttttaaaagtccccagatttctctgaattcttaaaatcttctttgtaattaccagcatgagactgagactaaataagaatttcacctttgatataaacacttcatggtggattgaatcaatggttctcagctccttggataatcaacttctattcagatattgagagctccaaactcaatggacacttaataaatactaaccacccccactcgaactcttaagagataatcaaatattgtcttaagaacctcaggccggaacactagaatttggcaagaaccagagaaaatttttctttaagtcatgtaaatgactttttgaattagtagtaaattcagggtttctacctctaccttagcttcctggaaatttctccctggcttcccccacactcctctccctagactgtgtagcccaagtacaaacatatcatccttttcttctctcatatcagtcagcagaggtatgtttggggcttttaaggaatgaactttctgaggagactcagagaaaattcaaacaattattaaaataataaaatcattgtaaaacatagagtgtctccattcaaacaattattaaaataataaaatcattgtaaaacatagagtgtctccattcaaacaattattaaaataataaaatcattgtaaaacatagagtgtctccatctaagaagcacagaattttaattaattctgacagcattcaatgaatggcaaatcctatgcagggcactatgaagattaaaccatggcacttgtggtcaaaaagatcattggtctaagttgtggcttctgatctgtggctactgagagagcccctcagatatggaaatatttgacaagttcccctctaattgtgtgtcaacagaaaagatggaggatgtcaggtctccagagtttggctgggatacctcttcaaacagatttttctctgtttctcccagtcccgaccttcactaagcctctaaacctgagtgctctgcaagagtagggcttgaggggaatatcagtcatgtgtattttctcttcactatgctggatgagaggccagcctaaaaattattccccagttgagaatggctttgctatttctcttgctaagtatggtaattttttcctttaaaagtgggaataacatttaatgtgtgtctcttatttggcatagtactgtgaaattttgcttccatatcatggaaattgtgagaattatcaatcattcttctagaaatatgtggaaatagagggaacttattgacaggaatagaaaagcaccttaaataaaagaccaaggaatagggtgcagagggctcaagagacaatatgagcagaggaggtagtggaagcctggttctttattttttttttttttgcgatggagtcttgctctgtcgcccaggctagagtgcagtggcccactcactgcagtctccactttctgggttcaagtgcctggtcttaaaatgtattccgtgaagccagagaggaggtgaatgctcagacccagcacaaaggacctcctgtgtgcaaaatacatgcaccagcattgggtgggaagagcagcagagggaaatcctgagcagtgagtgatagaaaataatattttatgaatcgattacccacttaagattcattaaacactaaatgttaacagtacctacaggttggtgcaaaagtaattgcagtttttgccattgcttaaaaaaaaaaaaaaaggtaaaaaccgcaattacttttgcaccaacctatatctaaatatctactttattttagtgaaaatacaacaaatatgtacaagcccttttatagtttaattaatgacctctttctctataacctgatgtttcattataaggtcataattcctcagagttaattattttattccagtactgttcaggtacccaaccactgtccctcacgtgggttaagaatgggttactgtattttccacagtggtggaattcgctggctgtgaaaccctgttcttgcccttgtggatagaacacagagataaaatgccacaagatgtgtttacatcatctttgcttcatggtatagtattatctgttgggtggtttctctgtccagagctaagtggcggagatttagttaggtatcatagtttaaaactacaggcctcagagccaaactgcttgtgtttgcattacattatctgttatttccaacccatttgtttggtgaagttagttgtacttctcagtgcctcagttttgtcatatgtaagtgagaatgatagtagtacctaccttataaaattgttatgtgtattaaatgagtaaatgtttcgaaatcacctaaaacagtgcttggctcgtattgtagaaggcagttatgttttaaataaagtataaatattttctcctagcttatccccttttcattttatagcttcatacacccagcaaatattcattgagttttgataaatactacacacttcgcagattgggaaaccagacctggttattagaacaactaatacccgtatgatattttcagtttatgaagcacttcttattttactttaatctttatgttaccagaaagggagggttcttggatctcccgcaagaaagaattcagggtgactgcacagaacaaagtgaaagcaagtttattaggaaagtaaagaaataaaagaatacttactccatggtcagagtagcccaagggctgctggttgcctatttttatgattatttcttgatgatatgctaaacaaggggtggattattcctgcctccgctttttagaccatatagggtaacttcctgaggttgtcacggcatttgtagactgtcctagcactggtgggagtgtagcagtgaggatgaccggaggtgactctcagcgccatcttggttttggtgggttttagctggcgtttttactgcaagctgttttgtcagcaaggtctgtatgacctgtatcttgtgctgattttctgtctcatcctgtgacttagaatgcctaaccatctgggaatgcagcccagtacgcctcaggctccttttacccagccactactcaagatggagttgctctggttcaaacgtctctgacacaacaatactataagaaagagattacaggaattccccaaaatttgacttttaagtaaacaggctaaaagaaagggatgaatttattcaagttcatacacatcatgtaaaagctgagacaaaattctgttaaatttcattgaaaaaatgaaatgctgccagttttgtaaactgactaacagaacctccccagatgaaagaaaaatgttttcaagggcccgagaaataatggttaataaaaacaaaaaatcaaatcaaaataaagttagcaactctaaaaggtactttcccttactaaagacaaacacttattattttggtctttaaaaagtgtactgtaaatccagtagtaaatttctaaaattagcttttcaaaaaaaatttttttttggtccatggtcaggattctgctcttgatttacagataatttccattcttatgggaagcattgatggttacttctaagattcccgactgaggtttattatgtgttagtccatttgtaaatgaatcagctccaaaaatatctcgaattcattttattttctttcattcatacttctatttgacttttatctattttggggctgcaatataaagagaagaagatgtaagtgagacataatgataatagctttatcaaactcttatatgcaaaggagagttctaagttcttaacaaatgccaatttacattatccgcatcataaccctcacaggtgaatactattattatgtcttctttatacttggggaaaatgaggcacagagaggttaattagtggtccaagaaaacaaacctactaaattaccagttaaattaaaatccagccagtttagttttagagtgtacagtcttgactaactcaccatgctacttattaatgattaaaatattaagaatttaaaaagtaattgagggataatgcagcttggtttttttagcctgcgaaagagaaaaataaaagataataatgttatggacttttggcttacaaaggatgaaaagttacggtctctgagggaaattattcctggagaaacattatgttagaggcaaaaagaaaaaaaaaagttctactagtgactgtggttgaaaaattcagatgaggaaatgattcattaagcaggaagcccccatttcgtaggctttacatattcataggtctattttaagagctaaatatgacagcatatatcaaggactcgacagagtgccacttgtatagttcctttaagagtctttttaaaaggctttttttttgtcttttgataagtcagtctgtttttggactggattttcctctgggtatcaaggacaaaagtacttgccacatttatggcagtgttagggtggagaagggtttccatttatgatcatgtgtaggtaaattgaaatgactccaatattaacattgtctgtaagaaaaatgtaattctgtgtgttttctctcacattatttgcttgaaatcctctttttatattctcagtctttcttttatattggggacgatagagttttcttctgctagccttacaaattcacatcattgcagatataacaacctgtagaggtaccaaagcagacagaaggcatcagacacatttaccaagagccccatcaatgcatatgaaagaggaaagtaaattcagactgttggaattcatctatttacaattttttttctttctttctttctttttttttttttttttttttttgagagggaacctcactctattgcccagtggcaatatcttggctcactgcaacctctgcctccccagttcaagtgattctcctgtctcagccacatgagtagctgggattacaggcatgcgccaccgcgcctggctaatttttgtatttttactaatagtaaagacagggtttcaccatattggacacgctggtctcgaactcctgacctcgtgaaccacctgcctctatctcccaaagtgctgggattacaggtgtgagccactgcacctggccaatccatctgtcgtaaatagtaagatttacatattatattttttgctaacatttatatattagctgtatactatgtgcaccatgtgtactctgatagatattttaaaattcaggaacaattatttatacacttaatttatttcataccaagcagggcccctgcattaaaaaaactgcaggggcaccatgcaccatgtccttattatatttaatattatagtatatcctctaaagcacatatgtttatattttacagatgatgaaacgggaccctaacagttaaataattcactttatatctcaccagtaatgtgtagtggatgcataaaaataagtggtattggtaacagagctttctggacatcatgttgcctttgtaatactatgtaaaacattagtacattaaacctaacataattaaatacagttgaacaaaatacacaaatatttggccttcatagcaaatccaatctatggacttaatcttttgggcttccaagtgtagacttgcacaatgcttttaaatactgccaacaaattttacatagataaatagactctcattgacaaggttaggttttgtgtccccacccaaaactcctcttgaattctaatccccataatccccgccgcccatgtcaagggagagaccaggtggaggtaattgagtcatgggggcagttttccccatgctgttctcctgatagtgagttctcacaagatctgatggttttataaggggctctacccgcttcactcggcacttctccttcctgccgcctcgtaaagaaggttcattgcttccccttcgccatcctccctggttgtaagtttcctgaggcttctgcagccatgtaaactcttgagtcaattcaacctctttcctttataaattacccagtcttgggcagttctttagagcaatatgaaaatggagtaacacactcatcatctttataaaaaattgaatcacctgccagtactttacctccattcccaaaacggcaattgagtaaggctatttaatttgtcatcagtttcaccatttcttacagcagacttatagtgtagtccttggtcagcagcaccagcttcacctgggaacttgttagaactatatgtatatattttggctgggcgtggtggctcacacctgtaatcccagcactttgggaggccaaggcgggcggatcgtgaggtcaggagatcgagaccatcctggctaacacggtgaaacaccgtctctactaaaaatacaaaaaattagccaggcgtggtggtgggtgcctgtagtcccagctactcgggaggctgaagcaggagaatggcgtgaacccgggaggtggaacttgcagtgagccgagatcgcgccactgcactcgggcctgggcaaaagagtgagactccatctcaaaaaaaagaaatatatatatatattttttgccctgtattggacttacttaatcggaaacttcggaggaggggaccagcagtcacctatgacccctaggtgattctgaggcataacagaatttgataaccactgcctaatggttttataaagtacccacttcattattgatattatctgcctcgcctctgaaggcatttggggttttgatctatttagaaaccctctaaattgccaactttgcaaatagagaaatttgtgtatgtgcatttaactaacaaataatgtttcttggaggataatatgttaaataaaaaagtatatacaagtttattctgtataaaatacctaaaggagactttcacttcattatttatatttcataaagaaacaaaggtcttatggaatcctgagagttactgcattagttaccatgggtttagaaaagcaaagccactttgggctgaacattttggtcccctggctggatctgttttcttgaatgcacaccccacccctgaggggctcatttgtgccttaaactacaaatctactacttcttaaaagcctttggtcatttccagagagctaaagtcacaaatgttacatatgtaaattttaagaatttactgtttattatatggaatattatttgtgagatgctctttaatgtttactataagaaaaataaatcaatggtaaaatttgtttctcagttattgggagaagtctggttagtcatttgtaaccaagatactctcaatactctttagaggctaatgtcattgtacattcctagaagaacattatttttatcaatgtatccctaaaatagtaattggcacatgatatacattcattacatatttgttgaatgaataggcaataaagtatcactgacagcttttaagaactgtcctgtaatgtcagttacattagagaaacacactatcatataatattgtacatagttgtctaacgaaatccagaatttacaaatttagtaccactggagtagatcctcaaggtcagagatgcttattttttaaacactcagatcaccagtacctagcattatgcctggcacatgaaaggcactcattaaagatttattgaaaaagtgaataactgggaagatggatggaaggatggatgaatggatgagtgggtaggcagatgtacagctagctggataggcatctgttggtatgaatattacaaatgtgtgcaatttaagccagaagtatggattttattttttaaaactgaaagagaaaagtttacataatttagggatgaaatatttggagagaagagaaagttacttttttaaaaaaggaaattataaaagaaaaaatatatttggctagaatttatgcattataacattgttgaaaatctatttgttacagaacaaaaaattgaaaaaaggaagactttaaaaacaaactgaaatagtttaataattgaattttactttttcaatcttaaggaaatgacaaaaaatagagacaaaggcaaattattgttttaatgagccacattgatgcataagaaagggaaccactgattgtgctcatttctccaccagactaaaacatctgcataaagggtgaaaaatctctggaacctcgcaagcactttttgttgttttattaatttttcagaccaagtttctgattattggaaacagttcatggtggctgctttgtaaatattggtttccagatggctgtagttggcattatttagaataaacatctagaggactctagcctggtgtaaggcaaagatggttacttagggtcctggggtctcagatttttccaagtgactttgaaaacattattttgcctttttgagtctcagtttctctttttataaaactgaaggatttggactaaactatacttaaaagttccttgcagttccatagccatccagcttttaccccaatattttaatagggattttgtagacattgctttcttttgtttgacatttttgacagatgccacctctccttggaaaaggactccttaggaagcctttctaaaaggccagttaggcttcaagcacttcagcaggcttaaagtaatcaacgtgtgggtagcagccgcccagccagaccatgcataggaaaaatcaccacacccctggatgggcttcaccctagagacccacgctaaactgtgaccctatttaactttgctgtgtatctggcactgatgagacataggagactttcatgaaaggggaaagctctgacttttaagatgagacctggaggtcaggcctattgagccataaaaaagatgctaggagggaaagtccttaaagaactgatcgtggcttctttgaagttaccactgatattaatactatatttgggaatccagtaagctgctttatttttttaaaaagaagaaaaacatgtttggattaagatggaaaagagaaggcaatcttggttattgagacaactcttccactctttcgcaaaagaaaaattctaattcattttacttttttctaaatcctttgacgtttacattagcaagatcacacattcgtgtgctaagacttattcctgatttcatatccagtgctgttcagatacctggtgtaggtttcctgaaacctacagtctctgttttgccagaaacctggtgttgaacgccttagcctttctgaaggtggcagccaccacagataatggaagaaactttgaactaatttgatagcttttcaccatatttcagcagtagaccaactatgaacctttctaattaaagtcttcaggtttgtgcccccacctgctggcaatgatgactactcgcagaattgtattcatggggtaaggtatgttaaattttattctcatcattattatttatatccactgaatgcctactcttctgaagcacttgagataacatgaaacatatggcaagtccttgtcatcaggatggagacaagacatacttaaatagaaataattacagaagcatcaattgtgggtttgtgagtatatatatatatatatatatatatatatattttttaatttctaggtaatgtcacatggattttttccttttcttcctcacacaacttcttgaggcaacccaagcaaggatcatcattgctattattataaatgaggcttttgacaggaggggggcaatggagtggcttgctgaagtttcaaaaatgaaagacagacccaggtcatctgtcttcttactattaaaatgtgcaaaattaatggtaatagaaacgataatgagcatccagacatctatggatatagggataaagggacagtcatcagcatccagacatctgtggatatagggataaagggatatgatttagtctcatcatgtaagaataaataaataaatgtcactgaataaatgctattgaatattttgacaatttttcggttctgaaaactacatttaaactctctcaggtattctgaatatgaagttttcacagtggacttttggaatggaaagaaataccttattttttggcataagaagtggcattcactccaggggaaatgtggctaaaaataacatcagcatccttaatctccattgcctgagaggagcctgtgttgacagacactgggagggccagtcttctttggtttccctcgcttctgtttgtctaactagcccttccttaaatgccaagtcagaaaagtgactgcattgaatcttcccagctattgaaatgaatggcaattatcttggctttctcaaggcaggctttggtcaaaacatattcatatgtgttttggagaaggatgagtggcataggatccagtagtttcttcctgtgtctgtcacagtgacactaagatttctgcatgtatttctgtaatatcctgggccattacggtgtaagaagtttgccgatggctgtattataaggaaagatagaaatacttgttctgacctgaaagagtgaataatttagaaaggagtacaacagtcttaagtggggcatacataaatacatcaacaagcacttacagttcattccctcttatgcctatatctaacttaaactgcagcattaagtagtggagttagcaaggcacttatctttttatccttttttgagtcagggtcttgctgtgttgcccaggctgaagtacagtggcacaatcatagctcattgcaacctcaaattcctgggctcaaggaatcttctgtcctcagcctcccaagtagctaagattacaggtgcttgccaccatgcccagctaatttttaaattttttatagagacagtggtcttgctatgttgcccaagctggtctcaaactgctcgcctcaagcaatcctccctcctcagcctcccaaagttttgggattacaagaaggagccactacacctggcctacttatctaagccttgattttctcatctgtaaaaatgggactattaacacctgatttataatgatgttaaaaggattaaatacaatacatgcattttaagtgcttagcaaggtggcacaatacatgataaccatgattttgttattattattattttgtagaaatgtgcatctagatgcaagagagattgaattagtggcaaatgtgagtgattagttcatcaaggtagaccacaatgatgggtgaaataagttaaaatcgatgttaaaatagaagcaatctttgccaagtagaacaatacttccttacaaagtttcatataattcttgaccaactgcttgtgaaacctttcataataagaggatgaattcataaggaactacagaatcggtcactgtgacttcagccacctgacaattcatgagaagggtaatctaaacaccttttttccattgacgtgctcagatctgttgtacttgggctagtatttctgtgtatatacagagacatatgtgtctatggcattagcaagttctctttgccattgaagcacttttctgccctcttggggccagttttcaccattccaatgtcctgagtaatttggctttaatcaaaaagtcaggatcattcaagtcaaagagaaaaacctttcaggaaatagattgtagaggttttcttgtgaatccacaaacaaagtgtttgctccttctccaagactaactaacaagggctgcagcatcagccatactcagcaactcggcacatgcataatacattgtggcttaggggtgtggctcgatggcaaacacataacggtactgctggtggtgaatgtgctgaagagaaatccagagaagaatttctgctaaaatccatttcccattatgcaagctgtcttcaggacttgcttttgttattgtcaggagtcaaatatatttaccacgctgttactggctccatatagtcaacagttcttttgcatccatgtgtatgctctttggcctctggaaataatacctttttgaaatattttttgggggatgattcccaaacttttgtaactggggaagcaacagtattatttttttttccctgagagagcagctgaggtggcttaaatttatattactaaatagaatttcactgccccagtcatggctaatttatgaagaacaaagaaatgacattgctgtatgtatcatgtatctctggttctctgaacaaaattcttcaggatatggagagacctttcctgactgacaggacagctggaaagggactaaggaacaaatgggaggaaacacagagaagatgcagcagctcccataatagagatatgcatgtatctatctaaaggtacattaagatattggcagctcatgataaaaacattcatagaagaacaacattttctactgaattaaccacattgattcagtggactcatacttgaatggctaccttagatctatctggaatggctgtgaccaatagattgagggaaatttggtagaaattctaagaagacaaagtataggactctggaatggccaaagctgcccaaagctagaatgggctgttttggaaggtagtgaatgtcctgttgctgaatgcgtgcaagaagggggtcatgggacaattgacagaactctgcagaagatgcaagtaccagaggagagagtggggtttggccagatgactcttaagaacttttcagtctcagattcaacggaaaaaagcaatgagactacattaaacatatgttggagttttaatttgcaaacttggcattattattattattttttctaaccagtttagatcacaattggcattcatttcacaaatcacatgccagattaaaaaataaaataagcaggccgggtgcagtggctcatgcctgtaatcccagtactttgggaggccgaggcgggtggatcacctgaggtcaggagttcaagacagcatggccaacgtggtgaaaccctgtctctactaaaattacaaaaaattagctgggcgtggtggagggcgcctgtaatcccagctacctgggaggttgaggcaggagaatcgcttgaacccaggaggtggaggttgcagtgcgccgagatcacaccattgtactccagcctgggcaacaagagtgaaactccatctcaaaaataaataaataaataaaaataaaaattaggatttggtgttaatattcccattatacacatgaggcaattaaggtaaaacaaattaggatttatcacataccaaaacaagaagaatggaaaatcccatcagtgatatatgttgtggatgttttctccttccaggataaggaagccacagataataaagaggcaaaacagcaagctaaagagcaaggacatttaatagaggtctaccctcatgcctgaactttacgggaaatagtcaagaagtagaatgcaagcacccccaccctccaacgcagatacacacacatgcacatgcacacacacatgcacacatgcacaaatttctccacccaaatgtcccctaactgcttacttccagtggaccatttatctccagtcctatccttgggcagagcttcagtccaggcagggtgtagcaattatgatcttgtctcaagcagccctccaagggcactggttcaaccttagcttggtcagggaataaccaaaagattgaagtaatctctgccctctttaggacagttccaggctgagtgcaatgatgctgagataaatcatatcctaccaatatcagcttgggaaaatcagaaatgctggacctactcttggggaggtattttatcttgaggagtagttcaaggttggtcgaaagaagatgattgagggagacaaaaaaagttcatgccagactcctgggtcagtgctatttctaccatagaacgctggtattggcatgaagggaaaaccgtgggttggaatcagttattcttcagtgagtaaacagagccaagggggctctgagtaaggcttgttatacactgaagcatgcttttacattttttcacaatttagtttctaaagtggattaagcagattatactatttaagcctttaattcttagaatttatagaaactaaagagataaacataggaaactggaagtcatcttaaaaatcatgtgtcctaggctagatgcagtggctcatgcctgtaatctcaggaaagtaggcaacatagtgaggtttcgtgtcagcaaataatttttaaaaattagccaagcatgatggtgcacacctgtggtcccagctactcaggagtctgaggtgagatcacttgagcccaggagttgccggttgcagtgagctatgatcagccctgcactccatcctcagtgtcagagtgagactctgtctctaaacattaaaaaataataatgaaataaaatcatctggcccaacccttcattttacagatgaagcagcagattcagagatattgaatggtttgcttaaggtcactcgacaggttgccagcagagccaaaactagaattcctctcttctgatgtctggtcttacacattccctcttaccaaggctccctccttcctcacaagtctagtaaggaagtttctgtggctctgaaggcaccagccggggagtatggaaagagtcatacagagcagaatgataaagaggcttccatgctaaggccagggaattagagaagccacgaggccaccaagagcggcaaagaagacagtgagcttttcattatgactcaagccccagaagatgtgggctcaagattggtgtctatgttcactcaaatacaaccacaatgtgaatgaaatctctcctccttcctaatgtcccatttctctccagtcgtcagtctcagatgcagccaattggagcttctttcccagtacatagcctgcactttctaggcagcctgctttcatcagttacgattgctttacctagaagataaccttttcaccttaagctgccaaaccctatccatctgtcaaggttgatcctaggtgtctgctcctttaggtagagccttacttctctctcctaaatgatatgcttctcacgtagccatacctgtggatcacctatctacttttctctcagaaggggtgaaattatttgcatcaaaataggagaaagaaatatcaatgacaagaaatcctgtaactttacaaagacttgaaatagttattcattccttcattcaatcttttagttcaacaagcctgggctgagccctgcttctcatattcaaatcacatcttttcctccaggatcagcacaaatgttacattcttcatgaatcattccctaattcctcacctgtaagcaataaatacttctcataaatcaactatttattgtccatattttgccaccaaatttttttttctcgctagtagacagcaaatgcccagagagtaattttcttcaggaaaaatatcaagaaaacattacacctacttttttcctacttaaaaaaaaataagatcaaagctaacatttactgatactctactcacaccaaattcttgatctcagtgtaatatttcatatgcagaaatgatgaagtgatgatttaattacatcttaattgattttcttctctcgtggaggattttcaagctattagcatttggcagccaggaccattccacttactctctggacctgtaaaagatatttgaaaactgagcctcaggcaaagccagggttgttaaaatcaccatttccctaaaggatgttaaaagtcctaagggaaaatatttacaaggaaaatctgttttctctttggaatttacagatttttatttgtctatttttctcttcttacatgtctcacccttgccctgtcctatgtggcaggaagacacatccacttgtccttccacagatgtatccatcatccagtagctgactgaattctacaccttttagtaaatgcctttcagcttatcaaagtttgctaacagatcttcaactgtcattggtttatttctatttttaactctttagaataacttactagttccagtttaactaaagttcttttgaaaaacagctatcaggagactgctatagtttgtaaccagctgccataatttttaaaacttggtggtataataaattgagttaggtgtcctttctatgtgttctcacatcattctcctttgcacttgactcatcacctgatcattgtcatgtgtatttactgtgtagccctcccaatgctataatctcttattatattcatatcaatatatatcgaagagcacatccatgccctgtgtgcctatcacgcatagttggtaactagtccacagtagcccatccagggctctcagtcagtgtttgatgcgtgaacaaccatatgaacagcttttcttacagtccttattgagagcccaaggtgtgccaagaagagttagtcactgggaatacaacgatcaatcggaggcacatagagacacagctttttatgagctaagcggactttcaagtttaaagagagaaactagttctgttttttatacagatgagtttttattttgacttacaaaatctcttaatcttctgtatactggtaaacagtgtcttcagaactctgcccccagagagccactggggggaatacagacataacagtggatgattataatactaccagagaggcaccacgaggggaagtccagaagtggatgggatcatatgggatttagttgttcatggaagacgtagcagaggaaatgatgtttaagctagtcactacagatgagtgagaaataatcagtcaaagatttggaaggagaattgcccaagaagaggaacactagaaacccagaggggagactgagtggaactgagacaaaattcatcaggaccgtattttagaaaacagcagagaataatgagatttaagtctgagcaggtaaaccacgagcagtcaggcaagagcttgtgagtcatgtttaggaatttgaactttatccttagaccagtggggagcctttggaagttttaaatcagagagggataagatcagatttgcattttagaaagatcactctggctgcagtgtggtaaatagattaaggacagcaggaattcacaagaaaatttcctacagctgttttcctttgtacatttaaatatgtcccccgccccccactacacacacacacacacacacacacacacacacacctttacctacacacaggcacacacctttttgaaatttcacttgtcttatataaactatataaattaaattgactggtggcataatttgtcccaatttcaagatgaagccctttcatgcttgaaatatttatttaggaaatcatgactaagctctacctttgcttcctttctcattctacttccattcctgtttcttcatataccacacatatgtttgtttttaaaattagaaaacaagaaaaaaattagaagtagtcaattattaagtctcatttctccatgtggatatcatgaccattaacatttgatgtataacatttttctagtgaatttatgttacatgagtagaatcatattatccagaatgtcatacaatctgcttttttcattcgagagtatatcatgagcatgtttgcattctaattattctcagtgggcatataatactctaccatatgattgtgttgtaagttaatctatgcccattagaaattttgcttttaatttaatcagaccatagtttatctggagtcttaaaaaatctgcttgacgaaattaagatgacattccccaggcagctctttctgtcgggtgctctggtatttggggttttcagcacttttcagtaactttaccagctaatcaaaataatatcagaaaagtatcttccctttgggaagctttctgcattaggaaaactgtttacttccaataaaataagtggagatgcttaaaggaagagggtcttgatcaaacttattttttaggataaaccaaaatggaaggtttaaggaccataaataaaaacaaatgtatcactccagaatgcttacaaaaatcatttttcttgaattgtttagtcttattctgagaaagtataaaagaaaagcagacattttcatttttgcatgaaactctattttttttttttttttggagatggagtcttgctctgttgccaggctgcagtgcagtggcgcaatctcggctcactgcaagctccgcctcctgggttcaagcaattctcctctcagcctcctgagtagctgggactacaggtgcgtgccaccatgcccagttaattgtttgtatttttagtagagactaaaggggtttcaccaagttggccaggatcgtctcaatctcttgacctcctgatctgcctgctttggcctcccaaggaactatattttttcttaactttgtttcccattctgttttaatgtcgtaatgagtctaccaaggtcactttttgatacctttgtagaaagaacactggattaaaagttagaatactttagttgccagcattgtcattgatcatgctgggaggatatagtagagcttaagggtgtgatttccggtgtaagacagaaatgagtttaaagtcagattaaattactatttttgaatttctcaattgcaaatgaagctactgatgccaaacttgttattttcagcatatattagtttgctagggcagccatcacaaaaaccacagactgggtaggttaaacagcagacatttaccttctgactgttctagaggccagaagcccaaagtcaaggagtcaggtttggtttttcctgtggcctctctccttggcttgcagattgttgccctcttattgtgtctttatgtagtgtttcctctgtttgtgctcgttctcctggtgtctctctctgtgtcctaatctcctcttctcaaaaacaaacaaataacaaaccaaaaaaccaccagattggattagggcccacccttatggcctcattttaactcagtttcttctttagaggtttcatctccaaatacagccatattctaaaatactagttgttagtacataagaattttgggagacaccatttagcgcaaaacacgtggtaatacatttatttcaggtctctggtgtattacatgtttaataatagtggcaactattattacctgacctctctgaacttcattcttcttatttgcaaaattgggatatgaatatctgcccagtctacacatgatgatgacttaagattatttatattaacattctttgtaaattaaatggtagaatactcttgtgtattttaggcatacacgcatatactcaccatcttctctttgagaatatgcaagttgcatccaggcatttgctgttagcttctttttacattaaagctggaagttggaagggtgggacttaggctcctagtcatcttccttttatttctatagggtcttagcgtcctcagctcctagacacacagatttaataagtttcaagtcatatagcctttcccacagtacttcctctactcacatggggcaaggagcaaagattaatgaaagtggaacagaatctctctgcttcactgtctccatgtagaggcaaatgagatttcctctagtgcctcatgggagtgtttccaaataaaaaagaacaaaagctgcttatattatttcataataaaaccacatgtttttctgggtagaaagagtagagatggcaactctcagatggaaggctatattcattttaatgacttggctaaaatttctctctggcttaaaattgggtttgctgtggagtcttcaaaatatgaaacgttttaaatgaacagaaagtgagtcttccagaaatgtgaaatgtggaagtgtagtaccttattgggatgccctaccaacggaactgctggagtgtgagtatgcaggttgattccataacactcagcattcagggccaggtggagaactggttggaaggagtagggtatactgccacgcattgctcagtaagattgatctaatccagctctctcgtagaccatcctatgctactcgaacaaactaacaacatagactttctcctctctcagatggagatgtttctggaaggaaatttttagagctacaaatcactcagttgctttacaagtttcatgttctccccaaaataaaacctaatatgtgcttaactttcaaaccccaccccactttggcatcagactaccatgttagtattctttgctctttcaaaccccactcccaacacttgtactcctagaaaactaactctcaaatatagatgacgcttttcctctgtgtcttactcatggtgaaatgcccttcccagcacctctgcctgttgaaatctcatctatccatcaaggtctgttacagatgccatatttgtagtaagatccccatgaagacttttcagatccatctattcagaagttctttctcctactttgaatacttatagaatttctttttacttctcttaagggcccttacttaaccctaaattataggtatttgcctgatttcccaccccaccccccagattcactactaaaacacaggaattatctcagatttctccccactgttcccacctacccaatggccagtacaggcccctcattaaatgttgctcgggtggaatggaaagatgaagtaaagcagcctgagctttagaacctctagaaatagaaagctcatagtcctctctgcagacaaagcaggactccatatgtggaagtgcatagtggcagtcttttcttagcacagaccaaacatgcagctgctacactctgccacactataacatttcaaggggaagggagccaatgtaaacccacagtatatacaaaattggaatcagaaaccctcagtttttttaaccaccgaatataatttcacagtctatttgatataatttttctaggctgtggttcaattcaagccagtctcttcatttaaacacaatcctatagttatcttctatacttactagcagtcactttgcaactttaatttgcgttattctgggtggcatggagaaactgatgtctgccaccgacttttggagagatacattttgggtctgacatttttatatgcactgattaaaaatggtagactcttaatttccctgctgaagaaggaagattgtccacttagtctcaggcacagcgaactatactaaaaaattattaactttggaattaaaagaccaggtttcagctcttctgtcagaacccacgtgaccctgagaagaacacttttcactctatacttatcttattcatgtaagtatattagggaagcagatgtcacagcagatgaagagctatttcaatatctgcattcgggattctgggatcacttaggtcattattttataattaaagtcattcatcaacgttactgaagtttactatatatatatatatatatatgtgtgtcaacaaatagagtctcaggcagctgattagttttttgagccagtctgaagcagactagaaggtttttggccgaaagagtttgaaaaatgtgaaatacagtgtcccatttacacagattaactgttacagtagtacataaaaaaaaaaaaatctgaacgctgtatcctaaagaaatgtgtttaactcttactacagttcatcataccctttgttaattataaaagcatttttataagtcttatgaacatctagggcaatacatttcttagcaaggtaagggctgacaaacatcaaaataaacatttttttttctgtccttcttggttgctctaacttatttataataatagattgctccttcatttaggaaactcttctctctggctttctgtctgggaaaagacctcaagtatgtctcaagtgaagactttgctcgatatttggttgatcagatctcttgtcaagatgcttgacttctaggaagatgtacttatttggatgccttttcattatatcaaacacaaactagctcaaagtgaaatgaaaaatttctccaacccacaaccaaaatttgtagccacctaaaaaatactatttccattgctattaccaccatattccaagttaactagttttgaaattttaagcatgcctttagctttgcatttccctttgaccaacttacttctctgttatatgagaaagagaagtacaagggtttccccaaaattttgcctcttctccagtatccctttactcccacttagtcctacaacaaccaggctaatgtttccacaactaaaaggatattataaagtttatcataggcctccagtcttacactctcctccctgccaatgaggaagttctccctgccaataagtgaaattttacctcacgtattttagtttttacttttcacagccctttttggaataagagagatatatttttatgactacattcacaaacatgcacatatagataatgcatagatatatctatctgtttccccttttccgggaataaaaagcaaaacaactcaccttagtatcaaagatccccataatccagtcctgttccaccttgtttcccattactctggaatcgaaaccttccacatgagccacgttatccaaaacactatcttataaatagatctgagacatttctgctgtaacattactattctgcagctgggacatccacatgttttctgtttttcaagaccctcagtcctactttctcagtgagtcctttcctgaaccttccaggttactgtgatttcacatttctcctaatttttacagcattatattgcctgccacccacccactctgccctaaaagcttgtaaattcccagttcttgatatcaatagtctgtgtatgtcttcttgtcctaactgggctatatttactaaaagattaggatcctgtcacatttattttgtatcctcagacacttgtcatctatcacagttctatgactgaagtgaccagcaaacctgttacataaacaagacatgcacaaactcacctctactttgaaatagtggtgactaaaatcccaagtgtctatttgtgaatgtttgttttaatcgaagaggtagcttctaattatacttctgctgctaatattctaggcaggttctttatccacctgtaaaatgaaacagtgggactatatgatataaatagtctatccagccctagtcttctatagacttaattgcaattagtatttataagatcaatgcaagtgccacaaaaataacaggactgatgctactcgatatgtttagtcagtaagtagatctctcccaaactttagctttctctagaatttacatggactagaactttctttctaatatagtctcttggctgaggtacaaagaaaatgtttgagtttatatttaacctggatatatggtagggatatttcatatactgtacagcctgaaggttattgctgtggctggatacttataaaagtgcaggtgtgatgccagaggaatgtatgaaacattgaaatgaaagaactctatcatgaaaaccatctctttagtaagagcatgtggcctgtcaggttaggagtacccattagtgagcttgatgggtgacatacctgcagagaccttagtctcctcttaaagattcctccaggaggggtctttggaataaaattccccttggcttgcagccacgatgcattcctttgcatgagctgaaatgagtgtttggaaataacttttgaagtaaatcttcccactcctataaaagcaagagtttatatttcacagaagaacgtggcgtatttataccaaaaaggtacaagtggaaaggcttttgatttacttgtttgcttttcttgcattgctcacagtaaagcgatttgagtggaatgttaagtttgtttcataaacacaaaatggaagggagaccaagcatgttggaaattataatgacagaatttatttgtacattcactaaaccctaaaagcctcctcaaataatcaaatttgccaagctattttcagtgttatcctagcattgttacaatttaaaacaggccagggcccaaatgattacttcttctccctgatctatatgcccccatgcagtctactcaggaaacatgtggacttacaggagaaacactaaataaacccatactttgattcccagtgcttgtgacaagcatttgatgtctgaggctttgtcatttcacaaaacaatgttgcagacacagcaacaaacttttgaaattttttttcatattctcaagatcagaaaaatcattcccaggcttgcattaagctatttcactgctgattttcaaaaagctatcttagaaacagaaatccatagttaattgccattttgctatcataattgacaaattcaaatgatttgtgacatatgatttttgacaaatgatttgtgacaagtgatttgtgacaaattcaaatgattgtgacatacagtttgaggaaaaaatgtgatctggctgctattggttgtagagacataactgtggtagtgaacaattaggaagctgacttttagctgtagtaaattgatggccagctaaaattttttttttaattgagtcactcgggaaagacaacgtttttccccctttattataatgaaaaccaggcaaaatatgagtcaagtgttatcacaacaaaatttgtttttgtatcctaaagttcattaaggggaactctgtccctggacaagttttgacttggtgctataaattattgttcgtggccaggcgcggtggctcacacctgtaatcccagcactttgggaggccgaggcgggcggatcacaaggtcaggagatcgagaccatcccggctaagacggtgaaaccccgtctctactaaaaatacaaaaaattagccgggcgtggaggcgggcgcctgtagtcccagctactcgggaggctgaggcaggagaatggcgtgaacccgggaggcggagcttgcagtgagccgagatcccgccactgcactccagcctgggcgacagagcgagactccgtctcgaaataaataaacaaataaattatcgtttgtatcataacgtacccttgtcaataattaccagccactttctgcgctggtcctgaagtagaggtaagggctcatctagctttttgaagctgtcctcttgggcagacaaactcaataaatggccatttttatttctcttatttttattactaatattataaaatgctttgccaactatataaaacatacaacctatatgacaaatgcaatttttattattggcaacctcacaagttagattgtgctcaccaatacagaggtcatgtataagaggagtagagttctgtactcacatagagaaacattggatttctatttatttatttttcaaaatctgacatgaactagattcttgagatgttaaagtaatgactactaccatagtcatgggatgctggcaaagctaaggtatgaaattaatgacaactaccttcagaataaactttgaaaaggattaaagcagattccaaaaacagtagcaggaaacaaatgtcagcaaggtcttggcccacactgcttttcggtaaccattagtcatcatctgacacctcaagggagagtgctggacaaacactgcagaggttaagatccctgcccagttattcagtcttaccctgtcctagcatttagaaccaaaaacaacagtaacataccaatagaccatgcacactaacttcattcgacccgaggcagagacgacttgtctaccttccatcactaagataatgtgctctccttcttacccagcagccattcaaattttggctgttcccttggtaggaagttagacaatacacagatgacttgagcgattttgtctaattcaaagcacacacttatttctggctaatacttagatagttttttttttttttttaacatcaagggcatttcatttttaatagtctctaatcggaaatagtatgtttaaaagttctgtgtcttcactttaatgttttccttacccagaaagatggtttctatttagataagaaatcttctagaaagctgatggaatctgttgtttcacggagctcctaagagtatcctcatttggccatggctattcaccattagtgtttaacactaaaatgtaaacatcaagactaaaacttcactagagtgtttaaaaaagcaggagtctattaatcagaatcaggaccataagtaattgagggaaagagcataagcagtttggcaaaagaaagcactttaagaaagcatgttcattcttcctttccaacttactccacagaggaaatattactcttcagaaacgtcatttccatttaatccttaccaaattgcattttgaaaacgataaatagttacttatacctatgactgtattttagagtgacattccataaatgcaaagataagttcattttctacattagcatggccacctaacttgtgaattaacatgtgttcttcaaagctagaaattttaaaatgttctgccttgagatgtagaaaaggaatatattgtataaaaatctcccttactatgggagtatatattttaaataggttgtaccttttgtatgtccctgagtttccttgctaaggcaactatttgtatagttagatttttgaaatggaaacaaaaacactcaaagaaaaaagtgaaatatgccagctttagtttgacacattagaaacccaacataatgccgggcacggtggctcacgcctgtaatcccagcactttggtaggccaaggtgggcggatcacgagatcaggagttcaagactggcttggccaacacggtgaaactccatctctactaaaaatacaaaaattagccgggtgtgttggcgcgtgcctgtaatcccagctgcttgggaggctgaggcaggagaattgctcgaacccaggaggcagagattgcagtgagctgagaccatgccattgcactccagcctggcaacagagcgagattccaactcaaaaaaaaaaaaagaaaagaaaaaagaaagaaagaaacccaacataatataatatagttactgtaaatgacagtgaatgcaattctgagcttcccagtagtcaaggcaaaaggtgcaacagaatatattaggtagttctctatggatgttaaaattaattttataaatttgtcaggagatataaactgttttttcttataactgaattgtgaaaatttcaaatatggatctttttacaagttatattaatgtattaacatcatcagtaactgtgaaataaaatgcaaagttatttgctatatggctattattttactccaaaaatctgactctgctatatagaaatgtttaggaatgtcctaaaataagattaaattctcattcataagcccatactttacatttaaatactgtaatttacaggatttcgtttaattcagtaggttgaacaaactgcttccaaattttatttcaaaatttgatgttttgtaaattttaagaatattcttttaatatattattcatattgtaagaaatgtatttatttatttggttctatgaagaaaaattaactcaagttggcaaaaattcgagtaaatttggagactttttagcaagtaatgaaatgtctacaaatgtgccttgtgacatgtgtatgtatatgagtgtatacacacacacatcttacaggttcatcaaaggatgaatttggttgtttagtgtgatatacatgctgtaatttgatgacttcctttctctctagctgttgtgcttatgctgctagctagagcttagaacttgcgctgtggcttagaaacaggatgtcttcagtgtcagcttacatgcttgtcacttgggagttaaaaatctctaaagttactatattgtgaaatttaagtaaaaaaacgaaggcaaaaaccatagcacttcattaaaatgtaatggataaattcccaaagttagggtgacgaaagtagaaaaagaattcattcatttattgaaaatgttgatgtttgagaataatggaaattacttattttacgcttgatgttttactctgtacaaaaaaccttcaaaagagtaaaaagtgctgccaaatattctatttgagaagtacatagtggtatttccatgttttaatgtgctttagaattattagccccttttctttgttgcacgtgccttacaagttgttcttaatttcgtattcaaaatatttgagctacatatcctaattcagaaaatagggaacttacatattttccacacaaaatctttggaaattttagaagcgtttccttttgtgttacgtgtttgccttctgaattgagaaacattgttagagcaaggatgggcaaaatagacgaagagaaaggaatcgaggcaggaaatggaaggaaagtaaaacaggcaactgacttacgctgtgctgcattattttgcaaagtaaaagcatcatctctgactgattactgcagtgctcttctgccctctaggaagatctgttttccacaaagaagtttgaattatcattttaaaatgtgtatcagatctgattatatccctccttaacattttttactgtttccttgtgcacttagaatgacatttaaactctaccatagcctatacaaatgatccgtccttctctaacttctaaaatctccctccttgatctctgctctgctttgaaaacacatcaagcctttttccacttcaggcacctttcacttgactttctttggcctggaatgcccttcctcttgttcggttcatgcctggcttctcaacttttaggtctcagctcaaaaattacattgaagagaaatctttgatgaatgaatctaaaggagttctccttccagcccagtcccagtcagtgctcacaactttgttcattatttcttcatagcacttaatacaatctgaaattactttccttacttatttatttacttgggatttgtccccttctatgagaatgtcaacatttgttatagaaaggagggcctttgtctgtcttgaccacgtaggtattctgtttagtgtctgatacagagttggtgcaaaataaatatttgctgaataagtaaatgggtgaactaatgaactggggcatgactggagaattggacctatgtgtgtgttcttgaataggcgggtggtaagttttaaaacttagagaagttcagtttctctggaaagagttggtataatggcagagaggaagaagtgatgccaggaaaaacagagccaaatcccagagttcttgaatgtcatgatgtggagtgtctgaaatctgttttctagtcaatggatgactactggagatttttgaatagtcaatgtgtgctttagcaatccgtcctttattactagctatggaaaactctttctgtgtcagaggaacctcattcactcacaggttcaaggacagtgtaacttctgaacgtcagcaggctgttgatttagtcaatgttcatttctttgtccatacagtatgactaccacgtagtcatgcttctgggctggcaagagaaaatgtttgccttagttcttcacagcttgagaggaaatggccctaagcttcttgaaggcatttttaccagtatttctgacatctcagtggcctcccctaaacgtcaataccatcttcatgtcagattattccccttttctccattgttctttatttcacagtttatttttctaatgcatagagttacccccatattagacttactcgctcctgtggtttgttttaattaggtcttaaaggaagtccagtttggagcctttaactgtagtgtgctgttggtttgtttcattggaggagtgggtaggtccttccttagctgaaacctagtactgactatgccttgtaataacctccatccaatcatatgacattatatgtagcatgcacatgtttatgtggacttttcttaccactttggatgtgtgtatttatacaatggaagacagaggtatcaagcttccagttaaaacagtggtttattttatagaccctggcagcaaattctagtttcctaaactggttcacaataatttaaaagccagggccagttcatgaagttttatggttcagcctttagtcatggaatctttttttatagattgtagtatcttcaattctggactataaaggaggaaagcaccaaataagcaaaacgtcaaatttgagaaaaggacccagtttgttgacattgactgttttcaagagctacggaatcacattcatcgtgataaccacattggaagctctcagtatgaatgatgatttcagagaagtttttattaaatgtacaaacttttagtaccttataggaggggtccccaacccctgggccatggatcagtacagtcctgttaggagcggggctgcacagcagaaggtgaaccttaccacctgagctctgtctcctgtcagatcagtggaggtcttaggttctcataggagtgccaaccctctggtgaagtgtgcaagtgagggatctaggttgtgtgctccttatgagaatcttgcgtgatgatcttaggtggaacagtttaattctgaaactatccctgcaacccatccatggaaaaattgtcttccatgaaactggaccctggtgccaaaaagactggggaccactgccttataattcatgaagcatattcacatgtaatatacctttgaacttattacaagttacttcttacaagtttttttctcttttctaagacatagcatagatatactctgtatgtaaataggtagaaaataaaaagattaatataccatatgatccatgtccacagaaagctctaatgggagaagcagatatactgatgcatatataaggtacagaatggtaagtaccagtaaaggaacaggttgagagtatattgtggtacccaactatggctacaggaatgggaaagggtctcttagagaaggcaggatttaagcttggccttataggacatgacatatttcagtaagaaaagacagagggacaaagattctctaagtcagtggaatatcctgagccaaagcataaagtaggaaaattaagaacataaatatttatttgtgttccattaactttaacgtctagtgctgtagaatcagagtatgtcagtactaatctgttgtactcatagcttgtagactggctattgcccagagaaaattttcaccaaccagaagcacctactctatcctcttatattatgtgttcatgggagctataaactctactcttcattaatgggagcagattcacctccttgaaacagatcatttatatattgtatgctattatttatctttttctagtgctctagtgactgctgaacacattcatatgtatttcacagttgaatccttccaaaatcctccacagtaaatgatggtgtatagttcttttgagcattttttctttagggaaaattaaagcaccagtgtttaaacaactttttccaggttcacttggccaataaatgcaaaccacacataattttgaacccattctttatacctatatagttattactatgtagatgcatacaattcatatttatctgtattgatatgtaagagattgagaagattaaagttgagaaagatgaaatccaaaattagtgattttgacagtcaaaataattctgagtgcacagaattgaggacaaaggtaaaagtggcaggaagagctcatttcaggcaagatttaatggaaggaaagacagtagctaaaaatgtgcaattacatttgaaaagggaaagctttactattatgggatgttaggtcttaaaacagggcagtttatgtttttgtgttaagagttgattatatttcacaagactgcagggactgggcacttgtgagtctactacttctagtttttaataattgagtggcaaaatggtcaaaagcagatacagttgaatcttacatgccattctgtgattttatattgttcagcaacaattagttttcatttcttcacactaaaatggattgagcatattttagattccaccatgaaaacgataactaatgtgaatttttatttttctgatgtgaggtaaatggatctctctattgaaattctccatgactaaagcatatgtaaatatgtgaagtgggcggatcacaaggtcaggagatcgagaccatcctggccaacatggtgaaaccccatctctactaaaaatacaaaaattagccgggcatggtggtgtgtgcccatagtcccagctacttcggaggctgaggcaggagaatcgcttgaaccctggaggcagagattgcagtgagccaagatcgcgccattgcactccagcctggcaacagagcaagactccgtctcaaaaataattttaaaaatgtgttaaaatgggtaaattaattccattttttaaaaatatatcattgcttgttacatggagatcattgtattaagtggtttaggagacagttggcagtgtctgtgtagtggtggttcaaaattcttttttattaatgagaatcaaagttgtaagtttggaatcaaatatctcaaagctgtgtggtaaagcattttatgtgctgttcttagcatctttatgcattggaataatttatccttttaatttttttaaaagttttgtcttatttttaattgacacataataagtatacataattacgggtacagtgtgatgtttccatatgtgtattcattgtatgatgattaaatcagggtaatcagcaaatctgttgcctaaaacacttatcatttatgttggtgacatcattaaaaatgctttcttctagctattctgaaatatacaatacataattgttagctattgttatcctactgtgcaatagaacaccagaaattattcttcttctttaactataactttgtactctttgaccaacctcttcctgtctctccctttcctacattttccagcctctggcaatcaccgttccactctacttctatgagatcaactgtttcagattccatataagaatgagatcatgtggtatttgtccttctgtgtctggcttatttcacttaacataatatcctccagattcatccatgttgttgcaaatgatgggatttcattattttttatggctgaataatatttcattgtgtatatgtaccacattttctttatccattcatctgctgatgggcacttaggttgatttcatgtcctggctattgtgaatagtgctacaataaacatgggagtacagatatagcttcaacatactgacttcatttcctttggatatatacccagcagtgagattgctggatcttatggtagttctacttttaattttttaaggaaactccatactgtttttcataatggtcttgctaatttatattcctaccaacagtgtataagggtgcccttttctccacttccttgtcaacacttgttatcttttatctttttgttaataaccattctaactggaatgaagttgtatttcattgtgattttgacttgcatttccctggtgattagtgatgtggagcattttttcacacacctgttggccaattgtatatcttcttttgagaaatgtcatttcagatcttttgcccattttttaatctttcttttcttgctatagagttttttcagctttttatatatcttatagatcctagatattaaccccttttggatatggatatatagtttacaagtattttcttgcattctgtaggttgtatcttcacctgttgattgctttctttgctgtgcagaagttttttactttgttataatcccatttattttgtttttattgcctgtctgataaaaaaaaaaaaaaccaaggctcctagtttcattcttaaactgtgagattttggattgatctttgtatttctctgagtgtgatttggaaatatttgccttcattttggtcatttttttttctctttagcttaaccagctcgaaaaagcagtggaagcagctcacacatttttcgtggctaaccctgagcacatggaaatgcagcagaacattgagaattacagggcgacagctggtgttgaagcattgcagttggtagacagagaagccaagccacacatggtaagctctgtgggcccctgccctcaccacagggagctaagtgctcctaagtttcatctgagtcacagcaaatttctatgaatgaatatctcataaagtttattctcaaattttagtaacatttttggactttcagaattctcagaatataatgatcaggtctgaaaaaattgaggttttttaaaattttaattaaaattttaaaagttgaaataaaaaaactaaaaaattaaaaatttttaaattaagagaaaataaaaattaacttagaaaattggcataatgtgataaaaactagaacatcatataattctctataatcctctctgaacctttctgatactcttattttatacctaggaggtgaggccagtgtaaattgttcaggattatactgtgattttccagctcccagtccagtggtttgcccattgtacctgtatgtttcaaactggggttttaaaaagtgatgtagttctttatatagactaaacattacttgaaatcacatgttgaaagccttttttttttttaatttttgacatcaccattctcaacatgtagcctccaaaattatcacagaaaaggataaggaaagattttagaaaatattaaaaaaaaaaaacaaaaaacacaggcagggcctaaaagtggatgtcacttccacccacatctgttgtcctgcacttgttacatggccctacctataggcaaatgatttcaaaaacacagtcttgcatgtgctaaggaaaaaaacgacattgactgatcacatagcaatctatttgctcagtaagacccctctcacttacaagcatttgaagccaggaatgttgttctttatctcccagtgcaacccttctttatccctccgcagcagaagcatccagtaccccatctacctagatgatcctgagtcaacaaaaacccttctctttgaaaataagggtttttttgtttgtttgtttgtttgtttgtttgttttttcccgtctgtttcattacaggagagttacaatgcaggagttaaacattatgaggctgatgactttgagatggctatcaggcacttcgaacaagccttaagagaatatttcgttgaagatacagaatgccggaccctatgtgaggggcctcagagatttgaagaatatgagtatttagggtataaggctggtctgtatgaagctattgcaggtaaaagcttaatttttcattttatttctttcttgattataaaaatactacttgcaatttgtaaaaaactattccagcaaaatagaagaatatactgtaaaaataaaagactctcatgtgtctatcccagcctatctcctgtagagaaatgtatgtagttaaaattttggtgactgtcttcccaaactttttcaggtccttatgtaaatatttatgtatttatttatagttattatttcattttttataaaataggacaatactatatataatgtttttcaacttttgttgttttattttatgcttaacaatatattgtggacttcttctcacgtaagtacgtagagccattttattgtatttaatggttgggtaatgctctgttatataaacgcatcataatttaattgactagtcctttagtgatgagtgtttaagaggctgaaatttttcattattataaacaatgtagtagtgaacacttttgtgtagtcttcaactacttaaaatgttttattacttaataagaatttaatatattacaaagcggcatttaaaatactaggtaatgcacattatagaataatttgggagattggctagttaaccacttatgaggagaaagtggggtctctgctgtatgccttacacaaaaataaattgtatttgtaataacaatataagtgtaaaatataaaactgttagaacaaaatgagggaagatatttgtataatattaggagaagaaaagctcttttttttttttttttttgagacagagtttcgctcttgttgcccaggctggagtgcaatggcgtgatcttggctcactgcaacctctgcctcccggattcaagcaattcttctttctcagcctcccgagtagctgggattacaggcatgcaccaccagacccaactaattttgtatttttcatggagacggggtttctccatgttggccaggctggtctcgatctcctgacctcaggtaatccgcccacctcggcttcccaaagtactgggattacgggcgtgagccagcacgcccagcagaaaagctcttctaagtatgacaaaagacaagaaaaataaagaacaagttaaactttacctaagatttataagtacagatttatacgataaaccaagctgatctacaaacacaaatagaaagtattgcaaaatattttataggcaaagtgttaatatatttcatattcaaagagagcctgtaaattattattgttcatagtaatttacttcttaattatcagtagtaataataaccaacacatatgtagcaattgtaacatacaaagcacttaacatatttttatctatttaatgctttaagcaactcttatagatactattgttacttactctcctctcccttttgtaaatgaggaatttatctgaaaaagattaagtgatgtgattagagtgaagctggaactcatatttggacttttctgaatctagaatctatacttttaaggtctacataattgaaaagtaggcaaaggataatttattaataaaattttcacaaatattttgagcacacatttttttctgagttacccatatatgaaaagcaacattcaacttcatttacttactgaaatgccagtgaataaaatcagtttgctctccccaacttccagtgctttcagtcttcctaaaaagcactactcatccgggcgcggtggctcatgcctgtaatcctagcactttgggattctgagacaggtggatcacatgagctcaggagtttgagactagcctggccaacatggtgaaaccccatctctactaaaaatataaaaaattaggcaggtgtggtggtgggtgcctgtaatcccagctacttaggaggctgaggcaagagaatcacttgaaccttggaggccgaggttgcagtgagccgagatggtgccattgcactccagcctaggcaataagagcgaaactccatctcaaaggaaaaacaaacaaacaaacaaaaagcactactcacctaataactcaaaccaagttacctttcaatccaacatcttccttaattcctattcccatatgattttttaccaaacttggatagaggttatctcctaatagcactgaacacttcctaactccctccaccccttttgctaccaccctggctcaaagcaacagtgattgcctccttgttgctcttcatgtcctgttctggttttgctccaaatgcccacagagcagtctctaaaaaaacaaaattctgctcacagatctggtttaaacaccccaaatggtttacactccacttggaataaaatccaattctttaataagaactttcatgattgggcacttgtgtatgttttcattcattctctctctccctctcactctctctcctgctttttgattccttaaatatgccatgcttatttccacttacagatcttcaaagtgttgttttcttctatctctcggctaaagccttgtcctgtttagtgctcaatcttcagtgcctaagaagagtgagtggcaaatagtagatacttacttagtaaatactggttaaatgaatgggttgattaatgaatgaatgaaggaaggagatgatatatccatctatctcatagcagggattaaaatggttaaatactccatgtttatgagaatgtaggtttaggattattgttaagaattatttttaaggtttcttatagagacaattagggtatagctatcaaaaattagactaggaagtagactgaaaattaatgtgacgaatgaccaatttgtgacacacccagttacccaaaatcaactcagttcacctaaattcaatacagcaatctcaattattgaggatattttcctgaaagttttatttttttggatctctgccagatccagttgcctaaatttttggaatgtcagttttatgtgtggttcacattttaattgctatttctctacacttgatcttgtatttgggaatggcagattcttcctttattatagttaactgtgttgtggttgtggggagatatgcatcctgctttcacgcccacattcgcctctacacctgcttccaccaatggccactgaacagttttggccaatgtcctagatctggtttaggaaaatggaccgacgatttcccacagatgaatatttagtgatttgctcaaggtcaccacagcatgtcggtagctggaaaagaatagagatctcataactcaggttctttaatttttaagactcaaacttattaaaaacatattaattgcacaatgtcatttaagatagaaaggaggcaagggatatacctaataaaagtaatatgacagctctcactatgtaaattcttgtctgcttcaaaattgtcctaaattaggtataaaactggctttttaaatagcaaatgtattagaaaatcagaatatttgaattttagagttagacattaacagttcgggaaaaatacaaatggctgctgaatgcagttatttattactagctctgctatgaaaccctaaaggatacctttctgtcactcctattttgctgctatttgtatccgctttgaaaaaatatttccattcagattttgagttctcggtgggtatctttcgcctttaccttttgcttgtcacttggaattaaaaggaatgtgtattagaaagtaaatagaaatgcaaatggtaagttgagtaggagaaaacagttgaaggttgtttatttttgttttcttaagaaatgaaacagctggttatttatttctaacatgctaatcaaataaatagaactcattcttccttcacatcccctgactggggttaataaccaatgggctttagggattctattagctgtgctataaatgattcagttagccaagttatacaaaactggcacattcccccacaccagaaaatgcacgtttccttcctgttgtgttttggggtccctctgcaaaatcaccaagatccaagccaaactcagactaaacagagaaccttttgaaaaaaaggcagttgtggtaaattaaattgcacagctatgagatcaaatgattttatcatcattctcaaaagaacccactcagcgcagccatgaatgaatctttcttgctggaaaatacatccatcttcattgtaaaaatcagtcaaggtgaaacgtaggaggcattttcttctctgggacattcaccacttgtgtttcctcatctcaggctttgataaaatagagtccagagccaaaggtggcatgaagaccctaacacttcaggactctcaagcaagaagaatgggagcaatagaaaggggagtgaagagaaataggaaataagatgctcattcctttagtttacatccttctgcctgttttaccagtctctggtaaagaatatacaatgtacttagtattagaatatactatgtctaggcgatagactaatttataactggatagaataggtttctgaccaataggtttaaaaaaaaagagtttttatttctcttttaggacaatttggcttgaaaatgttaagaaagaaaaagagcacttttgcttcacttctcagcctgaattttccatgcccatggtggtttctttttccaaactgttccttaacatttactagcatctgaacttccattcccgattccagggcacttcgagccatccaagatatccaaagagagaccccaaagttgttaaatatgaaaactgacattcagctgggtgtaggtggggtaaagtggactgtggggtataaaaagtgtacatgggaagggaaaagtgaggtgtagagaacagactgtgagctggaggattcggaatctactgtcgttctagtgatcgctgaccaggagaccttggcaagtcacctactttctttgtaaaaaggttttgcagtccggaagtgaggattataataatttggtcttccagtgtggtgaggtgaggaatgacctgtgtaactgtggctgtgacgttgacgtttgggcactcagcaacctggaggaacacacgtattggctcttgtcttccagatcactacatgcaggtgcttgtttgtcagcatgaatgtgtgagggaacttgccacccgccctggccgcctctctcccatcgagaattttcttcctctgcactatgattacctacagtttgcctactatcgaggtaaagcgtggatcatccgtgaagacttcttggggggttgtggttcatcattacagacatcacatttttgtaattgagttttctgacttcttcagtttattatgaaagcaataggaatttatgcatttcttctctcctgagctgcaggacaagaagagcagaaggggatatcaccaatgggcaaagtacaaaatttaatgctgtgataatttactgaaaattatactagattgacattttgcatggttttttagacttaatttttttagaactgaatttaaaaggaactttgcaaaatcctcttcctttccaaaaacaaaacattatttattatcctggcgttgatggcacacagtgaatcacgtgctcaagtcataaacagtgaatcaaagatgagagagttgcttaatttttatcattccttttaaaaatcagagtcatctcagagtatatatatatgtgtgtgtgtgtgtgtatgtatttattatacacacatacatgcacacacacacatatatatacacacatacgtatattgtaaatttccattagaagaaatacaatgttgtgaactatttgaaaacaaggcatacagacatttaaaatttcccttgtaatagctaaatatttctataatgaaaagtttatattggaaacatccttgttagttccttttagtagtttgctactgtaggatgtgctataattgtatagtgaaggatttaaggggcttcctccagaacatctgggactctatgaaggactttgcattgaagtaccagtttaccacaaactgcagcaatgaaaaataacattttaaaagcacttatgttactcatacattatatataaaatggtacattactgttgcaaagatcaccttcaggatgtttacttaacccaaactcggtacaaaaatcagaattaactcatagaattctgctgtttatatgtgttaaataataaaagttgtcaacaaacatcttcagatagaaacttgacgatttgcacaaaacaactagtaccaaagcagaccaaaggtaataacttttgaatacttgaaatcatgtctttccttttatctgtgactgtttctgctttctctgctgagcctcaatttatcttccctcttattcatgtttaatgctgacctttgtagacacgttgatggcctccctttaaaatcctttggacagacctaggctgactctaatgctgcaactcctttgtctttcagttggtgagtatgtgaaagccctggagtgtgccaaagcctatcttctatgccatccagatgatgaggatgtcctagacaatgtggattactatgagagtctgctggatgatagcattgacccggcatccattgaggccagagaggtgagaccaatgttttgaaaagaaattctttttttttttttttttttaagacagagtttcgctcttgttgcccaggctggagtgcaatggcacaatcttggctcaccgcaacctccgcctcccgggttcaagcgattctcctgcctcagcctccctagtagctgggattacaggcacatgccaccacacccggctaattttgtattttttttttagtagagacggggtttctccatgttggtcaggctggtctcgaactcccgacctcaggtgatctgcccgcctcgtcctcccaaagtgctgggattacaggcgtgagccaccgcgcctggcctgaaaagaaattcttgattctgcatgtgttcgggggagagttgataaaaatatgacactggtcttaaagatgtctaacaatttagcaaaggttgttgaactcggttctttcaaactttatttatgcctgaagcacatttttattcatacatgctagcgtgtgaaagtatgttgagatggggccaagtcttgcagttctgaatatttgttagctcatttgtgactatctaatgaaaatattgccacctgaacatttatcatatctcttacctgctatttaaataaaaaatgtctttctttacttctttttctctaggatttaacaatgtttgtgaaacgtcataagctggagtctgagctgataaaatcagctgcagaaggtctggggttttcatacactgaaccggtaagaggaaagaggaaacgtttattaaaataatgattcagtggaatcctttttatgtttttattacctgcctccatttttgccatttacctcaaaaagctaagatttcgatgccctccttgaggtaaaaattgggggtgggagatatttactcaatatatgtgatgaactttatctatttatttatttatttattttgagatggagtctcgctcttgtcgcccaggctggagtgcagtggcgtgatctcggctcactgcaacctccgcctcctggattcaagcaattctcctgcctcagcctcccgagtagctgggattacaggcacacgccacaatgcccagctaatttttttttgtatttttagtagagatggggtttcaccatgttggtcaggctagtctcggactcctgacctcaggtgatccgcccgcctcagcctccccaagtgctgggattacaggcttgagccgccgcacccggccatctgatgaactttaaaagactaatggatttccacatcagtcattccatattaacaaggtctaaagtcaaaagcaaatctattgggtaaaagtattttgtgtatgactcatttgccccgggagtgttttattttcctaaattccggatgtggtgttttaaatttttctattaatgcttttatgttacctaaacattaaagagaattcaaaatatcatcagtcacaatgctatcacacccatcatgctgacttcactccgcttttccatgttgtcttctaatcattgtttatatgaagacatagcttttgcagaaacatatactatggtataaagagatttgtattcttttaagaagataccataagaaatttctacatttgtatagctttaaaaggtatttttagctacattttagtctctaaaaagttggtagaatttagaattttagataggtagaattgacatacaataaataaatgaactcttctgctgaacatttgaattatttctgatttttgaattatacataatgtattaagcattttttctctattgaattatgtcctgaaaataaattcttaagagtggaattattctgtcatcaaaggatataaggttttaaacttcttgaaactaaattgcttttctaagagaattctcttagaaattatttattattaatttatttataattatatataattatatatgattactaagagaataattctcttggaattatttatttgcacactattttaatactaacactatctcatgtgggaagatttagtgactactctaaagtctcatagctcacaacagattgaacaggcatttgaatcctagtaatgcataaaagtaccattttaccacaaatttatcagcgataagaaataacatttgaaaatcacttttattatttatatattatgtatgaaataatacatcattttaacttgtaatttttttgatgaccagcaagaataaaccttttcacatattaactatttttcctcttcttttaattacttgggcatgggttttattcatttatccattggttactatgtaagttcttcaaatgatatacaagttaatacatttataaaattatttataatatgtccatttacaaccttttttcatttcttatgccgtgtttttataggcacactttttaaaatgggttaattttaatgtactatttctaatataacaccttctaatatattaatatttatatcgggccttacttattattcttttaaaattatgttatccaagagaccttaaaatatgttatttactaatttcatgatctatacagatgattactaaagctcaattttgtttgcttgttttattcagcaaacataaagaagttgaactgaatgatctttcaaatgtttttctgccaccaaattccaagtcactttcttggacaaaaggatggatatctaggctaattccatagtatttgaaaactcgacttgtatttcattttttccttgccaaatctccactaactttagccttccttttcattaatctataaaatataaatatattgtatctttacacaatatgcaaaattcctaaattatagatcttttgaatgttttgtgcatattttattttatcttaattctgtaagtgatgttttagtgacaaaattactgcatttttttttttactcgattcaaaacagaattattggatcagatatggaggacgacaggatgagaatcggtaagtccattcagaatgcaaactggttttttatgaggagaaatacttagtgtcataacctatcatagagaaatgtagctctatgaaataggcaaggagatataataaaataattctaagctctgaattaggagctctacatccaggtcccagctcttcctgccacgtttttgtaaccttaggtaatatatcttctgctttctggatctcattttttttttccaggaaaaaaagggttaaatcaggtgctttctatctgctaacgttccatgattccgaatctgagaaggttggatactggttttgatttattaacagaaaaactgtgaaatgggtttttgatggtgaattcccttattgtatttacctaaaataatgaagttcagaaagttatactaaaatagctaaaatattaggtgtcactaactgaatcagaaatcaagaaagctcatttttttttaaattttattattattatacttaaagttttagggtacatgtgcacaacgtgcaggtttgttacatatgtatacatgtgccatgttggtgtgctgcacccattaacttgtcatttagcattaggtatatctcctaatgctatccctctccccttcccccaagaaagctcattatttaaaaatgacaaaagtcaatttacatctttttaaaggactgaaactcagaaggttagaaacacctgcttgagatcacatggtccagcttattcattttcaaattgggaacctgaggccctgacaaggcaagcaacttgcttagagtctcatcacaaaggaaggacagatccagatcttcttatttagaatcttgaagtctttcacgaggcttcaaaaactcaacccttgggtggcataaaattatttcgagagatccaagaatgtatatacacatttggatttgtttgatttttacgtatataaagaacagcctgctatcatttgtgtgtttgcatatgacaaacctgtgtcttcttttcacaatagtcaagaactactacattatgacataatttatttcaattcaacagttgttcaatgatgcactccatgttccaggccccattggacactctgagcattataaagatgctcatgataatttttttcctacttgagattagagtctaatctgaagagagttatgttatgcatacaattaattgtaataaaggttgctaagaagatttagaggagtgaaataaggcaaactcaccgaggaaatagagaacttactagaggcagtgacatttaatttgactttaaaagacaggtgaacttgtttacaataaaatacacaatatagagtcacagactaccttggtaaagtattctttgcctttgaacatcgttattcaatgacaaattgccattttaaattttttgaatgggcagggtcccttcaggagtgaacgtagagggagcagaagttcatggattctcaatgggaaaaaagctatcacccaagatagatcgagacctaagagaaggtaagtagctgtgcacttttaccctataaaggaggggaaggggaagatggggcttgaccagttcttttccagatcaaggaagaacccactttctctagaaaataaagaataagactaagctactacactccctaatagtctgaaagcaagacttaaaaaaaaaagtcttagatttgtgtattattaccatgggtttcaaaaaaaaagaaaaaaagaaaaagcctccaaattcactccctcatctgtttcccaaggaaacttgcatggtcatcaccattctcagaataccggaggcttagcaatttcctatggtttacttctgttacacagtcagtaagagctaggtagtgtgggacagactgtatatcagaggaacttggagaggagaccagccacatgggatattagattagttaaccttagatgcttgaagcacatagatctgagcagggcctttagagaaagcagaatgtagtaggatgcatggatgtagagggaaccattctagtggttaaaagaaacggagcaaaggcacagagacgaagcgagcggaacattatgtgcctacttatgtaagatgaaaattagtagagacaacaggtggagtgttgccaaaaacagtttttaagtagagccaagcattgttatattaataaaaactattagcaatagtaatactaacagcagtggttaattcttaacaattattatttctatatgttttatgatttcccagcaaatttgcacacaatttatttgcatactattttaatactaacagcatctcatgtgggaagatttaatgacttctctgaagtctcagaagctcagaacaggttgaacaggcatttgaacccagacatttgacccgaaatcccattttctcttcttcacctgctgcatgaaacatagaattgtgtagatatcaaaaatatatcacctattgatgaaagaattgcaagacaagaggctttcaaagtgctgcattgggaagctgtacagtacttctttccccaggagatcttgtcagcacattcctctgatttgaaaacttttggctctctacagctctcacatttcccatccctttccttccttagcttccaagtcagttttgaaccagtaaacaggataatatgctcatctaatctgacctggacctcagtttgcagccacaaagcccaagctgttttacaaatgccagagagcttcatggtcagccagagttcatgttgccttttaggctgagaaatcacccaggaagttcatgccaataagccaacacattgctgtaaatgtttgggaaactccaggacagttgccaaatttcaaagcatttttttcccctggctaccagggaatctggtgtccagcaactgactagaaggttaatagaagagcagaacagaagactacgtgtgatagagaaggatcatgattaattgggctacacaaatctaccatttccacagaattgtctaggacgaagtggctaatgggttgtaggatggaatgttttctgggaacctactggtctgaaggaaaaaaaaaatttttttttacctaccgtactctcatattcattcaatacagaatacttctgtggccagatgtgtgtgaggttttacccacatgcaccagtaattctccagtggatagcaactgagggtgaactaatccaattcagttctgacactgtctgtctggaaatagtgtcagatcccacaggttaagggcttagcccacaactggcatttcagatgccaattgcaagtataagttgttacctatacttctgaccaacccctcattgaccagctacaaaccagtgttcccatgatcctgactttgggttaggttaatttgctagagcatcccacagaactcaggaaactcttgtgtttactggtttattataaaggatacagatgaacagctagatgaagaggtacatagggcaaggtatggggggatggcaggaggagcttccatgccctccatgggcaaaccaccctcccagcatctccacgtgctcagcaacctagaagctcatcacatcttgttgttcaagagtttttatagagcttaatttgcaggccccaaactcctttcccagaggtctgtgggtggggctaaaagtttcactttcctaatcacttggtctttctggtgaccagccccattctgaatctttttaggggccctaccctaattcatctcatcagcataaacttaagtgtgatcaaaaggatctcattataagtaaaaaaggacactcttatcccttgggaaattccaagggatttgggagctctgtgctagaaacaagggataaaaaccagtatatttcttattatatcataactaaaaagcctgttgtccagtcgtcagatacctaattaggatctaaattaagaacagttgtagatagatacaaagtttccaaccagaaaacactttcatatctctttttctttttttttgagatggagtctcgctctgtcccccaggctggagtgcagtggcgtgatctcagctcactgcaacgtccgcctcctgggttcaagcgattcttctgcctcagcctcctgagtagctaggactacaggcacatgccaccatacccggctaatttttgcatttttagtagagacgagatttcaccatattggccaggctggcctcgaactcctgaccttgtgatcctcccgccacggcctcccaaagtgctgagattacaggcatgagccaccacgcccagcaacattttcatatcttaatctgactaaaaggggatgtcagggaggcatgtgtcgcagaatagagtatacttcagcttttctcatcttccccaaagagactgtcatctactctggatgcctatcagtgtttagtattttgtattattcctactggacagctcctaagcattaagatggggtgacccagggctacttacatcccacagtggcttcagtccatgaaacatgcgtgatatggaaactcactaaaaaacattgctgtcacttgtccattctcctttcactcaccagattttttttttatttttattttttgagacaagagtctcactctgtcacccaggcgggagtacagtggtgcgatctcagctcactgcaatctctgcctcctggattccagtgattctcctgtctcagcctcccgagtagctgggactacaggtgcatgccaccatgccaggctaatttcttcatttttttttttagtagagacggggtttcaccatctcggtcaggctggtcttgaactcccgacctcagttgatccacccgccttgggctctcaaagtgctgggattacaggcctgagccactgtgctcagcccacccaccagatttttaaaggttgtgctggatatgattccagagtcagtagggggatagtagaaacaatgttggggaataaacttggaatcaggaggcttagtctctgggattatcttattctgatatgctccacagtgatgaagatctagtgactcaatttttctgggccctatgatttttatctataaaagaaggatagtaactgttttaagatggtaaacataaaaagttcttctttttttttattttagagccagagcctcactctgttgcccaagctggagtacagtggcacgatcttggctcactgcaacctctgcctcctgggttcaagtgattctcctgcctcagcctcccaagtagctaggattacaggcatgcatcaccatgcccagcgaattttttttttgtgttttagtagagatggggtttcactgtgttgcccaggctggtcttgaactcctgagctcaggcagtctgctcgcctcagcctcccaaagtgctaggattacaggtgtgagccaccgtgccttgccctttttttgtttttttaactgtaaaaggctgtactcatatagggattgttagcctgcctacaccatcatgctttgtatgacactatcgaatttctgataaagtgattcttcttgccatgagccagacagtgagtacaagggagtactttcttagatgatcccttcttgttgcaaccagagagtcagagccaggcacatactttataaacgagggaagaattaacttgtttgactaaatcttcttgggctgtggttaagaattggctgaagccatcaaatcaggccccagaaaccacaatttattggactacatttttatttttattttaatgttttcctctgtctggtgtgctactagtcattaagctaccagcttaagactggtagtcatatggaggctggttgacttgcctgttgaatgatagggtttcatttgtctttttttttttcctttggttagttgatgggtgatgggtcgtttttgttaaatgtacgtgtggaaaatatctgtgtaaaattctacacttagtaatattaatgattatgttagctacatgaaaggcatatttctaatgcagattctcccggaacccaagattcagatattgaagactccatgttacattcttccttcacttgatctttgcatgttacttgtggaatgctaggagaattgtcaatatcccagtagccttctcttaaggctctatgcttattaaggtgtctcaatcagaacttaacacagtattccaggtgtagcttattaattcaacaataacgatagtaatgataatacatacttataatggagcttaagactggtagacattttcctaaatatttcatttttgctaactttcaaaatcatattttgaaaataagctaattatgtttaaaataatacatcttcaatgtagaaaaagagaaaaacttggcaaagtataaaccaacttaattcactaaatctctcatctgtctttcatttctatttgagtttttattagcagatgcttttcagtgaatctacaagtatcttatctttcttcttgaaggaacatttctttttatacttctaaattggaatggaatatacagttcacttttccaaatattcgagggaatgcctgtctcaatttgactacaaactttaatcagctacatagattagaacagccttttccaaattgcgttctatgctaagacgtttaggggggatttttaaaagactacttggctgggcgtggtggctcatgcctcgaatccaagcactttgggaggctgaggagggaggatggcttgagtccaggagttgaagaccagcctgggcaagaccctgaaaataaaaaaataacaagaccctgacaaaaaaaaaaataaactaggcatggtggtgcgtgcctatagtcccagctacttgggagtctgaggtgggaggattgcttgaggataggaggtcaaggctgcagtgagccatgatggtggtgccactgcactccagcctgagtgacagtgagaccctgtcaaataaattttttaaagactactttttttattgctgtgaaaacataatgaaaatatagcagcttatgaaaatatccatttattatctcatagtttctgtggggtaagagtctgcagagaacataactgtgtctttggcttcaggatctctcaccggtttcagtcaagttgttgaccagggctgagaattcagttcccaaaaagttgttggactatggccttttagttcctagttggttgttggctggaggacgccctctattccttgccatgtgatcctctccagtacagccgcttgcttcattacagcatggcagcggagaaggcaagagactgagaaggcaagagagaagttgcaatttcatgtaacatagtcacagaaatgacaccttatcacctttgccatattctactgtttagaagtaagttccaggttccactcgcacttgtgggaagcaaattgcacagctgtatgaatgttgggaggcaatgatcattgcagcccatcgtaaagtctctgctgcaggaaggaagttgggggagtcggggagggagagaattgtattcaattaaggctaaaaactgctgcatattatgttactacttaggacattaataaggcctgttcacatattaaaagttctgagacgtcctcttatcttttatttaacccagtactttcccagaactttcaatgcaacacaatttgagaaatagtgaattgtagaaaagcatatttttctattcaactaaaagatgtgatactgaaacgaggcttatggatatattcttgggatccaaaaattccatatttataaattttaatcacaattttcaaaaattaagagaagcaattaggggttatctaagggatcaacttctagccaggtggtgtcatgggattccacagttcaatgggcacagttatggtcatattaacgccaactaataatacttcaatgattaaagactagaaataaatgaaatacgatgcacttataaataatgtattaggcttagatgaaagctgatatggtttagctgtgtccccacccacatctcaccttgaattgtaataatccccatatgtcaagggcagggccaggtggagatagttgaatcatgggggtggtttgttctcctggtagtgaataagtctcacaagatctgatggttttataaacgggagtttccctgcacaagctctcttgcctgccaccatgtaagacatgactttctccttctttgccttccaccatgattgtgaggcctccccagacgtggaactgtgagtccgttaaatctctttttctttataatttcccagtctcaggtatgtgtttattagcagcaagaaaatggactgatacaaaggccaaaattaatcgtggtacattaagattgtgtagtagtttaactagagaaaagttgtggtagaatagtaattacacaccaacagtactataaggaatcctggctcaaaagaacccagaccagatcagtgagtagaatattcatgtggaaggtagctttttattttcagaaaaataacgttaaccattccatttgttgattggaatttagttcattttatggtcttgcttttatttagtcttgtaaattggtttgggtactgtatgaaactactaaaataaataatgtgaacatagttttatgattgcatatatagaagtaaaattagagtgaaaataatttgtcagcactggagctccttagggaacttctgctttaacagataaccgaacattactctagattgagaaacactgcctcatgcttttaatattccattaatcatgagctgtagtgagtcttttatcctagctagactaataaacatttagacagtgctcttccctaggctgactaatctattttataaagtagacatcaatttcaattgtctcttcttcctctgttggagtgttttaggccaacgtgttggtgacctttgctagacctggggtggcagggagttgtgccttccctatccctgctgtcttatcttcggctgttgctatggacaagcacgcaccaggccccttgggagtgttataaatggttagaagcagtgttttcttttctgttccattttctggttcaaaatgtttgcactatgctacaccagaagatttcctctctatcagaggctttgtccttcagtcctactctatgaaaaaaagtctttgtcaggtctggattttgtaatttcacaacctaaaatgtgaccccaaagcatcaccctctgaagagcctatctggagttaattttataaacttgtggtctctctctgggaagagagtaggtgcctaagggaaaccctcctgtgtggaaatagaaacgtgatgattttgcctggagaacagagaaaaacactccaaaagcaagacaacctagggtcagttgtgtggtaggaagaagactgaggcagagtcaagtgacttgggtgtgactacctgaatcacctagtgaaggtgttactctagacaccagtgaaactgaggtgtgcatgtcatacctggggacccaaacatgcaatctgtggtgttgcgacagaggtatgaatgaggggctgtgaacaagggtggactttctcagaagagagtcctatgagatgcccagtcgactttttgggatcagcattagaaacaaatgcaaaagtagttctatctctcccaaaataatgtacgcatgtaacattattatgacattatgaggaaacccgatagacatctttctcctgaatctatattgtgtttatcaagcttcctaatttgcaatttgtctttgcatttctaaatattcatgaagaaatggactcactcgaattgcacattgaaagctgtttggtattctgtgcttcctttcgggggacagaggtaacagggaagacaatgtgctctgttcctgtaggtggtcctctactctatgagaacatcacattcgtctacaactcggagcagctgaacgggactcagcgggttctcctggataacgtcctgtcggaagaacagtgccgggagctccacagcgtggccagtgtgaggatccggagaaggaggggagctcactgcgctggcctgccaagaagctggaactgctttggtcctggtctcatctggagccagacaacaagccctgaaatattgctttcttgaggagaaagacataaattatttttgaggaacttttatagcctttgggttgggattattttagttttcccgggtgggatctggaatagctactggcatatttcctagcccaacagccatctagcaaggtccctgcctatcatataaagttgctggagaaatccttttattttaattaattattaggcaatatatcaataatttacattctttttatttccataaaaagtgacagtatttgataataaaaatgtagaatgaagattaaataaagatatctcttttaattaaaagaatagttataccagcatcctggaataaaatggggatggttcttagcattgactagagttctcagctttctggcagccaaagcagaaaaagacctgatgaattcatagttatcattgatgacgtatcttcttgtatttgcttccagggaatcatgcttgttggtgatggatacagaggaaaaacttcaccccatacacccaatgaaaagtttgaaggtgcaactgtcctgaaagcactcaaagtaaagtcttaacttcttttgggtttgagttccttagtgtcagcctaaggcttctgtaaatggcagatataagaaagaaaaaagtggccaggcacagtggctcacgcctgtaatcccagcactttgggaggctgaggcaggcagatcacgaggtcaggagatcgagaccaccctggctaacatggtgaaaccccgtctctactaaaaatacaaaaaaattagccaggcatggtagtgggtgcctgtagtcccagctactcgggaggctgaggcaggagaatggcgtgaacctgggaggcagaggttgcggtgagccgagatcgcgccactgcactccagcctggcctgggcgagagcgagactccgtcttaaaaaaaaaaaaaaaaaaaaaaaaaaagaaagaaagaaagaaagaaaaaagttttgaatatatacctatcaggacagctgaaagaagcaagagtgaaatgaaaccttcattgtagttaatcattcctccgttcagccatcaacttatcaaactttacatttcctgacaaaaaatacatacaatccctctttgtaaaatcatgatctaatagtgaaaacatattcaaacaagtaattattctctactgcaggaagggttgttagagaggatggtagaacatattataatagaagagaagaggaaccaagtagcttttagctttccatctgttattgggaagagtttattccaatggcacaatgtcctaaccgaaatccacaaatatgtagtagccttccccattagtcaatacagacatgacaatcctatattggctcaatgcaagctagtgcctgtttttcttacgacctccaatgaacccatttgtttctcatgttttgtttttttttttcagtctggttatgaaggtcgagtcccactgaagagcgctcgtctgttttatgacatcagcgaaaaggctcgaaggattgtagaatcttattttatgctgaactcaactctgtatttttcctatacacacatggtctgccgaacagccctgtctggtgagattgcagtctgaaatggttcccttttacccacaatacattgggaaatgaaacaaggcaaaacaaagctcaacagcatggtagattaatattttagacgaattctagatttccaaaacaaaagtagcttatgaactcttattctgcttctttctttttcttccttttgttcttctgaagttccagaaaaccctcgttctgaacattttcccttccaaatcaattttccccaattgctgaagtcttgggaaaaaaaaatgcttttctgctgtaggtttcccattttgaggaatcaggaacatggaaatcatagtcaccatgatgtctaccagcattaagtggaagcatagaagatgaagggatgattgaaagaaatactcttaaaaagaccgggaccttctcggtccctgctcagcattatttctcctctatgtcttatgcccctctgaatggggcggggggaataatgatgtcataggagtagacttttacacttgggaagttttagctgaattaaatcttgtttttttaaaaaattttcatttccttcccattgttttgctgccctatgtgaagtacaacccatgaaacgcatggaatttgttcatgtatgtttatatcagaaataacttttatagctgaagagacaggtgtgacatgctcaaggtttcacatccagttcatatcagaaccagaccagaatctcaactacttgtccactgttcttttatctgttctttcctgttgtctgcctctgcccatttgcaaagatcatcaggactgggagaagagagattgtcagttactttggtggaagttgctgcacttcatttctcgttcttccctattcccttttctggcaggtcagcaggatagaagaaatgacctcagtcatcccatccatgctgacaactgtttgttggatccagaggccaacgaatgctggaaggagcctcctgcttacacatttcgagactataggtatagctagaacctgcttcaaaacaaagcttttacctaacagttttcaagcagtgaaaactggaaaggtgctctgttttgcttgacgtcgtgttcatatctccaaggcagaaattctcaaataatcttctgaagtagctgccataaccaataagtggcattatcatctcacttttatcttaaaaattgtgcacagtttgcatcccatttcacaaaatgtccattttgttttaatatgaaaagtaaattttatgttcttttaaaaaaattcctgttctccctggaacatattccttgtggtatatgtatttcagtcagaatacaagggcatggagtcttggcctacataaggactttatcacatcaattatctttattcatacccaagaagaactatgtctgcattttataaataagacactagaaactcaggagaaaagaatgtccttacctattgagagagatttcagtgtgtaaggaatcaggagttatagtcaccatgtgttcatccttactacactgtactcgattccaaaacatttattaagcacccgctatctgcaaggcgtggctaggccacaaggaactcttcagcaagttaaagagaaaaacaacaacaagaacaaagcaaacaaacaaacaaaaatcctttagagttatataagggaaaaagagagttgtaattagggtgggcacgttcaaagggctagattaaattaaaactagttaggttttctgtggaggaagtgaaatgtgagacaagctttgacatatgattacaattttagtaaaggtggaataagtaaactcttcagaggtataactcaaactctatctgatcttctctttaagagtttggaggaccaattatatcaatgtctagttcaaaggaaacttactaatggaggctggacagtacatcaccagtcttcagtattctatgaccatgctctcataagcatataataatacaaatagttttctcttcattcttatagtgctctcctatatatgaatgatgactttgaaggaggagaattcatattcacagagatggatgctaagactgtgactgtaagtaaacctattcttgaatacttatttagtatgttttagctcagtattgccatttttctaagtacttacagatggttagatttcaaatacttctgagctcaagatttcaagaggttaagagagtttcagtaaatgtatagatcataaactgttagaagtatccataaaaatctagtacgttgtaaagatgagtaaattaaagaattgagatattaatcattttatcatgatcatatagctagttagtgttagacttggaaccaaaacctaggtcttctaattctttgtcaagtaatctgatggaaacgtaagaacgtcagttcctaagtcacccaagtctagaataagtcaaatgattctacaaggtgtctttcaagtaacctggtgttctacgtacttggactgagcattggccttcaaatatatagttaccaaaattatcatatatgtgtgtatgtatgtgtatgtgtatatatacctataggtatgtgtgtatatatattatatatataaaaaatatatatataatatatatacacacatataaatatgcccactgcagcttcctttcccatgcagacatggcctcatatatatatatatatatatatatatatatatttgcatatatatatgcatagagagatatatgattgtgactgtatgtaataaactcatacctgaaaattgatacacacacacacacacacacacaaatatgtaaacaaagagtaaatcaaaagttcaattcaacgaccatcttcctaagtaaacccgtgcctttggaaagaagcctacttaaagaccatatagttagcatcctttggtcttcaagccaaagagcatacacaatggtagaaaaatatattttcgactgctgccgctctttggcccacttcattcccttagtcccgagtgctcgcccactgcagcttcctttcctgtgcggacatggcctcaagcaccaccaccactgccatgaagattggaataattggtggaacaggcctggatgatccagaaattttagaaggaagaactgaaaaatatgtggatactccatttggcaagccatttgatgtcttaattttggggaagataaaaaatgttgattgtgtcctccttgcaaggcatgggaggcagcacaccatcctggcttccaaggtcaactaccaggcgaccatctgggctttgaaggaagagggctgtacacatgtcatagggaccacagcttgtggctccttgagggaggagattcaacctggcgatattgtcattattgatcagttcattgacaggaccagtatgagacctcagtccctctatgatggaagtcattgttgtgctagaggagtgtgccatattccaatgggggccaagcccccaaacgagagacgttcttatagagactgctaagaagctaggactctggtgacattcaaaggggacaatggtcacaactgagggacctcgttttatctcttgagcagaaagcttcatgttctgcacctggggggtggatgttatcaacatgaccacagttccagaggtggttctcactaaagaggctggaatttgttatgcgagtattgccatggtgacagattatgactgctggaaggagcacgaggaagcagttttggtggaccgggacttacagaccccgaaagaaaatgctagtaaagccaaaagtttactgctcactgccatacctcagataggatccatggaatggtcaaaaaccctccatggcctgaagaatatagcccagttttctgttttaaaatttttgcaatttatccttttgacaaagggctaatatctagaatctacagagaactttaacaaatttacaagaaaaacaaacaaacaaccccatcaaaaagtgggagaaggatatgaacagacacttctcaaaagaagacatttatgaggccaacaaacatatgaaaaaaagctcatcatcactggtcattagagacatgcaaatcaaaaccacaatgagataccatctcacgccagttagaatggcgatcattaaaaagtcaggaaacaacagatgctggagaggatgtggagaaataggaatgcttttatactgttggtgggagtgtaaattagttcaaccattgtggaagacagtgtggcaattcctcaaggatctagaaccagaaataccatttgacccagcaatcccattactaggtatatacccaaaggattataaatcattctactataaagacatatgcacatgtatgtttattgcggcactgttcacaatagcaaagacttggtaccaacccaaatgctcatcaatgatagactggataaagaaaatgtagcagatatataccatggaagactatgcagccataaaaaaggatgagttcatgtccttttcagggacatggatgaagctggaaaccatcattctcaacaaacaaacacaggaacagaaaaccaaacaccacatgttctcactcataagtgggagctgaacaatgagaacacatggacacggagggtaacatcacacaccagggcctgtcagggggataacattaggagaaatacttaatgtagataatggtttgatggggtgcagcaaaccaccatggcacatgtacacctatgtaacaaacctgcacattctgcacatgtacactagaacttaaaagtataataataataaaaaaatttccaattgagaaagtaagcagattatagatgaccaggtatctctcaccaccatacaaaatctaagtagttgggacatgtatgtgataaacttcaaagttttggcattatagaagctatttctaaacttttcttgaattttatgcttgtccctcatagcttacatgcttttctcattagtgaaacatatctgtcatttatgacacacatatgttattcatcacacagtactgtgatataagcaggtaatatcaaaaagtatgtattactgggttaaaaggtgattcctatgaggattctcgttaaaattgtctagaaacattgtaataactaagaaaaaatatttcatgtgacttcatacaataatatatgttaaaaagtcatgatgcctcactttttgggtaaaaagcttaaatgttaatatgggagtactttaatactccgtaatctgataaattaaatcaagattgacgatctgtattggagtttaaagtccagaaggttttttgcacttctgggaaagcttgagtgtaggaagcattttatttctgatctctgctaacactgaaactgaggtacaaaaatactggcatttcgcagtttcaaagaaagtcagacaggtggttgaaaagatttctttgcttctcctccatctagtggccgtatttggaaatgcttgatgcttaaagcaagggatgcctgtttcattaatttttgaatgtcaagttaactggaattctactttttaaagatgtgaaagcagataatattctcctttcagagtgctacaattttaattaaaatctataactatttttaaaaacccagaatctaacctcccctaaaaaaactaaaactgatttaaacaaatttttaatccaaaagctcctgtttgagaacatttatttcctcaaatacttcatattaatgcatacagtggcattttagggaataacgtagataactaaaattcttacgtaaggcagttcttatctttccccacaggaagtttattctagtaccagcaacaacaacaacagcaacagaaatgggtatttttctgttttagtttccctttgactgtggagggacaaatggagcagagaaatggcataacttgaggccacataaggaagtaacgtcttctgagtcctttactttggaaaaatctggaagttgtgtaattatctgaaaggtggctgaaattttacttttattaaagacaattacagcacaaacgcttttctaaatcaatcatcagttagacggaaagcaaaaggattattttaaattatgcttagtatacttggaagatatgtggattcttttcaatagcggcatttgtttgtgagacttgggaattcaaggatgttggtttctctgtgcaggttcaaagaagataaaatttaatgagttccatttgtttcatgaaaaattaaattcagtataaacggggctgtgttacaaaagtatgtttataatcatttatccaaacttcataacatatttttgctgtagaaacaatgtcacacatggaagcaggttcactaaagcttgtttattcctccaaatacctgacatgtaacagatgatgttcgctgtgtgatgagatgggtcttagagatccttgtgaatccacggctataatcagttccaaccgcctcatacagttcacagcttcttttcctaaactttcccaaagttattcatgtttaaaattactttcaattccagaagaaagaaaatactaatttgtccccacatcctttctttagtcttataagatgttaccaagacttggtaatcacatagaaacattggcaaatgcgtgtttgagtgagtcctgaccagcaccagggagtgggcagcccagaaaacctgaaattccaacatcccaaggccatttactcagaaggcttttctttctttctttctttctttctttctttctttctttctttctttctttctttctttctttctttctttttctttctttctttcttttttctttctttctttctttcttcctttctttccttctttctctttctttctttctttcttttctttctttctctctctctttttctttctttctctccctctcttctttcttttctttctttctttttttttttttctgtcacccagactggagtgcagtagcacgatctcagctcactgcaacttccgtctcccaggttcaagcgattctcctgcctcagcctcctgagtagctgggatcacaggcacccaccaacacatctggctaatttttgtatttttagtagagacggggtttcaccatgttggccaggctggtctcaaactcctgacctcaggtgatccacctgccttggcctcctaaagtgctgggattataggcgtgagccaccacgcccggcctcagaagtcttttctatcctacttcacaggttttacctttcacttattttgctgcttctatgtggaaatgtacaaattccttctccagaaaaacagaatcacattgatactgaggacacgactaactcgtgaactctctagatttacatcagaacagttgccttggtaaagctgtttaggaaaagcaattccagcaaagacaaatcactcttcagttattgtgagtagaagagtaaaaagaaactgactgctttttttctgctcttccctttaacactcacacacaagtcacatatacacacacatgcagactcacacagacataaacacacacacatgcccacataaacacatatgcacccacctgtctctctggctttccgactcctccacctacctcttaccttccatatgtagtcacgtagtccgggagtacctatgttatgtagcaaccaaggactttaggaaatttttcaaatattcttcctgaagctagcagtgaaaaaccagccagctcattttatgcagaaggaaaccaaagatttacgggcatatgtcaactcaagtcaattcagaaaatggctagtgagaaccagtccatgttctcacctagtaaaatggctagtgccacttttttttggttttactttacttttctgaactatacagaggaatgaataaagtttctgtatttcccaagaaagacaaaatggattctactcacatgagacacttctttaaacacagaagcaaggcctctaatattcagttgcttaagctcattcaatttgaagaggcagcttgtttgatcttctaccctggctcagtgagcccagcagtatttctttttctctcactacactcttctacctaaacgctgtggacagctccacctgagcagtgcataagctgcgaaggactgtgtcagtcttaaaacacttaagggtgatggcgaataggccactccaaggggtgtcgtgttctcaccactagagatgttcaaacaatgcctaaacgaccactgggaaacaatagtgtaaaggaaatgaaatatcatacagaattatgacttttaaaaatgtttgtattgtgaaaagcacataaaccatgaatgtacaatttaaaaattagaaagcgtatacgctcatgtaaccactacctagatcaataacaacttttccagcactgcagatgtcctgtttgtttgtttgttaattacacaagtatggaatggacacctaccttgtatccggatgctttgctagtgcaaaagctacagaaatgaattatgagaggaaaactttgccttctttgaatttgcaggctatcatatatatagcatgtattgaatgattactatgtatgtggactttgctacacgttttacttgaacatctttttattttctgaggtatatattattttgaccttacctttgttttacgggtgagaaaattgagataatttacatcatcttcaatcccaggattcctttattcttcgcctcaggccttaactcaaataatctcatagccagagaagcaggagttgtggaaatgtttatgatacaacaattgaaagtctaatttttgctttctttctcaggcctctataaaaccaaaatgtgggcgcatgatcagcttctcatctggaggagagaaccctcatggggtgaaggcagtcaccaagggaaagaggtgtgctgtggctctgtggttcaccttggacccactttatagagaattggtgagtttctcacccgcccagaaagccaattaggcttgcttcatgaactgctttatctgagaagtcctttaaattgcttcgtctgaggaaaagaagagggtaaaggcagttcttaatcagatatgttctagtaagtgaagatgtttgtagaaatagctgtgtcaatgatatttgatagtcactaatctgtcttgagcttattaacaaattgtaaggctgggcgtggtggctcactcctataaccccagaactttgggaggccgaggtgggcagatcacttgaggtcgggagttcgagaccagcctgatcaacatgctgaaaccccatctctactaaaaatacaaaattagctggatgtggtggcatgcgcctgtagttccagttactcgggaagctgaggcaggagaatcgcttgaacctgggaggcgtaaattgcagtaagccgagatcgcaccactgcacttcagcctgggcaacagggcaagactctgtctcaaaacaaaaacaaaaaccaaaacaactctgtggcatcagggaggaatcactttttattggtcacccagaagacggatttgttttctcgcaaatcataagaaatagtattgaatcatttatgaaacgtatttgaaagagggcaaggaaacctaaaagattattattacttattactgttattacattaagtatttcaatattattatatgcaaactagctgaggacacttagctaggaggagaccatgatctcatcgttttggaagcccgtgggcagatgtcatagtctccacctgtggagctgcagcggtatgaattaagaccaatgggtagaagccctggagggaaaatttgggctccacacaaggaataactttcaaatagtcaccacagtttggcagaattgtctgctttggaagcactgattggatggctccaatcaaagcccaggcaactgcttagcatggaacgctgaaatggaatctaaaacatcgtagcagaggcttaactggatgacctccaaatcttctccagccctaagtattgatgaagctatgaaattctattcttaaaactggcattctatccagttttccttgttaggttcctaagttgaatccaatttcatcagaaactatttaaaaataatgcgtttttctcatatacttttcaccatcaaatctaacttacaaagtgtttccccacattccctaagccattctttcacatattttacaaaagacctattgtgaccttttattgtacagaagagctattattatctgccttggaaactctgctagataggccctaggggtagaagggtgaacagaacaaggtcctggactatgaggagcttggacagaacagctagtaaatacgctgtaagaagagaacagtatatgttttgtagcagggaatcaaggaagacttctataagctcagacctagaagcaaagacgatagccaggcatagaaaaaatggccctggctgggcgtggtggctcacgcctataatccctgcacttttggaggcctaggtgggtggatcacctgaggtcaggagttggagaccagcctggccaacatggtgaaaccccatctctactaaaaatacaaaaattagcctggcgtggtggcacgcacctgtaatcccagctgctcgggagcctgaggcaggggaatcgcttgaacccaggaggtggaggctgcagttgcagtgagctgagatcactccaccacactgtaacctgggcgacaagagtgagactctgtcttaaaaaaaaaaaaaaaaaaaaaaaagaagaagaagaaaaagaaagaaaggccctgacaaaaggaccagagcacagagtcctgaaaacctcaagggagcagcaaacaattgccttcccctatcattactttatatcctggtattttccatctccaaaatgttagcattccatcaaagcatttttttttaaactaaggaacctatgtcaatgggtagacagtgaagataaaattattgaaatattacctcactattctagtattcaattcagcagacatttaatctatttcatcattcagtatccaaactcccttttccaaggtattgttctctcaaaataagctaacacaaagtaagttctctttgctcctttgtaataggaaacatcaacgccagcgtcccttcctctgatggaaaagtactagaaaacctctccagtcttcaggccgtagcggcatctagtggccacagtgggaaatgaccagaactttttcctcagctaaattagcccaggctgtgaatcattctttgctacacgtggagatcatctattgatcgttacaaactactaacatctgtgtttcaggagttttaagagctccccaggtgattctaacgtgcagcagcagagtttgggagttcctggcctagacgtctttttgcagattgaatctcagaaaaaaaaaatgcctacctatgaacaagtcattagagctggccgattctcatgcttattatgaattactttaaagggtctcagttctcaaggagtatttagcaacatccttttaaggatgcaaggatgttcgaagcttcatatatattggttccagctcttgaatttctttcccttaatgagaaacaagattacaatcatttcttgtggtcaacagatgtgaaagctttgtatgtgtgtcgatttgttaagtatcaggattgttttccttggccgggcacggtggctcagtcctgtaatcctagcacttggggaggccgaggcgggcagatcacctgaggtcaggggttcgaaaccagcctggccaacatggcgaaaccccgtctctactaaaattacaaaaattagccaggcatggtggcatatgcctgtaatcccagctactggggaggctgaggcaggagaatcacttgaatccaggaggtggaggttgctgtaacccgagatcgcaccactgcactccaacctgggcaacagagtgagactctgtcttgaaaaaaaaaaaaaagattgttttccttatatttgtaaagtagtacttgggctttttatttagatgtggcagcaacttaattttctgttatttagtatatctagtccttttagttgcctttttgtaaacattttttattacaagctcttgcatgaaaggggctttgttttcaattcataaaatagttatttatttaacttactgtgcgcaggcactgtgttaaagaccgcctatggggaatgcacactagtaggatataattcctattttcaaggagcttgaagtcaaattggagaaataatacaaggacccaactaattaaaccacaaggcaagttttggtaagaatccttagcagcaaatgcgtggtttgagggatatcaaaaagcaatccaaaaaggcttctttgaggagatggcatttgaaaaaaagctttaaaagatcaatttctttagggagaggcattttagacagagaaaggcttcatccatttacacatttactcatcaaagaaaatagaactcttgccacatgtcagtggcttttctgagcactgaaaatacagtagtgaccaagaagataagatgccctgctcttctggagcttacattctagtggaaggaaacagatcccaaaaaagtaaaaaataaataaataatcgagagatttttcacacggtgaccaatgatgtgtggaaaatggaacaagacaactgattctggagtgaaagggtaggagcggcaaattgtgaggcctcgccaaacaagtggcatgtgagctgaaacctaataaattagaagtccactaggataaatgtctggaggagagtattccaggcagaggacaagctgcaaaggcccagagacaataagatgtttggagtcaccaagaaacaaagaaagccagagcatctggaatatggcagacaagagggagagtggcttcagtagaggacgtggaggcggcaggagtcggattccacaggctgattgggaaatgcgaattgtattctaactagtggaaagtcatgtagtccccacaccccaacacacacacacacacacacacacacacacacacacacacacacacacacacatatctcctccagtcctggagagttacaggatacagaagattactttagctaacatgtggtcttggactggagtagtaatagagaaggtaaaaagagatggaagatttgagatacaatttggaggtagaccagctgcacctgctgatggattaatgtgaggaataaaagaaagcgtagaatataatgggagcatccagagaaacacttaattcagaatcggattagggaattcttttgaaagtgttacattcagggagcttgaggtaagttaagaagttggaatataaggtgaggagaagggaggcaaaataaacctaaagaagagagaaaggtatgaataagaagagagaacaaacaccacatattctcactcataggtgggaattgaacaatgagaacacatggacacaggaaggggaatatcacactctggggactgttgtggggtggggggaggggggagggatagcattgggagatatacctaatgctagatgacgagttagtgggtgcagcgcaccagcatggcacatgtatacatatgtaactaacctgcacattgtgcacatgtaccctaaaacttaaagtataataataaaaaataaataaataaataaaagaaaaaaaaaagaagagacaggtgtaaagcaacttcttataagcacaccaagaaaagtagacctgaaacttcaagcagtagggacccattgaagagctgtgagtaggaaagagatataatcagatataagccagtaggattcattagaagcatgtgagggtgagtagtgaaacagcgagagcaatttggaggctgcggcagtaattaagagatgatgagggcttacaatggtggctctcaagagggagcgattggccgggtgcagtggctcactcctgtaatcccagcactttgggagggcgaggcgggtggatcacctgaggtcgggagtttgagaccaagcctggtcaacatggtaaaaatataaaaaattagccgggcatggtggtgagcgcctgtaaacccaggtacttgggaggctgaggcaggagaatcgcttgaacccgggaggcagaggttgcagtgagccgagatcgcgtcactggactccagcctgggcaacaagagcaaaattccatctcaaaaaaaaaaaaaaaaaaaaagagggagcaatgttgccctctagtggacatttggcaatatctgggggttggtgggggaggttgttactgacacctgtggtaggtagagaggacggggtgtcgctgagcatcctgcagggcacagggcagcaccaccctcccaccccccaacaaataattatctggtctaaaaatgtcaatcagaccaaaattgagaaaccctgacctaaactccggcaacaatagtgcattgaggagaaaggggcagagacagcagatagaacagaataggtgacttatcagatgcaggaaaccatggtcgggcttttaaggcaaataggtgagcgatgttggtctttaccgagagagagcctacgtgaagaacagagcaggttcttggggagaaaatggtgaattcagcttgaccactgaactgagttggagatggctatggggccatgaattagaaagagtaggaagcagttgaacatacagtcgttctttgcaggagagaaaatcttagaaagtaattgcttaggacccaggaatgttaggagaaggcatctgtctggggatgaagaggaggtgttcaatgcttaactggatatagcatcaacccatgtacagatggatgccaggaagtgtttgggaagcgtctgctgatgagactgattattatgcttgtaacagaaatgtgtaaattgtcttttttgcaggagcgaatacaggctgatgaagtgattgcaattctggatcaagaacagcaagggaagcatgaactgaatatcaaccctaaagatgagctataaaaatgagaaagaatgttctatcaaatatttatttaaattgttaatcttatgagaacctttttatttttgtacagagccatggtataaattaacaggttaatgtcagtcatcagatcttccttctcttcctaaggatgcttgtgttgcctcaatctatcaatctatctttcttgttttgggttgttttctctctctctctctctctctctcttcttagagacatggtctaaccatgttgtctaggatatagggcagtggctattcacagatgtgatgatagcacactggagcctcaaactcttaggctcaggcgatccttcaagcctcccggggagctgggaccacaggcacgtgccaccacacccagctctctttcttggtttttcatcatttcatgtatctatcaaagcccagttcacctcctcccccaaacacacacacacacacacacacacacacacacacacacaattaagttgctgcaaattcaaaagcttagagagaataagcttcttggtggtgaaactacaactctcacgtgtgctccagttctaaaattaacctgtgcctggtctctgaagccctttcttgctctgtgcctttcagccacatccttaggtgctaacggccatgagctccgactctccaaagtgagctccactttgggtctgaggagcccctggcagagtccacgctgcctcaggtatcatgggcgtaatgatcacccaggctccgggagatctcatggatgattactgtatgagacagaggggacttcagtctttccagggccttggtggaatttttggctctggtgttttcgccagacaataaacttacactggaagctttgattcaccctccacagtactccagaaaggactgtcctataagttgtacactttaaaaggtcatgtagaggttgtagtagaatggcttttcaccctggtgactttggaagaaactcttgaatactgcctgcatccgggcaccatggccaggttgcctaggagtggggtccactgatgaaaagaggtgttttgtacttacataagaaaaataaatttctgattgatttt

SEQ ID NO: 78 - DNA, 64275 bp, Homo sapiens
tcagtttttctctctgtaaactgaccataataataacacccacctcaaacagttttataaggttgaaatggggtgaaagtaggaaagatctagcacataatgcactaatttttttttttttttttgcctaaagcaggcagtggaatagaatgcttaggggcatacagctctgagatcaggctgcaagactccactgctgtgtgatcttgactaagtctcttaccctctctgtgtcctggtttcctcacctgtaaaattactataatactagaatcaacttcataaggatattgtattcaaggaggatgagaggagtcccagtgaatggaggctggcatagaataggcttacaataaagagaaagaacaaataagcagctatacacagcctctgccacaaaaaactaccaatagatattagccgctattagttaattgtcattattatctctccctggcatgtttccactcaggcaagaccaaagcactttcctctaccaaggaatatcttcctctactttcatatccctctccatccaacccttcagcctgcctcagttgggatttgtaggagtcctgaagctatggaccagatcagaggtgccttcccttccagaatctattttccaaacttcatcgattgcctatatttatatgcatgcatgcacacacacgcacacacacacacacactctcactcactcccgagtcagaaaaaggactcagcacccagacatactgcaggctcttgaagaagacagtattttcctgtgagctagaggatcttcctgttattctccatgcagttcaaattctgtcaattattatccagttagtcatcgctccagaggtggactgtcattaaaaaaaaatagaaggtgtgtgtttgtgggtgagtatgtgcatgtgttgtgtatgcagggggtggggaggggcgagagcggtcaaataggaagtgccttggtatttatgttgaagtgcacactggtttaaattacccactgggaatatgattatgcttaatctatgctcagttgaaaggggctggggctgctttctcccctcccttcttgactctctgttcacagaactcaggctgcctccagccagcctttgcccgctagactcactggccctgagcacttgaaggtgcagcaagtcactgagaatgagcactttcttctcggacacagcatggatctgcctggctgtccccacagtactatgtgggacagtattttgcaaatacaagaagagctcagggcagctgtggagctggatggtctgcctggcaggcctctgtgcagtctgcctgctcatcctgtcccctttttggggcttgatcctcttctcggtgtcatgcttcctcatgtatacttacttatctggccaagaattgttacctgtggatcagaaggcagtcctggtgacaggtaagcagacggtgctacaattttcactgagggtatgatctgaaacttgctttgccttagcaggactttgtcaaatctggcttaaaaataaaatacttggcatggagtaaatgaaagccctcacccaagtatttttcatgacactgttttcgttccgttttttccaggaggtgcatttgaaggggctggtagtgggagggaaggagaggatgaagtgcacccagacaatgattttgttaaaatttcccaggaataaatattaataggcaaaatggcaatatttcatgtgttctattgtacccaggaatgtcccatagattgttttttaggcttaaatggacttttgttctgacatcattgtttggccaggttctccacctggactcttcttccctaggtatgcaagaacgcttacaagccaagttctacttgtcccttgctgttttgaaatattgaagggattcacttacctgggctggagactttgcagtttgcttggctgctgtcaagaaccttgtgtcctgtctgaactgttcctcattagacctctaatgtttcttaattggaccaacttggcatcgtgtccaacattcagttgcctgttagctgagctgccagtttttcccttgtttgtgtgtgtgtgtgtgtgtgtgtgtgtgtgtgtgtgtgtgtgtttccccattgcaagtgtgaggccaaattaaatttctttgagttgtaaaatttttgcttggttatggagtttaagcttggatagggctgtaattaggattatccagcgttatcctaacccagaaagccctaccaaataaaaaaaaaatcagctgtggaatcatttgggggagatcatcacccctctgaccatgatcctcagggtgaaggcaagaatggcatggggatgtggttgggagaaaatctggggcttgacaatttgcagagaaacagactttgtttttgggttaaagtaaaatgctttcttgaaacaaaatgcaaattggtgcttgttggggttagacaagccacagaaaagaagcttctttaaattaatttttgaaagtttagagggagaaaattcagtcaatgggatgtttatctgcaagaatgtctgatatcacctggaatcatgtatctgggagtctggctggattttccacttttttattagaattctcaaatggcttatcggtgaaatttgtaagagagtctcaattttcctgttctgtgtcctgttctgttatgaaaccttaggatgagctcaggcaaaccacagggtagctgagaaaatgggaatcccttcttgcttgtttattttgtcaacattctttatcctctgcatttcaagatgcaggtgttaattaatgctcacaaaatatgcacccaactcagtgagcccacatcagccactgaaaggtgccgtgcatttagtgttgagtgaggatgattgaatcaattaggcaactcaagctcaaggactaatccctgcatgaaatgcttatggcaatgaagaaagcttagaattaagatgagcactacatatatttaaggatgactgaaatgtcactttcacgttctttgttattttcaagttctctgtcatttttatgaggaatgctatgtgctcatatcatcctagacaaggcctcaagacctttgtatgaaatcgagaaatttaaaatgaattcattttgttagaccacaactctttaaagaatgaagaagccacgctgagtttggaataacctttgttccagattggcttatgataacatagattagcacgcattgtggtggggcaggaccaaagaaaaatgtggcagtgtacatcaaaaccatacatatggttcctttatctgataattcaagtcttggaaatttattttgaagacataatctgaaatatgaaaaaaagagtagaagcaaaaccaaaatggcacattcaacacaatcttattatttaatttagattaatattaaatatcaaaagcaacaaaaagggtgataatatatggtacatcctctgggtataacaatgtgcaaccattaaaaatgacagccacaaggactgtgttacatggaaaactgcttgggccaaaggaaaacacacaggaaatcccagggttggaacaagtctacagccacgtcaaatgcatagattcctgggctgggcaaaaagctgtgataacagctggaagaaatagtttgtatatggttggattagtgtgctggaaatagtttgtaaatgaaaggaaatagtttataaaggaaatagttggttaatggttggattagactatttacgtgttattttctctcctggatttcaaatttctctggtgtgattacattactcatacaataaaaatacttaaaagagaacacaaaacagctaaagctccttttagtttgtatttaattttggacccaggtgagaggcaattacaaagacaaatttaaaaaaatgacttttttctcccctttgagccctttatttcattttgctaagatgttcaaaagtctgttgcctcagagacaatataattacagtaagaaaaagtaagcaagcatagagtgtttgaatacatatttgtcttcaagatacctgaaaccacagaggccattcaaatatttaaaatgtatgtgtgatgcattttattttattttatttcattttattttttgagatggggtctcaatctgttgcccaggctggagtgcagtggcatgatctcagctcactgcaacctctgcctcccgggttcaagtgattctcctgcctcagcctctcaagtagctgggattacaggcacgtgctaccacgttgggctaatttttgtatttttagtagagacagggttgtatgatgcattttaaatgtataactgtaaaatgaacaaagagcagaccaacacgattgtaataacatctcaaccacaacatagtgggaaaaaactttgaagacacacaggcttgggtttgaatcctgcatctaccttgccttaggctaggtccccagaggcagtgctttctgtgaggatttgtgggaaagatttattaggagggtttccagagaagatgggcagggaaaaggaagaagccaggtaagggtgagacattgagaagtcctctgaagatcacttgggcttgatcaccctgggcggacgtggggtggtgtggatcactcatcagagctgtgccaattggagactagagagctgtagtctttatgccttcacaccagtcaatcattagttaagggcagtcacccctgttcccccttggttgtgggcaggaggggagacttaattccatgcacttctggcaccatgtggacactggctggcaaagtgggttctggtcctttggggaaagaatcgcaggtgctggctgctgggagtcaaagtgcaccatggattgatgcacacaacagtgggagggttctgggggaatagcatcttatttgctgcatctttattactagctgtgtggacagctgtgtaaactttggtgctcggttttggattttgggactctgttttctcctctgtaaatggaaaataatacacacacacacacacacacacacgcacaaacacacacacacccctgcatatgttatactactatagatggagttagcagatgagagagagagagagagagagggagagagagagagagagagaatgactgtattggggtggtgaggggaaagcttgagtagttaggaagaacatgaaggaacaaaaagaacaaaagaaaacgttgacaaacagagagaagaagcattcatgtattcactcaataaatattcattgagggcccagtatgtgccatgcattttccagaagcaaagggggaagaaaattttaagaccaggaaattactgtcaagcgatgggatcaaaattcctacttttccttcatcttggacacacattcactggagttccttccccctcttctgaggttacacgttgtccttctcagcctaccctctaagcttggcaggagatgcacaggtaactttaagtttctatcctctggcctttcatcctgccccctccagtcatctcaaatattgagaaccgactcagcatctactgtgtacagagcagacacctcagggcttcatggaccactggggaagacacggccacacccaactgtggctgtgtgatggggcacataagaaacctccaggttcattcccaaagcggatcccaggcagacacaggtcttgtgtgtggagctggggaaagcttgacaaaaaaagagggacctcgttaagaatctaaaattagttttctagggggaaagtgagaaggtattccagcctaattggttaagtagctacaacaaatacagctagcactcaataaggcttgctgcattagataatttttaattgaaaatttcaaaactggatatattggagaacggatccaggaggagaagtaagatctgttttcagtgaaaatattttatgctcacaagaaagtgtctcacgtgagtgatcatcccttcttgcaattactgaacagtccaaataaggttctcaagttgaataccatgggtatcatcttggggtttggactcctttggatttcacgttagattattaagatggataaacattgacagtggactaagagactaagagaaataacatctctgtgctctaacctttacatgcattttatatttgattctcacaaccctaataattcacatttgtaaacaaggaaatgcgtccaaagtcactgagctactaagtagccaagattggactaaacccagatcagatccatctctcaccaaaagccatcctcttaaccactgtcattagaagtgttagatccatagttggtattagaccacaaaggttacccaggatataaaacgtgtccattcaatcaacaagtaaatattgaacatctgttatgtgcccatgactctgcttaatacagagcttggcaattgattgggtgtagaagatgcttatgagggatgatgaaataagagtaccatacacagggctagggatgtttgcagagggtgatgatttgagacatgccatgtgctaagcttgacttcagaactgagtctgagagcagtgaagggtagttcaagtgaagtgtcactggaaattggaaataatgaaatagaacttggttagatttgtagatagatgctggagaagcatgagcaacaaagtgatggtggatgttgaaaggatggcccttagtgagtctataattcagtctaccagatgatttttacatgaacaaatgtccccacttatcatgcggtttaagttttacctttacctactacagggaagcataaaaaaggttttgataacccgggtaattttgtgaaagtttgaacaatgattgtatcaggcattatagatggagtgttttgactggggagtattctgactgcatggaaatccatgccaactatactgcaagcggcttgaaggcaggaaccaggtctctttttatgaccatgtgcctcttctcagtctctcagcacgttaggcctaacacagtgttaatgagcgaatgcacagtgagtgaaccaaccatgtgggtgaaacgtcctctccttttcatggtcgttagttggacacaataggattgtcccaatctgcccactcacttaggtacttacctttgctgttctttttgctggggtcatttgcataaaaagggcagagtgacatggctgagctgttggaagctccattgttctgtagtgacttaattgttggcttgccctggacaaggctttatgctgatttggttctaagcgtgctcctgcttacccaggatgtggcacaaatagaacatccactggcttccaccagtctgctgaaactgctctctaagtgtcactggtgtccttctaatcaccagagcttgacttctgctccagcactgccgaccatactttctttcttttcatggcctcgttagccttgcaggaactgcatttccatgcttctttgtcctttgactcttccgggttcttcctacacttcctccaaggtaatctctgactctgtctttactccaccttcttatatggctgcattctctacccagcagcaaagtcatacctgctcctgtggtatcaattatctcctctgagagaggactggcaaatcgtggttttgtatacctgacattcttctgagctcctgactcatatttccagaattttagcctgaaactttaaatttggcatgttttaaaaaaaatttatcatctcctcttgtgatccttttccctttcttttcttttcttttttttttttttaattttttatgcacagagtctcgctctgtcacccaggctggagtgcagtggtgcgatcttggttcactgcaatctctgccttccaggttcaagcaattctccttgcctcagcctcccgagtagctgggattacaggggcccacaaccatgcctagccaatttttgtattttttagtagagagggggttacgccattttgaccaggctgggcttgaacccctgacctcaagtgatcttcccgcctcagcctcccaaagcgctgggattacaggcatgagtcaccacgcccagcctcccacagtgctaggatgacaggcgtgagccaccacgcccagcctcccaaagtgctgggatgacaggcgtgagccagaactatcgcacttggcctcagtgtctaaaacttggtggagggtggtaagttccatgcaaactggagcacatacctcatgactagagaaggcagctgcttcctatttccagtcaattattgccactttgccatttttgtggtatttaagaggaaatagaaaattgtggatctttgtgtgtgaaatctcccatttaaaacaagttggcaatgatttctttcttatattatattttattttattttatttattattttttgagaaggagttttggtcttgttacccaggctggagtgcaatggcacgatctcggctcactgcaacctcctcctcctgggttcaagcaattctcctgcctcagcctcccaagtagctgggattataggcacccaccaccatgctcagctaattttgtatttttagtagagatgggctttcaccatgttggccaggctggtctcgaactcctgaactcagctaatccacctgcctcggcctcccaaagtgctggcattacaggtgtaagccactgcatctggtctctttcttatattttaaacaatcccatagatcaaacagaacacattcttgtggccaaatgttagcttccaacttctgctctggttcctgcagagaggagcaggcagagaagaaacttttctcttgcttatgcagttgcatctcttgacatcatttctgtgggttactttgctgtcagggcctctgtcttcttattcaggctatcacagactccttcaaggaaggatgaggggagaaagaagctcgtcttgggccaagcttttccctagtggagcacatagagctttgaggcttccatgttccctcccattagcaagtgcaatgtggggactggggctccccaggcaggatctggccacatgcaaggggtctcccctggcctgccctccttgtttcaggtcacttgtgatattggggggaaaggggtgagcagccaagaacagatcattcagccactttagggtttataaaaatcatatagatggccgggcgcggtggctcatgcctgtaatcccagcactttgggaggccgaggcgggcggatcacgaggtcaggagatggagactatcctggctaacacggtgaaaccccgcctctactaaaaatagaaaaaatcagccgggcgccgtggcaggcgcctgtagtcccagctactcgggaggctgaggcaggagaatggcgtgaacccaggaagcggagcttgcagtgagtcgagatcgcgccactgcactgtctgcctgggcgacaaggcaaaactctgtctcaaaaaaaaaaaaaaaaaaaaaaaaaaaaaatcatatagataaactttatttcagacccaaccatttcccaacacctgaacaccattttcaggatcatcccatttcatccactggggttttgaataatcccagtgacagggagttgaccccctattggtggaagttatttcatttttatacaatgctaatggttgtaaatatcttccttataatgagcgaactattcttcccttgaagttaactctgctcttggaagtcacataatctaattaaagtattattttgcatgattgcccttgaaacatgtggactgcatcatatcagagtcaaatcttctttgaactaaatcttctcattccttttaccattcctcccatggcctagtttccagaacgttcatcattctatttagcctcctctgaaccatttccagtttctttcttgacattcctctgagctgttgactcagagttaatatcacataccatcttggtatgagcaacacaaacccagctggaactaaatgaggtgaaattaaatcagaacagatgcagggttcttcaccacatgctgttgctttgtttggtggggtcagtccctaaacagaatttcccctgaattctgaaccaatggagaaatgagacagggggcttaagacatcagctttattcctgatagatgcattggagcacgggtcttaggcatgtggtaataacggtgctcagccaaggcaaggtcgaaaagtctcaggcctcacccacagatggggcctgggctgggcagctgggcttagcacaggtgtttataggctgggaggttggaaggaagagacaatagggtccacgtgagggtctggcctcttggattttctcctctccttctcagtcctgatcatttcctccgagttgtcatttggttctcctgctagagagagaaaagacctttgcaccaggcaaaatgttcatgtccaattctttctgccaaactcaccaatcagatactttgctccacctccctggggggaggagggtagaggagccagaggggccaggaacgtcacactgaaagctatccctccatattgcagacagcataggaagtggggaagaagtgttcccctgtcacactaggtccagaaaaccaacacttctgactgggcatggtggctcacgcttgtaatctcagcactttgggaggccagggtgggcagatcacctgaggtcaggagttcgagaccagcctggccaacagggcgaaacccaatctctactaaaaatacaaaaattattagggcatggtggtgtgcacctgtaatcctggctactctactcaggaggctgagacaggaaaatcgcttgaacatgagaggcagaggttgcagtgagctgagatcacaccaccgcactccagcttgggtgacagagtaaaactctgtccaaaaaaaaaaaaaaaaaaaaaagagagaaaaaagaaaagaaaatcaactctctgaatagcggatgctgtgtctaaactgcaaactgcagctggtatgaaaatggtccagggaggtttgactgtgaacttaaatggggtcagcactgggctgtttacccccagtgagccccccatccatcttaagcttccctcttaagatatacagtatctaaatgaagatattagactactcactagttctgcactcatgagaaagctgcttcacctctatgaggttaatttttctcacatataaagtggaatcatgattgatatctcttctaagtattaagcaagattgtgaatatatattgctgcctgatacgtagtagctgctttataaaatataatgatttttacctattttctatcttttccagttcagtaatccccttggcaaaggagacaaaaggaatataggcgatgagagttctgccttctgggccattcattaatgtgcctcatcagcctcatacaatagtgccctgctcctttgttcttttgcactctgactgtttcttggctagcaagccctctttttgtagcagacttgctttgcaggtctcagcttaatcccagttttcactgacagatgcttctccagtgttgagacccttggctctgtgctgtctaactttggttcatgcccttttaagctctgacctctttgagagcttctgctgggaccactctagcctcttgtgttttctctcctgattcttctcagtcctgataatttaccctgagctgtctttttggttcttctgttacagagagtctttgggaggtgctggactgtgaagacctttgctctaggcaaactgttcacctgttgcattgcctcctgagtccccatctctctatgaggcagggcattacctcttaggtggggagcgaagggtgctgactgggagcaggatgtgtgattgatgtgagccgtggctggggccgaagctggttgttttcacagctcatgttttcagtaccaattgcctactatgcacgctcgagatacagtgtggagcaaaaacagaataaggccctgcctcatgaagcttaattctagcggaggaagacataacacaacaaaccaatgaatggataagatgatctcggtgccacaaaaccctcatggccaggacagtggtgtgactgtgctgttgagagccaccttgtatcagaggcttcctatgtgtcagatactgtaaggagcactttccatgcctaatttcatttaattctcacaaacgccttataagataatttaaaaaaatattatgggccaggcacggtggctcacgcctgtaatcccagcactttgggaggctgacacaggcagatcacttgagcccgggagttcaacactagactgaggaacatggtaaaaccccatatctaccaaaaatacaaaaattagacgggcatggtggtgggcacctgtaatcccagctactcggggaggctgagccaggaggatcgcttgaacctgggagtcagatgttgcagtgagctgataatggaaaaaaaaaaatcatgaaaatctttaagtgtacacaagaggagccaatgtacacagtatactcaatacccctattctagagtgatcatggtccagatactgatgaaatggtttttattattaaccccactcaacgatgaagaaattgaggtttttcaagagtttacataactaaggccaagtgacaaataagtaattggcagtgctggaattcaaatgcaggtcttttagctcaagaagataatataagcagtgcaaaaaggtagatggcaagtgtgctccccttgagggaaaggggtattggctgccatctttttcagacctgctcagctgacccaagcaccttccgcattcagacacagaatcttatgcaaagctgactttcattccttaagaaagagaactccttaccccatagcaccagagaacactaaagactgaacagccaggaacttcctgatctccctccattagcaggggtggcacttctccagtgagcaatcataagtgctctgtgctcatgaagcttgtcactgttttccaaatattcccagtcatgcccggggtttgttacctggctacctttagattactacttcagaacctacctggtatgttgttaaagaatgaagtttagggaagagctagagaagaagacaatggcataggagggttttaaaaaagaactctgattagcagtgtggaaaggggattagaatccattcattcgttatttcaccaacacttattgagcaactctgtgcctggtactgggaatatagtggcaaatagtatgcgttcatgacattgaatcaacttgcagtatagaggagcaggtaggcaagaagccagtatattgcaggacagtataatgtgtgagagttcagagaagtgggcagaagtgagaagaggcaagaggatgtaggagactggggtagaggccatgagttggaagggcaagcagccaactggagggactttatgaaggaagccctgtaggacttgctgtcttattggacctaggcagagaagaaaaggagagacccactgcacattggactctccctatcatggctctcatcatatgccctttctgattcttcttttgactgcctggatttccagatggaccatgagctccatgcagggaggcactatggccccagtgaaaaacatggtgtccacaacaggctcaaggaatgaatgcatagacaaaggaatgtagagaatgattctgagggtctgagggtgatttttacaatgaagagaaaccataggtcttgcgagactgaggaagaggagctgactttgcgaaaaatattatatcttttgtttgagacatgttgaatttgacatgccaaggttgtattcaggtggtggtgtccaaattaaattggagaaatgaggctaaaatacaagaaacagcccaagatggaagataaaattagattaatcttccacataggtaggacaaatgaagctctgaaacctaaaaagatatctgagagacgagtgtagacagagattaggacagggcactgggcggtggggtccactcatacctataggataggaggtggaagggagacctgggtggtgtagggttccaaggaaaatagttacaaacaacatccagtatggaggagagagaaaatgagatgagctgatagctctgctttcactgccttggggataccgattagagagaattctttcaggaaagggcacaggaaggagtcccagtgcaaaggcagcaaggagatgatgttagtgagcaactctgaaaatttgagaattttggtggaaaagggaaggagaagatggggaattagctccagggaacatgaagatcaaaagaaaaagtttggtggaagagagaaatttggggagtgatttggagacccagaaggaaggacttgaagaagagacattaatagtacaaaaaggattgtgataactgatgaactaggaggctgttgcttaagagataaagaaaaagtggacactatagacatcgcagcttttgttctagtttgcaaggctaatatgacatgttattggttagaaaggcaatttacttatataggaaatcttcaattgtttgtggtgccagtgttggttatagggtagttgtataagatgtgacaatgtactgcttgtagtcagtagaatagttatgagaataaaatgaaatgagcatgccaaatgcttagtgttgagcctggctgcatagtacacaaacagtgaatgctgctgtaggaaatcaaagaagacaaaggacaataaagtaaccagagaacgcattatgatgaaaataatcctggctactttctgggctggaacaggtagtcccatgttgagcttatatgtttctgttcaattacatctctcctgtttatgaccctttcatattctttatcagcattctctgtgactatttatttaatatactcttccctctcaagcaattgttctttactgggagcaatttggttacctaggggaatatttggcaattctggagatatttttggttgtcaaaacctatagggtagcggggagtgacaacatgctacaggtattgagtgttgaggccaggatgccactgaacattctataatgcaaaggacagcccctaccacaaaaaatttacctgacctcaaatgtcaatagctctgaagttgagatactttctcctagatgacgggtcatgtcattcatgtgcatcatggtttccccaagtgccaggtacaaagcaagtcacatgatgggtgccccataataataaagggaatggagatttaactgcaccttgaagaataggccaggtctgaatatatctcctgctttgagtacaaggtgtcagaagatgctgtgagcatttcggaaagaaagttcacaagagagattgcaaacattctggctcccaaagaatgaaagagaggaaacagccctggggctttatcaggagactgacattcccataaacaagagagtcttggaacaaaaggtctggaactgcaggtaatacaagaacacccaagactacaagcagttcattgtttttacagatagacttcagccaaccactgaagcagcagagatggaatttttaaatagacacaaactagagacagttcctttggtaaggcacaaaggtgaggcttctcagccccatagtggggctgcatgcatacagagaaggtctccacctcgggacagcttcttgaatccggtggatatcaactgtcactgtgtgtcagaatcaccttggggcttttaaaaaataatgatgcttgggcacccactcccagagctcaagtttacctgatctaaggcatgtgcctgggcattggtgtttctttagagcgcctccgtcccaggtgaagctaatggatagccagccctactttacaaatgaaccacagctcaaaatcttgtataaacaatttctctctccaacaccttatgtactcagttccactggatgtcttgcgctttatatgcttgaaactgagttcttgatttgggacccttccctacctggcccttgctcagggttccccatcttggtgagctgcactacccagcattctgtagtgaccagaatcccaagaactccccttcattctcatttctctgcccatcttctcccctgcccgcccatatacaattcgttctcggtgctgaggctattactttccaactgcacctagatatgtccacggctcgtcacctcccctgcttctgatgtagtcaaagctaccgtcatttgttctagggctactccctggcctctgggattccacttttgtctctttaagttgttctctgcagagtaggttgagtgtctttttctggcttaagacccatcaaaggctttctgctgtagagaattcaaacccaaacttttgcccaagaccagaaggccctgtggaatccgagcccccagatcccacacctctctcccctgctagttagcttgaagcaccaagctctaaagtctttccatttactgttcttttcaccgggaatgctttttcctccaccctttacaggctggcttcttcttcaccttcatgtcttagtctaagacatgacaattaactgcttgtagtcatgcttttgttttgtttttgtttttgtttttaaatcttggcactattgacatttggggctggaaaatttctttgtcgttggaacttttctgtacattataggatgtttagtctctactcactggatgacacaataatctgctccccagttgtgataagaaaaaatgtctctagacaatgccaaatgcctcatgaggacaaaatccctgccaactgataactactagcttaaatattaacttcttgaacaggtattctctgttctccaggctttaagtctccaggtgtatttctcaatcttcatatcctatttgttactttcatagaacttttctcaccttgaaattgaatatttatctagtaaatatctgtgtcatagtcccactagactatcttgactatttcattcaattctgtaatgatagcattgcgtacggctcctggtatgcagtagatgcttaataaacttctgttgaagaaatgcatgcacgcatgaatgaatgcatgagcaaacaaagactgctaggcaggcaagtgccttcccgccagggttagagagattatctagcagtgcaaaaagaccatggactaaaaaggaatgagataatgccccttgcagagacatggatgaagctggaagccatcatcctcagcaaactaacacaggaacagaaaaccaagtaccgcatgttctcactcataagtgggaactgaactatgagaacatagggacacagagagagtaacagcacacatcggggcctattggggtgggggtgagggtgaggggaggggaagtatcaggacaaatagctaatgcatgcagggcttaacactagggtgacgagttgataggtgaagcaaaccaccatgccacacatacagctatgtaacaaacctgtaagttctgcacatgtatcccggaatttaaagtaaaataaaaaaagaaaaaaagagcatggacttcggaatcgttagttgcagcttctcagctctgccagcttcttgctgtgtgacctgggtcagataattaacatctcagagcctcagattactaatctgtaaaatggggatactacttttgagagtttgcttaactgtgtaatcttccctgctctctcccagaccccacgggctttggatgcttcttcatgtgcccttggcacctggtgcaggtctctatcaagggctcaccatcaccaaggataggatcacactgtgccgtcagtgccttatacagagccaaccacatcataggtgctcaggaaataatgtctgtgcggtgtatgaccaggaatcaagtcgtatccgagatttgaggtcttgtaggtagtttgctgagactattcttatacgggttggtccctggaaaaatgagcaatcccaggtccttccttggtgggctgtgggaatggggaggctgtgcccctctctgttgttcaggtgggcattctcgtttgccaaaaattgagaagctacgcctggatcctcttacctctttttctgttttggtcttctgcccaggcctttgcaaataatgaatttaacaaagatgttgtctgagtgtctcttagacccagggaactgagtatgggcagctgttcctccttggtcagagcaagcgaactgtcatgtatccaaatgtttctagcgagagggtcctgtgaatggaattgtcagtgagttctagtttgctcatagcatgagtctccctcagggagcaacccttgaggttttctacctgctcagaaactctctagagaaggctacaccctgggcatgcatttcccttgaactagcttttcctagtcccactaggagagtaaatgacaaagctgggccctgaatctaggtcttgcccatctctctatttttttatgctcaaaactcacaatccagggaaaaatatcctttctcttagcttgggcagtgttgggcagtctactgaagatcacatgtagtaggagacaggtagttcactttattggtctcctggaactgctgtaaaaaagcataacagactgggtgccttaaaacagcagaaatttattcactcacatttctggaggctgaaaaactgaagagcatggtactggcattgctctttctttctgcatcataacatggtggagggcatcatatagcaagagggcaagagcatgccagcttaggtctctcttcctcttcttataaagccaccagcccctcttgggggccccattatgaccttatctagacctaattacctcccaaaggctccacctctcaatgccatcaacatatgaatttggggattaagtttactacacatgaaatttggggaacacattccaactatagcacttattagctaaaagttgctaagaacttttttttctggtagcacaggttttggctgcatggcaaatgcagaagtcaacagaaggagcccacgtacatcagggaattggtgatcagagtcacctagactgcaggggaaaaagccaaaccaaaagtcttacaggtagagaagatttggaagaggcacacatcccaagcaaactacaattgatgcacccctgcagagtctacagaaatgaaaagagaagatcgaaatatcatcatttttcattctcccgagttttaatttttatttatttattattatttatttatttattattaaagtagcagagattgaaaactaagataaaaaatgccaacataaccaatgatacgtttagcaggattggggaaagttcatagcgctagccatggactctgagttctccactagactgtaagaccttgaggccaagaactgtgtccatcttggtcaccattgtacctgtagcacctagcccagcatgggggagcagagagaagctgagtgaattgattaaattcattggttgtggctgacctctaaagatgttctattaactctgagactgtgcacagagaagactttgtgtgctgctgtccatggaaagaaagcttcatcttgtgttgctgctggggagctcaaacaacactggacatggatggtactggactggtagagcatctccctcttgtattatgtaaagaagttctaacatagaatgcataaccatagatagaagttcattatcagttttatttaataagcagttgttcctgataatcaaagtgattcagatatcacttaaggtcaccatgctcattaagtcaagagattatgtgctggagtccttacatgatgacctaaggcaggtctatccatgccttcaacagcatgtctacaaattcccaagcttgtctttctccaagtcacctctggctgtgatttctagtgaagatgaactctcatctctcattctttactctgttatcagtccaaacatgtaagagccctttctccttaatcacttaaccttaacccacatatcgaaaaaaaaaaaaaaagaaaaaaaagaaagaaaagccatgcacatagatcagatgaaagtaatacgctttccagaaaattcagggctcctctgtcatcacagacattgtaaatattagactgccccattctttttaaaatctaacttttttttttgggacagagtctcgctgtgtcacccaggctggagtgtagtggtgtgatcttggctcactgcaacttccacctcccaggttcaagcaattctcctgcttcagcctcccaagtagctgggactacaggtgtgtgccaccagagctggctaatttttgcatttttagtagacatggggtttcaccatgttgctcaggctggcctcaaactcctgacctcaagttatccacctgccccagcctcccaaagtgctgggattccaggcgtgagccaccgggctcagccctgccctattcttaacataccacttagccatttccaccaacttgatttcccaacctccagaaatgttgctttctcttcccactcccacttcatctctttgagatgtcattttttcctctttccccactagtgtctttagcagaaagggaagggtgctgtccagtagaaatatttctattttttttaaaacctaagtcaactcaagtcacaccttggttcaaaactttctgatgatatctctcgtcacattttacaataaaactcatggtcttccccatggctgaaagcagagtttctcaacctcggctctcttaacatttgaggccagatggttctttttggtggggtctgttctatgcattttgggatgtttagcagctctctggcctcaccagatgtcagtagcccatccccatttttacaatcaaaaatgtctccagacattgtcaaatgttccctgggggggaactgaaaatcactgacttaaaggccacatggactggccttgaactactgctgtaatttagctccttttattctctttgattgttctgctctggttaaaatggcctctctgctgtttgactgagaattatgttcctgtctgagagcctttgcacctgctctgccctgtgcctggtgcactcttccgtgaacatggcatcctggcacccagtcactattctgttgcaaacacccattcccacctgacgccaatacatttgcttattgaatgtctcccatgacctcctacaagctaagcttcatgggatggggacttggatggttttatatgttgccgtgtccccatgatgtagaagagtacatggcacatgctcaacaaagagctattgaaagaatgaggtaatgaataggcaggaacacacaggatggagtaagtagcacatatgtgagatgattaagaaatcagcccaagtagaatagaaggtatgtcctaaggttgggaaatgtagaaaactcccccacagtgggcaaatgatagaagttattgacatccagacagcgtactgtatccaccatctatcagacaagtgggtgtcagagcaggttcatgagctggggagagatgtggtaagaatggagcagaaatgagaagcctggattcaaccggaaaaccatgcaatagaagcgtggatccaactagaaaataacacaatgctctggtgtgagtgagggtggcgaattggtttcctctgtggttggtgaggagtactggagtgagtagattctaagggagaggtgatttgattgaacagtgtccatggtggaatgagaagtgtaagctggcccaggtaccaagggtttgtcatctctgttgtaaagaactaggtcaatggtggtaattagcaatgaaacagaaaatagaaaactgtaaatcacagacatcttggattttattcaagtttggcaagttgcatcttgtaccattatattttggaagcggctgagtgagtttttggtcatgtgttggcaagaatgacatcctgtcagccaggaagcatctttcccatgaaaaaaagggacattagtaaggctgccctacttagataaaaccttagataatgataaaagggaccttgggatagtggggcaatttagttgtatctctggttagttttctcttttttgtgttatgctaatcttaagtaaatttactttttatgtagttgcttaacgtgtttttacaagtgttactttacttgtagcaattcttgtgaaatacatggttggaacattaacaaaaaatttctattaaccaagccacaggaaaacataggagaatgaacaaaagaagccagccacaaagaggaccgatacctatttccatctatttaaaacaaaaatcaggtaaaacggatctatgctgttgtaagtcaggatcgtggtaacctgtgaggggtggggacaactggaaggagatacaagggagatctctggtgagctgttgatgttgtttcttaaccttggtgctgattaagtttctctataatgtataatacatagcagattggtaacctcaaaaatgctattgcctattcacaacgataggtgaaatatacactagtcattgattcacggaagttgactatattcagagagaatgtgttagacaggaaatacaaacaaacaaaaacaaccaaccaaacaaaaaaacaggtgccttagaatcttatggacgtagggttcaaatggcacctctgcttttttacttgagtgaggctggaaactttttatattctttctgaagcttggtttcctcacctgtaaaatgggaaaaaatgtgcacttttatgggagccaattggaagctctaaatagccaaagctagaagagttagagcaacacaacaaagtagtaagccataatccaaagtataaaatcaatattcatgagtccaaactgatataaataagtgattgaactaattaataagcgagggagaagagataaatctcctgtgcagaattccaaataatgtatagagctattccaccctaaagaaggaagagcataactccccactttctcttttcttttctttttttttttttgagagagagtccccctccgtcaccaggctagagtgcagtggcgcaatctcggctcactgcaagctccgcctcctgggttcaagcgattctcctgcctcagcctcctgaatagctgggactacaggcgcgcaccaacatgcccggctactttttgtatttttagtagagacggggtttcaccatgttggccaggatgctctcgatttcctgacctcgtgatccacccgcttcggcctcccaaagtgctgggattacaggcgtgagccaccgcgcccagcctaactccccagtttttaagtgtggcctgtgcacaacggcttcctttcaaagcgtacagcttgggaaggggaaaaagcaactgtgcagtggagaaaactgatgaacaccacttcaaccaggtcaacatcttccaggtcaacatcagcagcagtcttaagtcacatgggtgctatgtacccttaatgtgatgtgatgtgatgaaatggcattttacctctgtgatcttcttcccccaaacctataatcccagtctaatcaggagaaaagcatcagacaaattcaaatagagaggcgttctacaaaatccctgatgagcactccgtcaaactatcaattatgtcaactatgtcaggtctgagaacctgtcatagcccacaggagtctaagcagacaggatcactaaatgtaacacaatgtcctgaacaggatcctacagcagaaaaaggacattaggtaaaagtaacgcaatgtgaataaagtatagaatttagttaataataatgtatcaatattgggtcattaattgtagaagatgtaactacatcatactaatgtaagattgttgttgttgttaattttttttttttttttttgagatagggttttgctctgtcgcctaggctggagtgcagcagtatgagcatgctcactgcagcctcaacctcctgggctcaggtgattctcccacctcagcctcctgagtagctggggccaggggcgtatgccagcacacctggctaatttttaaattatttgtagaggcagggtctccctttgttacccaggctagtctcaaactcctgggctcaagcgattctcctgcctcagcctcccaaagttctggaattacaggtgtgagctaccgcacccagccataagatgttaataatagggaaactgtatgcgaagtatttgggaactctcggtactagctttctgatttttttgtaaatctaaatttgctctaaaaaataaaatctgtttttttaaaaaatgtgcatcttaccttaggttgcaagcataaagtgagataacatatataaacataaggctctcaaactttttggacttagtccccttacatgggcaaaagtcattagggctcacctaccccacccattcccacatcagctttgtgttggttcacatgtgccctaagggtaatgcgaattttcacggtgaccaggtcttagttgaatgctgaattacagtcatctgtacagttcagtttcctttgtgaatatagaatcgagaaacccttcctaagttatgttcctattaaaaaatgaaggtcatttaaaagaaaaaatctgatttttaggcactgtggacagatggcggggctcagggagggtgatgaatgggtccagggagcgagtacagggcaagaacatgaaactgtgagaaggtgatgggttgtgcctggactgtgatacttcttcatttactcaattgttcattctgtcattcggtaaatatttactacaggcgctcagtgggtgtggggtctggaacagtgaaccagacagcccaagagagtccgtactctgatggagatcacctagtttcttctctttcctgcctgtattattttccaatgagtgttcccttaaggaggaaactggagttctctataaaagtaaactatgacatattcctagaactttcctattaataacattcaccaatattgtaattatttatccaatgtgcatcttctctctagaccagggtttctcagccttggcactgttgatatttgaggatggatgttggctggcagatgttgagaagcatccctggcctcaatagtagtctgtgttgtgacaaccaaaaatgtttccagacattgccagatattccccaggggacaaaattgtctgtggttgagaatcgctttcctgcattggtggctctcaatcctggctgaagtttggaatctcctgaagagatctcagaaactgttgccagtggataccgacccctatccaggccaattaaatgggagtctctggggatgggcattgacttttttttagattgtagtgggattgaggagtgagaacctctttcctaatcagtatgcgtcatgaagccagggagtatttgtcttctgtgggtgggtgtttttaggacctaacacaatgatatctgaatgaatgagggaacaaaagaatgaaggtgaagacaggtaggaagatgtgtcagaagttaaaagtggcaccgggacagtacaggaatgtgttttgcaaagagcaaacctgggtttcacggctgactctaccacattcccgttgtgtagctttgggcaagtgtttaatttcccgggcacttcagttgctcatcttaacacaggaatcacaagaatatgggagaattcttcataaaggttatgttccaagaaaaatgcatttgtttccattaaaaaaaattgacatgaaaaatctagctatttcccaaggcctcctcacccgacaactgttatccgttaagaatgctgagggcaaaggaggagggaggtcaagtatttgctcttcctggattaagagttgagcttttattttgacctcagggcagtcctaagtatgctagagttttgttgtatttctctaacattttattataccttaatctattttatggggaacaggcaatgtcaacatgagggtggcaatctgatggattgcctaagtcttaaactaaagggtggggaaagtccacttcccactagtttcccacaggctttctaccagctaaacagctttgattcagatgacctttgtaagtgggaaactgtaggtcagggatctccaactcaaaaggctatggggtcagggtaggctgcattactgagggaagctggtgatgggaatgtgtgtgtgtgtgagagctcttgatcagtgaaccttgtttcttcaagtgcataccccatcagagggggagccccggaggtcctcagcctcagctgatgggtcccttgtgggaatgccgactcatctcctggttaatcaagagaaaccattgatctgggttttcaggtacaatctcccgattctgagtctttgttcaaatttttgcaaaattcattgtgtgggacaaatgaaatgcctattcagatcacatccttttactgatagatagcagatcttcaatttgtgtttgtccgttctaccataagaagtgagattccactatgagaaagggtcttggtgcctctgaagataccaaccccgtaagcacctccaccttaagctgctggtagttgaagacatcattggcaaagggagcactcggaggagctttaggggcaaggacgcataaagcagagctgtgatctttggctgattcatcgctgtggctagaaaagcagtgaggaccttctgagagaactgatctgaaaacctttttggttccagaaactggagggagccaatgaaaggagtagtgtagtgtcggttttttaaaaaaagtttccatttatgggccaggcgtggcgactcacacctgtaatcccagcactttggaagactgaggcaggtagatcatgagatcaggagttcaagaccagcctggccaagatggtgaaaccccgtctctattaaaaatacaaaaatgagctgggcatggtggcaggtgcatgtaatcccagctacttgggaggctgaggcaaagaattgcttgaacccaggaggcagaggatgcagtaagccaagattgtgccactgcactcaagcctgggtgacagagtgagactctgtcaaaaaaaaaaaaaaagttaccatttatttaataaacatctggagagcagtggctttgtgccagaccttgttccaattactttaatatatcaaattatttaatccttcgaacaactctatgacccaggtcctactgtcactccattttaaagatggggaaactggggcacagagaggttaagtgacagccaaagtcacacagctgttaagtgacagagctgggatttgaacccaggtctcccagctccagaatccaggttatcatcatttctcttggctgtattttaatagggacgattttatctatagtaatgaaaaattatggctttgaagactatgtagaaatatgtaaaaccagtctatataatagtaatttaaaaatcagctgtcaaattgtatgtgtgctataactgttaaagaacgatatgtaggaaaaaagactagaagaaaaagaacatgaacattatgagagttatgcaatatggtgagattatggagaataccttcttttattgatctcagtattgactgtgagcttttatttcttgtatgatgttttattaatgactaaaaaacatttacaggtttgtaaatttatcccccatcttccttctttctgaatgtagcttccaaaggacagtgcttgtgttccagggcacatgcatcccagcactcagtcctgtatttacagggtggatgcgttttattcaagaggcctggcctgaagaactcccaaacacgcgttattcacaacgtgcccaatttaagacttgaaccaacaaatgatggggtgtttccgttcaccagctaatatggtgcccccatgtggcagtagcataaatacactttgcaactacattacacaattcctaataccctcaaattcaaggtgattcacattatttcccttttgcacataaactgagtctttattaacatttttagaattaactgctatttcaaattcactccaatcttgtacaaatgggtctgtagtagtcattgcctgtcccaagttgatgggtttccaggctgctagagacagaatgatcccaaatgacatagtttaacaccaacctcagcattttctctgccctgttgagcacttactatgagtcaggtgccctcagcactagtgacaaaggaccctctctcagtttgtaaggcacaaatattctagtgccctcttcaatgcttattcatccaacatgtgctttttattgagcatccactatgggctaagccttgtgctttggaggatttgaatattttataccccagttgtttatatcctaatctgtgcctggctccaaactacctctgctgtgtcttagctgaatgacttaatccttctgtgcctcagtttcctcctctgtaaatgggtgatggtaacattacttaccccccagggtgattgagaggattcagtgagtaaatgcatgtgaactagctggaacttggtaaacatgcaatccatacttggtgtgcttattttcaaacaccactgttgggtaactcttatgaaacacttccaacttctcacgaaagccctggctttgttgccaggtttccggagtatacaattattttcccctctcctcaaggagtgattccttagccacagactttttcaaggccctctgacccctgagctgcctcaggacttcatagacaccaggcctagcacagcctgatctctaacatcataagtcagaaatgacgtcacggttacagccacgatactgatgacagccattcacaacacgctgggccagtgcgaaatcctgtcttgctgactgcccatgccagtctaggagggggtgttatgataatcctaccttccatgtgaggaagtggaggttccacatggttatatgtgactttcccaaggcttgtaagtggaagagaagaatcaggcagtctgagtcttaaccaagatgttcagctgacagtcagtagaggcaaactctacatttaccaatattgtgagtggaaacatctgaaaattaaaataaagacacagttttattttttaaaaagactgatgtagtaattgtttggaataggctctattaggcatttcacaaatattaactgacacaggtaccattatttagcccattttacaggtaaggaagcagaggcagagagtaattagaaaggctctctagggttacacaggcaggaatagcagggctagactcgcacccattcgcctatgccacactgcctcatgggtaaacacaagcagatggtctcccgtgatctttggcttcattaatttactgccaaacaaaaaaaaacctcagatttagttaggagagactttattcaaaaggattattgcagtagagggaatgttctgaccacttaatctgcaagtgtctcaagatgaggcagtaaatattttgctttgctaaagaggcataaacaaggttagaaagaagtgggtgttgggggctgggatgatcagagtgacacaatcagacagtggttgagggctgatcaggaaggtctgtaaagaggagttgtctgctggctcaggctgagggtgggccaggacctggggaaaggagagactctacaccaaagttaggttaacgaacactttgttccgactgaccagtggaaacaggcagttaaactaaccacaaaaacaaagaaagggagtttggaggctctgggtctggccttgtcataggtaaacaagtgggggcacctatgagtctcatctaagtcatatggggaagggagttctttgcagtgagctgtttcccagaacacaaaagggtggggacatttcttaacctttgcaattttccagtatcacagggcttgcctaaagttcaacactgttgtcacctgtaggctcttccaaggaactttcctaagagagtcagatcctaggctcatgaagctgctcaaaggcactgccttccaaaatgtgacaaattatcctctactcaaaggaaaaggagtcaagatcacaatgtctcctccttgctcgcatccctttacctgccacgctggcttctttcactcagtgtaatggtttcaatgttcatgctgtagcaagcatagaaacttcattcctttctatggcttaataatatctcactgttgggtataccatattttttatccattcattagttgatggatgtttggttagtttctttttttctgttgttatgaataatgctgctatgaacatttgtgcacaggtttttgtgtaaatatatattttcatttatcttgggtacacacctaggagcagaattgctaggtcgtctggtgacattatgtttaaccttttgaggactgttttccaaagcaaagataactagttttagtgtctgcagtaagtgaaaaagatgttcaggaaagacactaaaactaactcgagaaagaagagggattattaggaggatgtggaatttcttaaagcatacatggggaagagagcacttgaggtttaccagagagtggaaagctatcatgagccaagaagatgctcgtctatgtctgtggacaacatctgacctcagactctgctcttatttgtagctttgcctcttgttactcttcaagaggacttagcccatatctccatgtgcatgaaggaagacagccacccagtccccccatttgctattgagtttaatgacctctttggtcagacagtatcggacactgctttggatcttgcagccacaattccacatttctgaaagagaaaagctggttgactctggtccaatcagccccagacaagaggtggagttacacaggacaattataaccttgtggacccctgtggggaaggggaagctgggaagctctcagcatcttgtgtggaggcacacagtgttgaacacatcaaagtgtttgtgggatgcaaggccaaaggaaggattggaaagtgcaaagttcatgattctcaggtggatttggggagcagatgatggacttcaggtttggatacaggtgacagtttgcatgccttcatggtcagcagctctaagtgggtggatgacccctttccccctctcttagctctctagagagcagcagataccctgattgactgtttatgtgctccgtagagtcaaggtcatggtgtttgtctctgcactgcagaacagttttcttctctgtgcagaaggaacatgctgggcatcctgatatcacacaagcctctagggggaactgggggctttaaaatccatggcccccatatatctagctgtgccaataataaggcagaagcataaggtatggtacctcacaaaatgggaaaggctgtccacgaaacacttggtctcacccagcagggtgtgtataaccaggctctagatacttttaactccaacctggttcaaagttagttattttcaggttaattcataccctttcttacagaccacaagaggatcatcctgggattagcttgcccaaacctcccttctctgctgacacagatgaaggagaaggtggctggtccagtacgacagtgactcatgaacttggatttaggatccaatagagtccaggtcgatccctaccatctgtgtgatcttggcatctcttgttttcagtttcctcatctgtaagataggaaggataatttctactgtagacatttggggaataattttataagacagacttgaccactactggtatttaggggattccagggagagcacacacagcactggtctgcagtctggtgaacttgccagtgtccagcatctggcctcagcactgtggatccagaagttggatttgtccagcaacaggtccatttcttcaggaactgggctcacaaaatggttatacacatatattatatattagtaccagaattctaatgcattaatttacactaagacaggtgtctatcacatggtccagacacttgcatgtgtttcagttggtaccatctcctcctctggccagccccagggaggaaaccacttacactcaagagctatttgctgggcaatgacatacatggagacataagaaggaaggagatggagcaaacgttaaatgcaatcagtgatggcaaccagaggcgttcatctcataatggtggtgtcagaaggacaggagtacacacaccttttgccatgactatcattctctctctggcagtgttcgcacatgccaaccatgctaggatctctctctcttccacctttttctacacttagaggactgaccagtctccattctaattagcatagcctttaaaaaaagaaattacagaagaaaaataagtacttttttgtagcaaaaatggtaaacattacaagataaggtccaccctccattctgcctgtcctcctaaggaaaacttagggaatctctccttccaaattcttttttattttattttatttttttacatttccacacctcgctatttatggcatcaactctccttcttttttgcattaaaattggattttattaattattattatactgcaaattattttatttcacttaacaaagcatcttggagcaatagccatgtcattgtcaatagttctattccatctttaaaactgctttgtcttattccattttgtgtaccgtaatttaggtacccattctcctattcatagacatttaagttaattccttcttttgcttttatacagtgttgtaaagaacatcatttatgtgcctgcaagtatttctctaggataaatactgagactttttgggtcaaaagataggccaattcacactggtggattttagtcctgcacatgtttatcaatagtgtatgtgaacacctgccctctctttgcagacagtagatttcaggcccctgttgttagcttggaagcgagatctctttcctgcccactcacatactgatctttgagttgattctctgcatgtactctgattttccttatttcccaattcttggcgggcatgtctgactaccaacaagagatccctgcaggagtccaaggaagatcacatgacacaggcaatgtgaaatactttcttattaaaacaagagagacgttaactgttatatgtttattatggtgtatgtagctcaaagggtgatttaatgttcatgttatcttcaacttaggaatttcagacatcaacgttttgcacttgtgggtataaaacactttttcctgggtccctaataccctcttggctgggttgggtatactcccatctcaaattctgagaagcttaagtcatactttgtgtattacattagtctctgttttcacagagcaatgcaattagggctttctatctggtttctgttgtaactttctttttaggcttgacgtctattccatggctcagggcagaccatggatagggaaaaaggcccaggagggtgagaaacacaggtggccatgaactttttataatccagcatgaactggcccccatgggcagcctctgttattgccctgtgtctccaaaaggcaaaaccgagtccaaagtatgagtttgtaatgaatgtttgactgaaggttttacagagtgagtgaagttacatcaaacactacacattatagattactgaagctacttccattggatgccttggttttccttcccaattactttggccaccagccactcctggactacccttcccccatgcctttctctttccacctatgcccactcacaacccctaattctatattatgcccctttctttatatggggaaatgtatctgtctggcttggcttctcctcccacctctccacttagaacataaagaaacttcctcaggaacccctctcttcagagagcatggagaatcgtaaacaacgtaatatgttttccttgttaaatattttctcctgtcactctggtttgacctcactccctactcccctgaccctatgcaggtggtgattgcgggcttggccatgctttgtgcaagtatctggatgagctgggcttcacggtatttgccggagttttgaatgaaaatggcccaggagctgaggaattgcgaagaacctgctctccgcgcctctcggtgctccaaatggacatcacgaagccagtgcagataaaagatgcttacagcaaggttgcagcaatgctgcaggacagaggtactgccgccagcaccctcagtgcctttaccctcctcctgaatgcccagctcttgttccggcttaggctgaacatgcccccccactccactctgggcactgtttgccctgaagcacacctgtgctgaacccctaccatgtgtgggggcctctatcaacatgaagaccttcggagtaactcagacatgggcccatccacacagaacttacagaaacctcagtctcattctctccaacttctcagtcactctcccatgaataattcctccagccccagctcattgcttttctgtccgcaatagcaacatgcattagagtctccagcttcgaaaaaaaataccttcatggtcactgtccttctttacccattacccttcctcttctctttccttcatggctacgctccacggaaccctgtagctctgtgattctcttcctcaccttcaatttgccgttggctctcactctgcctccctaactgatctggcaaagctaatcagaattagcctgaagacccaggttttttttgttttcaacttttattttaaattctgggttacacgtgcaggatgtgctggtttgtgacataggtaagcatgtgccatggtggtttgctgcacagatccagccatcctgtaagtactgagcccaggattcattagctattattcctgatgctctacctcccctccctccaccaggcccaagtgtgggttgttccccaccatgcgtccatgtgttctcactgttcagcccccacttataagtgagaacgtgtggtgtttggttttctgttcctgctttagtttgctgaggataatggcttccagctccacccatgtccctgcaaaggatatgatctcattctttttaatggctgcatagtattccatggtgtatatgtaccacattttctttatccagtctatcattgatgggcatttgggttgattccatgtctttgcttttgtgactagggctgcaacgaatctatgtgtgaatgtatctttgtaatagaatggtttatattcctttggatgtatacccggtaatgggattgctggaagacccagtttttaacttccctgcagtatttaagcatgttgtttatactctcctccttggctttggggtccccagcccccattgctctcctagctctccaatctttctttccacttctcctggatgaaactttgcctctgtctccccacaaatacaaatgcttctgagggttgcatctgcagacttcgcactctatgtgccctgggccatgcagttttctccgtataccaagagttctcaatccaactgcacattagaatcatttgaaaattacctatgctggggtccaggatgggctatgtaactaacttggcagacccaatgcaaaatgaaaacatggggcccctagcttgatttcggaagattattaggaatgttagttggtgacagcagagactgaaaccacgtgcaggacccttctgaagcaccaggccctgtgtgactgaacagatcccccagacccaattaaatcagtctctaggacgggatcccaggcatcattagtttataaagctcccaatgtgatgctaatgttagcgcagggccaagaaacactggtttacgccaataactcccaaatctattactatattgccaacctaatccttcttctccacgtatacaaagttatctatcagacatcttcccttatactccagaggcttcaacttcaacatgtcaaatgttgttttttttccccctgctgccattctgcaaatcggtttgctctcctgcatcccacagctcagacactggctctaccacctaaccagtcattcaagccagcaacctgcgggtcactgagaccctcagcttatcctcagtgcctgtatcctactgatccaagtcctgtcaattccacctcctggatagttaccctccagccccttcctaccactgcatagcactacgacttagcacagaccctcaccttcttccacctcggctatcccaatgccctccttgcaacccatctttccttccccattactttccagagactcatcttcacagcattcacattctacagtgccatccatctcctaaaaacctttagacatacagagcctccacgtgttggggtccgcccatgtggcatgcccgtgatggggaatttatcagtggtttgttggttccctatcagtggttccctatctaagcaccttaacaaggactagaggtcctttcaggataatggctcctgccaaacccttaatttgcaatacctgctggttcacttagtaaattctgaagagtttctggaacagaatattctactttacatctctgcacatctagcttcctgttacaggaattcccctcccactcccactccctttccctaaggctcttgcctttgtccagtggcagactctaatcccccaggagacctggctcacacgtaacacctcttgcatggtcttccaggtattgcaggttgtgttattcacttcctcttccagacactcactcattatggttttctgtctccaggactgtgggctgtgatcaacaatgctggggtgcttggctttccaactgatggggagcttcttcttatgactgactacaaacaatgcatggccgtgaacttctttggaactgtggaggtcacaaagacgtttttgcctcttcttagaaaatccaaagggaggctggtgaatgtcagcagcatgggaggtgagtcagcattttcacacatggtcatggggtgcccatcacaagacatggctcatggcattctatgtgggcgaacaaaaatgcagggcatgcaaaggcagggttgggtcaggattagtcaaattgtatataccctgttggtcttatcacaataaaacctttctcttctttcaaattctttcatgtagaaactcttatctgccttctaactcatccatttgttactggggatttagggttcttatatgtctttataatgtgactgccaacacacatggttggtagatttgtacaggaaatctcacattacaaataatgtcagcatttcaggcaacctgttttcaacacttcgtcaatttaacacactgtgttcagttccctgtaagctgagtaggcaataccttccctctgtttgtgccatcaaacaaaagctgcctgctattgttaacccgaagattgtccccagtgttgagcagcctcaatccagctaggtcaggatgtgatgacactggatagtttgtctctctctgtttccaagaacaaatagtacacaacttgagtcaagggctgaacagtcttgccttttcataaaaaatgcccatgcgtgtcatagcatgccctcttttctgggacagacattttcaaactggggttccttgggctcttgttcagtttagggaagatccatcgacctgacttttgggtcactgggtcactgcagaggtgagagggaagccaaagggatgggctctggatcctaggatcctgccttcaaatagaggagtaccactcttcactgttggatcaattaattctaagtaaaatttcttaaaataaagggtatgactatgctgtttttgtttgtttgcttgacttttgtgttttgtgctttttttggtaatgtgaatatcagttctagaatgatttggtcagggagggggttcttcgcatttcctagacaaatatagttgtccatcacattccctttcctggctttaactcagtaactttcttaaaactaactgctatgtgtctttgactagagtcttggttggcctgaggcataaacaaagaagaaggtagggagagagagagagagagaaagagttgggggagacgaagtgtcctctaggatggttaggagcaatgagtattatattttagctgtgtgagaaccctaaagtagttccaatttcctgctaccttgccaaagcaaatgaatcctgagaaaacacacagcaatattttcctaatctttgttctgaacttagcctttacaattttggcctgtgtggaagcctcacctttctcatttccctggaatagtctggtacttctgggaacgtctcacagactctttgcctcacttatataataaatatttactgaaataacagagtactgcctcctccttggcacactgacaaggaggtttctcttttttttcctctgttctcaactttgagcaacaccttcactcatatgagttcactttagttattgccaaaatgtgcagtatgtgctgtaggcccagtgtctggcatgcaccagcagctcagttaatcagtgaagaaatgcaagtgtatgaacgagtgaaaaatggaaaatggattaatgaatgggtaagtgaaaagcttacagtacaaggccaggtgcggtggctcaaggatgtaactccagcactttggaaggccaaggcaggaggattacttcagcccaggagtttgataccagcctgggcaacatagtgagacctcgtctgtacaaaaaaattaagaaaaaaacaaacaaaccaggcattgtggcatgtgcctgtagtcccagctactcaggaggctgaggtgaatctgttgagcctgggaggttaagactgcagtaagctgtgttcatgtcactgtactctagcctgggtgagagagtgagacgctctctcaaaaaataactcacaatacagagcataaccttccacatatcttcaacttggcctttaaagctctttccaagccagaacttcttactctgttgtcatgtattttcattgaagggaaactctgaatgttaaaataaataacatatctcactcttttattattattattattaatttttttttttgagatggagtctcactctgtcgcccaggctggagtgcagtggcgcgatctcggctcactgcaagctccgcctcccgggttcacgccattctcctgcctcagcctccctagtagctgggactacagacgcccccaccacacctagctaatttttttgtatttttagtatagacggggtttcaccgtgttagccaggaagatctcgatctcccgacctcgtgatctgcccgcctcagccccccaaagttctgggcatatctcactcttattctcaccctctggttgtgcaaattcattacacccagctatgtccatctattttcttaagatcatcaccaagttaacccatctgaaacaaaacttgctgtcagccctccagaatgcctaggaatacagctaactagggaggtgaaagatctccacaaggaagactacaaaacactgctcaaagaaattggagatgacacaaacaaatggaaaaaatctcatgttcatggataagaagaatcaatatagttaaaatggccactctgcccaaagcaatttatagattcgatgctattcctattaaactaccattgaggttcttcacagaactagaaaaaaagatttaaaaattaatatggaaccaaaaaagaacatgaatagtcaaggcaccactaatcaaaaagaacaaagctggaggcatcacactacctgaattcaaactatactacagggctacctgtaagcaaaacagcatggtcctgtacaaaagcagatacaaaggtcaatggaacagaacagagaacccagaaataaaacaatacacctacaacatctaatctttgacaaacctgaaaaaaacaagcaatgggggtaaggattccctattcaataaacgatgctggggtaactggctagccataggcagaacattgtaactggaccctgacttctttctgccctagtcttttgagtttcagatctttgagtcatcttggatttgtttttccccatgcctctctcttctttctcccacccactcaccaagatgtatgaagttttcgttcatcacatccagttttgaatcttcatgtcctggagaaactctagaaatgagtttatttgtaggactcagaaaccacccaaggtactttataaagctactaaaacagtaacaagaaatcaagtaacaatatcagaagagatgggaggcatatgtactcaacagggccgggagtttgtgtaaagacagaaacaaagcgctgtcaagataggaaaaagatatttcatgcaaatgggaaccaaaaagatcaggagtagctatacttacatcaggcaaaatagatttcaagatcaaaaccgtaaaaagagacaaagaaggtcattatatagtcataaaggtgttcattcagcatgaggatataaccattgtaaatatacatgcacccaacaccagagcacccagatgtataaaggaaatattattagaactaaacagagagatagacctcaatacattagtagctggaggcttcaatactccactttcagctttggatagatcatccaggcagaaaatcaataaagaaacatcaaacttaatctgcactatagaccaaatggacctaattgttatttacagaacacttcatccaaaggctgcagaatatgcattcttctcctgagcacatggatcgttctcaaggatagaccatatgttaggccacaaaacaagtcttaaaacattttaaaaaatgaaataatatcaagtatcttctctgaccacaatggaccaaaactagaaataaaagataagaggaattttggaaactatataagcacatggaaattaaacaatatattcctgagtgaccagtaggtcaatgaaaaaaattaagaaggaaatttaaaaatttctcaaatgataaaggaaatcaaacataccaaaacccatgggatgtggtgaaagtagtactaagagggaagctggctaccggctataagtgcctacattaaaaaagtagaaacacttcaagtaaaaaacctagtgatgcatctcaaaaaactagaaaagcaagagcaaaccaacctcaaaattagtagaagaaaagaaatcataaatattagagcagaaataaataaaattgaaaagaagaagacaatacaaaagatcagcaaaatgaaaagttggtttctggaaaagataaacaaaattgacaaacttttaatgagactaagaacaagactaagaacaagactaagaacaagagagaagacccaataaaaatcagagatgacaaaggagacattacaaccaataccacagaaactcaaaagatcattagaggctactatgagtaactaagtatataccaataaattggagaacctagaagagatggataaattcttacagagagcctaccaagattgaaccatgaaggaatccataacctgaatggatcaataacaagtaacgagttcgaagcagtagtaaaaagtctgcaagcaaagaaaaggctgggacctcatggcttcactgctgaattttaccaaacttttaaagaagaactaataccgattgtactcgagtattctgaaaaataatggtggagggaatacttccaaactcatcctatgagccctatatcattctgatagcaaaaccagaaaatacatgttaaaaaaaaaaaaaaaagaaaagaaaactacaggccaatatacctcatgaacgttgatgtaaaaatccttaacaaaatactagtaaactgaattcaacagcgcattaaaaagatcatttatcatgactaagtgggatttatcctatggatgcagggattgttcaacatttacacaaatcaatcagtgtgatacataatctcaacagaatgaaggacaaaaccatatgatcatttcaattgattctaagaaaagcatctgataaaattcaacatccctttatgataaaaaccctcaattaaaaaaaaactgtgtatagaaggaacacatctcaacgtaacaaaagccatatacaatagacctatagctactgtcatgctgaatgggaacaaactgaaatcctttcctctaagatctagaacacgacaaggatgcccactttcaccactgttattccacataatactggaaatcctggctagtgcaagcagacaaaagaaagaaataaagaacattcaagctggaaaggaagaagttgaattatccttgtttgcagatgatatgatcttatatttagaataaactaaagactccatcaaaaacaattaaaactgataaacaaattcagtcaagttgcaggatacgaaatcaacatacaaaaatcagtagcatgtacttctttttattttagacagagtctcgctctgttgccaggctggagtgcagtggcgtgatctcggctcactgcagtctccacctcctggatttaggtgattcttctgcctcagcatcccgagtagctgggactacaggtgtgcgccaccatgcccagctatttttttgtgtgtgtttttagtagagacagggtttcataatgttggccaggatggtttcgatctcttgactttgtgatttgcctgcctcagcctcccaaaaggctgggattacaggcattagtatgccaatagcaaacaatcagaaagagaagtcaagaaagtaatctcatttacaatagctacaaataaaatgaaatacctgggaattaacctaaccagagaagtgaaagatctctacaatgaaaattatataatattgatgaaagaaattgaagaggacacaaaagattgaaagatattccatgtccataggttggaaaaatcaatattgttaaaacgtccatactattcaaggaaatctatagattcaatgcaatccatatccaaataccaatgacattcttcacagaaatagaaaaagaaatcctgaaatttatatggaaccacaaaagactcagaagagccaaagatatcctgagcagaaagaacaaaactggaggaatcacattacctgacttcagattatactacagagccgtagtaaccaaaacagcatggtaccagcatgaaaacagacatatagaccaacagaacaggatagagaacccagaaataaatctacacatctatggtgaactcattttcaacaaatgcaataacatacaccagggaaaggacagtctattcaataaatggtgctgagaaaactcagccaggtgctgtggctcatgcctgtaatcccagcacacagggaggtcaggtggattgcttgagtccaggagttcaaaaccagcctgggcaacatggcaaaaccatgtctctacaaaaaatacaaaaaattagccaggcatggtggcatgtgcctgtagtcctagctactcaggaggctgaagtgggtggatcacttgagctcagggagatagaggctgcagcagactgtgatcacaccattgcactccagcctggatgacagagtgagaccctgtttcaaaagaaagaaagaaagaagaaagaaagaaaagaaagaaagaaaggaaggaaggaagaaaggaagaaaagaaaagaaaagaaaagaaagaaaaaacaaactggataccatatgcagaaggatgaaactagatccctgtctcttaccatataaaaaaatcaaatcaaaatggattcgatacttaaatctaagacctcaaactgtgaaactattgtactataagaaaacattagggaaactctccaggacactggaattggcaaagatttcttgagtaacacccaacaagcacaggcaaatgagatcacatcaagttaaaaagcttctgcacagtgaaagatacaatcaacaaagtgaagagacaacccacagaatgggagaaaatatctgcaaactagccatttgacaaagacttaataaccagaaaatataaggagctcaaacaactctacaggaaaaaatcaaataatctcatttaaaatgtacaaaagatctgaataggcatttctcaaaagaagataagacatacaaatagcaaacaagcatatgaaaatgtgctcaatatcattgatcatcagagaaatgcaaatcaaaactacagtgagatatgatctcaccccaggtaaaatggctttcatccaaaagtcaggcaataacaaatcctggtaaggatgtggagaaagagaacccttgtacactgttcatggggatgtaaattagtacaattgctatggagaatagctctaaaaatagagccaccatattatccagcaattccaccgctagatatgtacccaaaagaagggaaatcagtatatcaaagagatatctgcagtcctatgtgtgttgcagcactgttcactatagccaagatttggaagtaacctaagtgtccatcaacagatgagtggataaagaaaatgtggtacatatacacacaatggagtactattcagccatgtaaaagaatgagatattgtcatctgcaataacatggatggaactggaagtcattatgttaagtgaaataacataatgagcataaagacaaacttcacatgttctcacttatttgtgggagctaaaaattaaaacaattgaactcatggagatagagtagaaggatggttaccagaggctgggaagagtagtggagaggactaaggagggggaagtaggaatggttaatgggtacaaaaaatagaacgaatgaataagatgtactatttgatagcacaacagagtgacaatagtcaataataatttaattgtgcatttaaaaataactaaaagagcataaatggattgtgtgcaacacaaaggataaatgcttaaggtgatggagactccatttgccctgatgtgattattatgtattgcatgcttgtatcaaaacacctcatgtagcacataaatatatacaccaactatgttcccacaaaatattaaacattaaaaaaaaagaaacaaagctctgaaatgatcgattttcctctgtgttagtttgctagggctaccataagaaaataccacagacaaggtgtcttcagaaaacagaaattccttttctcacagttgtggaggctggaagtcgaagaccaaggtgtcggcagggttggtttctcctgagctctctctcctcggctttcagatgactacctttttgctgtgtcctcacatggtcatctctctgtctgttgcacccctggtgtctcttcctcttcttataagaatggcagtcatactgaattagggcaccactcttatgatcccgtttaaccctaatcatctttttaaaggttctatcttcaaatgcagtcacgttccaagatactggaggttagtactgccacatacaaacttttctgggtggtggggggagcaattcagtccataacactgtaattgataagggacaggggaattcagcagagaacacagtgaggggctctctagcacttactggagagttttgtgaaacaatagaaaagattttgagccggaaaagaaaaagctagaatgtaacacaaggattagaaaagtcaaagtatgtgtaaaaggcaatatataaccaacaaatccacagaaattaacatccaatgtgatgctgacttgttgatatatctttggcaaaatcaatgtaatagtaactttggaaacatgcttatctgggagttcattgctgttattttcattttgaagcaaggtgcatggagggagagaagcagtcagtcactaataagggctccagaagaagcacgtggttgccctgacccaccagattgtcttgagtctggcacctctgtcaccttctgagtgacaagaattttggtggcatagatttatcatggaactttgcaccagccaggaaaaactgagctggaattgatgactctgttccagttattcattgctgcagagtaaataaccctgaagaaactatctcaggctgttgtgagtaggcagctggtctgggaggcagaataatgggtccccagaaacatacacgtcccattgtctgcaacctgtgagcctgttacctcacgtggcaaatggtactgtgcacatgtgattgagtgaaggatcttgagatgaggaggttatcctggatattctggatgaatctgatgcaatcacaagggtccttataagaaagaggcatgagggtcagagtcagagagaaactggaagatggtacctaggtggctttgaagatagaggaaggggccagaaaccaaggaatgcaggtggcttctagaagctggaaaagtcaagggaactagttctcccctagagcctccagaaggagcatgaccctgctgactccttgattttatcataagataataaatttgtaatgtttaagccactaggtttgtagtaatttgttacagcagctgtgggaaaataatgtgtctggtttgactttaaacgagctccaatttataacaaatcacatgcacctaattaccgattccaaacatttttcttttttctcctcaaatttaaacttcattcctcccaatctcatgtaattcaggtctccatgaacactttctcctcattctttacaccatgttgaaggaacgcttagcactttatcgcattccaaaaaggcagagtcaatcaaacagattttactagagattccatatatcacaaagcactatttaatgcaaattcccttcagatttttgtggttgttgttgtttttgttttttttgtttttcctccttccgaaggtcttcagttgccagccacctcacctctggttacttccccctccctgtcctttctggctcccaaatctccctggtttctttcctcatctttccctctccttccttctcccataaccagcacgttcatatcacatccatctactcttagctgctcaataaactaagcacttccattggatctgccctccttggaaggcaagaggtgtgcagaatagaagaaaaaattattgcaaattgtgtttgctgtttatttgtctgctctattccctccctctctgaaactctcagaagcaaactgaagctgttcccgcatgaacttccctaaattctcctctctccttctgttgtcactcattctcctcttcaacctttcctccttcctcctccccactaactccttctctctccctgggcctttcattctaccccaggctatgctctaaggatgattcctccccagactctcaatacttttctctttgatctgggctggcagccaggagggtggggctctcctcttcactgcctggttgggtgacactcctggaaaacccgaggtcctatagcctctctaagctccacttttgtccctgtaaagtggaggcaataagagtggacaaataagcagaggaaatatgaccacataggagcgttctgaggcttaaataaaataattctcacaaagttcttagcatagctgcttatgtgtagtatgtcttccctgaaggttatgagttattactatttttattaatggacactgccccgcacttctttatttttaaaattaattttagcttttattttaagttctggggtacatgtgtgttccattgcagcactattcacaatagcaaagacacagaatcaacccaattgcccatcgatgatagattagataaagaaaatgtggtacatatgcagcatggaatactacacaggcataaaaaggaatgagatcatatcctttgcagggacacggatggagctggaagccattatcctcagcaacctaacgcaggaacagaaaaccaaataccacatgtcctcacttgtaagtgggagctgaacaataagagcttctttacccctttttccctgagctccttcaaaagttaggtgacttgcagcctctacttcttggcaacctcattaacccattaaagtttggctcctttgttttccgttaaagactgctcagttccctgtgcccactggccacttcttatcctccttgctgtctctatcaggcagaatttccacaccttctcctgaccttctatctgcttgtccagcctcagtgagaagttccatgtgcctctcatttgggcagaggtagccagagttggaatgtacacattgcttaaaaggatgtttgcctgaaagttcaaactcccaaaatgtcctcttcaataggtttctttgcagctttttgaatatgcatatgaatataaccacattttaaaaatccattcatcagttgatggacatttaggttctttccaacttttgactattatgaataatgcttctctgaatattttttgtacaagcttttgtgtggacactataaattttatgtaagtgttagctattatttctatcactttctgtgtccttgggaaagtcacttaaaccctatacactttagtgttttcatttttaaaaatgaggttcctgaggataatactagaatctacctcctatgacagttgtgaccattaaatacattcagagctgatgttaaaacgctcagaacagtgcttggcatatagtagacacctaataaacattaagagttattatgaaggatccattacatttcaggcatttgttgaatgctctcaggtatatgaccccaataacctatgtaatgttgctattctcatttttcagttataaaaaccaaggtcagaagggttcagtgactggcctgtaagctagaacttgaacttgaactttagtttcatgttctgactcaccaagccacctccttccctggtgactcagtgtaaacatatgttaccaccacatcaaacactaagtcaaagggtctcagatgctcttcccagtggtaccttattgaccattttttgctttctactagctccactgttagatgcttgttccagcccaactcccattcttgtgtggaaataaagtcaacataacccatgtcttctaaatacactcctacgggtgggaagttccaggagtgggatggggagaaacattacttctttaagttcttctctaagaaatgcaatctagagtcaaccatgtccttccctccggtgtccttccctcctacatcttccatccctaaagaaaggaacatgaaagggaaagagtaaaagacatcatgtaggaatacaggtaagaatcttctaggatgccaggcaagcagaatgaagacagactgcccgggttttaatccggtctctaccaatgacaactgcgtgaccttgggaacagttctgaacctctgagttgcagcctcctcattataagataaggataatagtaattgcttcttctggggtccatggagagatgagatgaaataacacatgtttaagcatcagtcttgtgcttggcatgcagtgaatggtccagtagcattagcgacccaaaaaccatcccaccatgaggatctggggcagcagctgacagtctgtatgcttgcagcttcttaatctgccagctgctggtatcaccacctctgactgtgacaccgaattacccttcatcctctgccccgtcacttactagctcctgaggagatgaccccaacaggtaactccttccagatttgaccatgtctactacaggagacttttccccattgtaataacatgttgattatccctcccacataaatagcatagctctttaacccaaatcccagcaaggcagttggataaatatttaaccaagtatcagaggcatgggaggcaactctgatggtacaaagagcagttggaaaatctttctctttgaggcctaaagtcgccagttttgctcttcagaaatgttcgcataaacacttgtgtgcaattgcatgctatgctcaaaaacaagccctgctaaaatgacccaggcctcagagattttgtgtcattgtggcttaaatcttgctcttcggttactagctgggtgacctgggtcaggtcaccttacttgtcatgtctctatcttcaaatgagggtcatgtagcacctgagtccagggcaatatttctcaaccttggcactactggcattttggtggggagaattctttctgtaagggcactgtcctgtgcattacggggtgtttaacagcatatgtgtccttgacccactagataatagtagcacccacccctaattgtgacacgtcttcagatatttcccatgatctttggggtgcaaaatcacccccagttgaaaacctctgatcttggctgcagatttaaatgaaccatgggttttgagtgcttagcacagttactggtatataggaaatatccaagtaaaagggacctctcaacggagagagagtaatcacagttgcctgccacatcaaactgttctttttattattattttttttatttttttacctagaattagaggaagtggaaaacaattctaattgtacaaaggacagttggaaaattgttctgtttgaggcccaaaacctttctcgggccagttttcctccagaaatcgcagagtaaacacctgtgtataattgcatgctatgcttgaataagaagagttgaagataaacccctctaaaacaggtctccctctggtgcccaggttggagtgcagtggcacgatagtagctctctataaccttgaactcttgggctcaagcgatcctcccacttcagtctcctgagtagctgggaatacaggcacatgccatcacatctgctaatttatttttgccatggggtctcactttgttgcctaggacggtcttgaactcctggcctcaaacaatcctcttgtcttggcctcccaatgtattgggatcataggcatgagctactgaggccgtcccaagctatttaaaatacttcagaattactttataccaaagcaagcaatcttagagattcttacaagtctacaaattaaaagatctagaagagttcacagtttcagccttgagttctgtctcagtccagactgtgggatcattcctggacttttccttgctgagccagctgccttaaaagaatcatttggcaagtcattcagccagtctctcagctgctcagtggcaagatgggaagcctaggctgagattttcttccctgacactctttagggagattgtgggacaagggggaaagtgggtagagcaagactgagtgaacctcctcatgctgggttgtgtgagagatttacatgcctatagtcaattcattctaacatccacagaatgcagatattaattaattttctagatcaagcactctgtaacccaagtttgtgtaactggtaagtgataaagtcaggatatgaaccgggatctgttttactccaagtactatgtgctttctacttttccaggctgttaagcaagaacatgtcagacaaggaggggcataaaaaaaaaaaccctaactctgttctgtttaaatggtaatcaggaagtgttggcaatttagggctgtctcttactccattgcttctcaacactgacatatgtgggtatcacttggagatcttgctaaaaggcagaatctgactgggttggtctgggtggagcctaagattctgcatgtctataactagttcctgagtgatgttggcggtactaatccccggaccacattttcaagcttgagatgcatcagaatcaccggagggcttctaaatacacaattgctagaaatcaaaacctcaataagataacataccccctaaaatggccgtaatgaaaaaccaccataatataatatacaccctaagatggctataataaaaaaaaaacacacagaaaaaacacatgttggtgagaatgtggagaaattggaaccctcttatactactggtagaaatataaaatggttcagcagatgtggaaaacatttggcagttccccagtaagttaaacttagaattactgtgtgacctagcaattctactcctgggtgtatatgtaagagatagaaaagaggtgttcaaacaaaaactcactcatacatagatgggcatagcaacattattcacaatagccaaaggtagaaacaacttaagaatacataaaaggatcactggctaaataaaatgtggcatatccatataaaggaatatttttcagctttacaaagagtgaagtactgatacacgctacaacatgaatgaaccttgaaaacatgatgctaagtacacatacggtggggagagagagggtcttcacaattcttttgtaagcttcagaatggtaacttcaagtcccttatttttagcctactgtcaacaatatatcacaatgtaaaggaaataaaatgaccaccagaataatcaacaaagtgaatgctgaatttattcccctgccaggtaagggaacacagcccagggaacaaattgactgaatagttcacagaggcattcgggggaatatgacttagaagaggggatgatttttcgtgcctatgctaagtaaggatagaaagggtgcagtctacgtctaggaagagtggaaagagtccatagttctgtacattattgattaaggcaggtcttgttgttgactacgtatgtcagtctgctcagactgtcacaataaaatatcacaaatcgtgtggcctaaacaacacaaatttattttctcacagttatgcagtttagaagtcccagatcagcatgccagcatggttggttttctggtgagggctctcttcctggtttacagacaactaccttcttgctgtgtcctcacatagcccttccttggtgcatgttcaaggagagagtgtgaggtgtctggtgtttcttcttataaggacactaattctgttggatcaagggcctcatctttctgatctcatttaactttacttttttagagtcctcatttccaaatacagctatcttgaggattagggctttgagataggaatttttgggaaacacaaacattaagtccataacaaggtgtgttctcttaagttacctaatgttaggttattcaaagtgtctgagtaatgcaagaggaataagttacatagatctgctatacaacattgtgccaatagttaacaaagctgtatagcacacttaaaaaatatgttaaaaaagtagaattcacattaagtgtttttaccttgagaaaattaaaagttaaattaaaaaattagaggctgtaactggacagacaatgaagggttacataacgtcaaaaagccttaagacacagcggctcttaatcagcaactttggacacctatatttatctcatcttacgtcatcttaaacattaacggcaagattggatggatgaggttgaaccatacaatactgccatttcataggtaagacatggtctaatattggcagttcttgcagggttcaaattaatgcaaaagacaaatgagtcttaaatgtttgattcaaagcatgctttttgtttagattgtcaatgtggtatatgatctactgtcaacaaacttcatatgtcatgtcttagtctgttttgtgttgctataacagaatactgcagactgggtaatttataatgaacagaaattgattggctcttggttctagaggctggaaagtccaagatcaaaggggtggcatcttgtgagggtcttcttgctgtgctgttccacagcagaaggtggaagggcaagagagagggagaaagagaaagagagcgaaagggggccaaaatcccctttttatgacgaccccactctcaagataatggcattaatccattcaccccatcctcaacgcctaatcacctcttggtgcaccccacctcctaacactgtttcattggggattaagtttcaacatacgcttttggagggacacattcaaaccacagcgcttacccataaggcagtgcattatcacaaaagctcatgtgcacaaatatgtgacaaaactctaatgttcaaggtttaatattcaaaagattacttgaataagtattaagtgcagattctgattcagtgggtccagggtggctcttagtaatccacatagtaaacaacggctgctggagattctgaagcaggtgcacttattactctaagaaaccgtgaacatatggagccttttgggctattgagatattattttgaaaagcctgagtagcactaatggtagaaagcccttatatggagctactttgtgccaggcactattctaatatattattaatttaactttcgcaacgatcctatgatgcatggaccatcattattaatttacagataaaaaggcagagaccaaatataaagtgactatcctgctaacaggtggctaatcaatggcagagctaggatttgaatgcagtcagtgttggctcctctgctaacctgtttgtcttctatctgaccaaccttcaacatctataaaggtcatggagaagtgagaactctggctaaccccacgaactgggattgccacacagcccatgctgtgattttgaacaagttgctgtaacttctttggcctcccttattagtaatagaaaggagttggatttcaaacgctaagatttcatgaaactataaatcacttacataaaaatccgctggccatctgtggcaagattaaccagtttaatgagagtctgcttgatgccagacatcgtgttaaaattatatcagttaagccttgggaccttttgtgtttaagtgacagggccaaaccccaagttagcttacaccaaaaatggaagaggaatttactagctcttcaattgtctgagagacaataaattactagctcaccaattgtctgagagaaagaataaataagctcactggtgtctcttcttaaaagggcactaatccctctcatcatgaaggctccaccctcaggacttaattaccttccaaaggccccatctccaaataccatcacactaggggttagggcttcaaaatacgaattttgatgggggtgggcacaatgttcatagcacccccacccttcaggtaaccactgatctgttttactagagattaatttgcatttgttgaactttacatgaagggaattataccaaagagtacatacccttttgtgtttggctctctcactgcccataattgttttgagacatccatattgttacatgtatcaagttcattcccttttatggctgagttgtgttccatcatatggctggactacagtttgcttatccattcacccagtggatgcttctttcacttgggaaatctttgccaagcctgggagccctgttgttatgggtctagtcttcgtgtgagacttcatgaggcactgtgagccctactgtctttgctccttcataacatcagtgtcttcctgctgaagaccaccaggaatgcacctcaattcatattctggggctgctgtcacaaatcaccacaaacggagtggcttaaaacatcagaaattttttctttcgtagttctggaggccagatgtctaaaccaagtgttagcagggctgtgctccttctcgaggctctgggaaagaatctgtccttgcccctttcagctattggtggccctaggtgtgccttggcttgggcaacataacccaaatctctgcttccatcttcatgtggccttctcccttgtgccttctctttttctgtctctgataaggacacccatcattaattagatttagggcccatcctaatccaggatggcctttcctagagatccttgcctcagtgacatcttcagagactcttattccaagtggatcactccctttcttggcttcctttgatcttgccttccattacttccttatagctggtccagtgacaaactcagtttaaggctcaatctcaccagcttctaagctaaatatgatttaggtgggaaacagagcatctgctctagccctagaataagtcctttctcacatcctcttaaagagatgccccaccatttcccaggatgtatgttattcctcgttgcaacaagtattgagcacaatctgttcgattacaggtgctgtagtgggttgaatagtggaccctcctccccacaaaaagatatgtttaccaggaacctcagaaggtatgttggtcaggctagaagatcagggcctggtcggtaggtgctcttcatcttacctaaactacattgttttttttttttttttttttttttttttttttttgagacggagtttcactctttcgaaaggctggagtgcagtggcgtgatcccagctcactacaacctctgccccctggggtccaagcgattcttacgtctcagcctcatgagtagctgggattacaggcatgcgccaccacgcctggctaatttttgtgtttttagtagagacggagcttcaccatgttggccaggttggtctcaaactcctgacctcaggtgatctgcccaccttggcttcccacagtgttgggattacaggcataagccactgcggccagccctaaattacattttgcttaggagttggacaagattgagccttcaacttggtttgtcatcataccagctgcaataggggagccaaagaaggcagaagcaaatgaagctacactgtgggaatgagcaagaacattgctcacctgggctcagggggccttgcctgcctttgtctgcccaagtcactgataccagttcctacatacagtagacactgattaaatatttattggatgaacaaatgaacatttctaactttgcttctttttctcccattattcccataggaggggccccaatggaaaggctggcatcttatggctcatcaaaggcggctgtgaccatgttctcatcagttatgagactggagctttccaagtggggaattaaagttgcttccatccaacctggaggcttcctaacaagtaggtttctgagcccaagaacctgtgatgttcatcctggaaggaaccccgaaggtcctcttggtctgacagagcacacattgaacccctcattgttgtcaaagatgagcacagccagagatcagttaaaggggtgaaaacaggtttgattcagtaactgctgacagtaggggaaagagctaagctccattctgatttgtgcgaaggtgttttaaacattttaaaaggaaaaccagggagaggggaaagcatggctcagtaagtcagattagtgaaaaagtacaagggtccatcagtgtccatgcagaggggccagctgtgtctgccagctggcaattaaagaagtccagattctgtcttcccacagagacagagaaacagaggtctgatccttgatgattcagttccaaaggaatggctctcagatcctggagagaaatgcttctgcattgcaagagctatatatttacaatttaaagttcttttttagtaagtatttcaggaaagggaagtcagggacctctcagggatgtcttggatagaacaaatagtaaaattttctggcaaggttgagccttcttaggcaggcattttagggaggggctggtgttatccaagggacagggccttatgctgctagaaactgtgctggagtttcgttaagtctcttagtgcagggggttgggaaggggttgtcatgcatccagagctctccagctctcagtgtccacccagcagggcttgggttgcatgggcctcttctaagtgccatgctctccatgtatggcttcacccctgcttcctttcacaaaggaattgcgttggcttataagtcatcagcaagcagaggccacactgggttagaaccctggtcccctggtgcctgctctgagcgggacctttctgggacacacactccctccctcaatggtagagttgtatttggtctgtgggaacgcagctcaaaaatggtccctaactgactctcaccaattttgattattttcattgccccacccaaacctgtttaacaatgtataatccattagtttcatactaggtttctttatttggcttcagagcttattttcatctaaaagtttgagcagatagtcagagtaacatttattagtcttttgctgccattggccaagaaggtttccttccccagcttctttatatttcagaaacaatatttttctccttccctctgaagaatatgacccacctcccctccaccccaagaggagaaggcccttctctccactcccctccctgcatatctgaactctgggaagaggcagcctaccccaaggctcagtcttcagttctgggccatcaaacatttaaccgatgattcaagtgaagatgtaaaaagtatgtctaataaaagaccacagactgggaggtattgctaaatgcacgaaagaacaaaccctaaaggtttgaatgttatcccaaatgcaaaagataaaatctatacagaaatattgaaattttggcttgaaacacttgatagctgagaacctcctaaggttgcagagggggtgcaagactcagagaaagggacagagacccagagaaagggatatgggtcaacacgatgacaggcaggaccagggcgatagaaatgcagagaagatgaagtcttgagatgggtttccaacttggggactccctgggttgggaggagaattgaggagaggagatggagaagagacatgggtcagaggtgaagccaaatgtgctggttggactgagagactgggatacaaagagagggaagctgcttgagagctggtacaagagggaaatggtgaatttgattttgaatctggcaggaggattgagtgtttggtgacacagcccaaagagaattccaacacacagatgtaaaattccatttagacgagagagcaatcctgcagttaggttatgattttggagattcagtataattgctatgcataatagttctggagagctgttctcacccacttaccatacattctttactgatgttgatcttaatttttaaaatcgagaaatatataaacagaaaaaagcattatacgcacagggttcaacaaattattataaatcctcttgtacttaacacccagatcaaaaaataaaacattaccaacacccagaagcccctatatgatcctctaccatcacagccctctccaacctcccaataggtaatcacctcttactttttgtaatgatcatttatttgcttttctttgtagagtcacatccagcccacttaatagcatttgactttaactgcttttgcactttcaatggaatcaatatgtatgtatccttttgtgtctggcttctttcactcaatattctgattagacaatttatctgcactgtgtgtagctgtagtccactcatttcattgctgtgcagtattctgtgaatatgccatgattttctactgttgatgggatgtttgagtcccttctagtttgaacaagtatgaacaatgcagctatgaactttctggtacatgtactttggtttttgtgtgcttgaattttcccatgacacatgctgcagagtgaaattgttaccaaaaagggctcctgatccagattccaagagagggtttttggatcttgtgtgagaaagaatttggggtgaatctgtagagtaaagtgaaagcaagtttattaagaaagtaaaggaataaaagaatgcctacttcttaggcagagcagcagcatggactgcttgactgagtatacttatagttacttcttgattatattctagacaaggagtggattattcatgagttttctgggaaagtgggagggatggcctggaactgtgggttcctcccccttttagaccatacagagcaacttctggacattgccatggcatttataaactgtcctggtgctggtggaagtgtcttttagcatgctaatgcattataagtagcatataatgagcagtgaggatgaccagaggtcactgttgttgccatcttgattttggtgggttttggctggctgctttaccacatcctgttttatcagcagagttactatgacttgtatcttgtgataccaatcctgccaacctcttatctaatcctgtgattaagaatgcttaacctccagggaatgcagcccagcaggtctcattctcattttacccagcccctattcaagatggagttactcttgttcaaatgcctctgaaagaatgactagatcatagagttttcctgtcttcagctttactgaatcataccaacctgttttctaaaatattgctccaatttatacctctaccctttctatgtatactccaatcaccacaactctgaggagcaggtttcattgacattattctccaggtgatggtgctgagttggggtggataacatgcccttgggtggggatctggtatcccacgtacaccgtgatggtggaaaatttgagatcagatcctgagatgcagtgcctgggttcttccttttatatcaggctgccccccagtttaaagctatttgatgagctctctcaaggcaagaagcccaagagcagaaggctgagaactcatgtttggagaatgacacttcatacttatatttatttgaaggtaggggcaagaaaaggaatcttcagggacacagacaaggagcttctgaagacattctaagagacattccagatttttctggtgccctgaaataaagatagctaaatcatactgcatgctagattagcagattttaagtgctttatgtgcattatctcccttaatcctcacctgtgaagtaggcatcataatagccccatcttgcagtgagaaaatggaggctcagagaagttaaggaagttccaaagccatagagctgataggaggcagagatgggattttgatacaggtcatatcaataacttcattgtgtgcagcaccaaagtggcatgggagggatgggtagggagagtctgtcaaaagtgggagatgatgacggactgatggcaaaaggctgatggctttgtcactcacagagacagctttggggactctggataggttacccacaagagtggccagaaattccatgaggtgtttaaagaagaatgaggtgtcagcccacgaagacagggacaggggagaggtaggaggaggaatagtagctcacgaaaacatgtttttcaggacctagaaacctccagagtaattgtcatgataatcatttctttaagcacggtgtgtgccttcctgaaaagaaaggagcaattgaaactccgtttgcatttccataagtataattggatttcactggcctacatttccaagtgagcatccctccttctctgcagtcctgatatccaggagtcaccgaagctagcaagggctcatccccacagctatgtgaacaaccaagcactttgcaggagacagcgtgggagaccgcaagctttttggaaagtaatctggcagtagctattaaaattcaaaattaatgtgccttcgaccaggctgtactttgaggactcttgcctacagaaataaagccaaagtaaaaacgaataggtggtgaaagtcgatttactgcagcagtgcctgaaatgctgaaacctataggaacaactggaaggtcattggatagggaagtgattggctaaaagctgttcaatgggaaattctgttgctctggtttaatccatagacattgacaagaagggaggtctgtgatttattactaagccaaaacaaattcatggaaaatataaacaccatagtatgatcctttttgtttttgttatttcctggtaaaaaaaattaaaccaaattcttctatgtgtatgtatgtttgtatgaacaaggaaggaatgtagaagggcacacaaaactgttagttaccttagaggagattaattttaaaaatatgcacatctccttattattcactttatataatgaggaggcagagctgctacattttaaagtaaataaattatttaattttatatgataagcaggtattgtctttattttaaaaatatatttatacttaattgcatgtagtttgtgtattaaaatttatgtgtgaattatattaaaattacacttcatatatttttaaaaacataaatgaaaattatatccattaagtagattaaatatttaaaatcctgtatttatttatttatttattgagatggagtctcactctctcacccaggctggagcgcagtggtgcgatctcagctcactgtaacctctgcctcctgggttcaagcaattctccctgcttcagcctcccaggtagctgggattccaggcacccaccaccatgcccagctaatttttgtattttttagtagacacagggtttcaccatgttggctaggctggtcttgaactcctgacctcaggtgatccacctacctgggcctcccaaagtgctgggattgcaggcatgagccaccatgcccagcctaaaatcctatatttaattggtaggcattacttctatatcttaaaaaattatacgtgtgtatgcttatatgagtgtatatatactatattatatacagtatatattatattgtagacattacatgatatattatatatgtaatagtcaccaaaagatgagtgtctgtggcagcagcatttctaaaggcccagttgaaaataagcgcagtgcccatcacagtatagtggataaataattcatggcatttttatgcaacggaatactatgctgaaaggagaatcaacacacagtgcatggatgaatgtcacaaatatactgttgaataaagaagctgatgctaaacaatgagtgctattcatacgattccatttatataaatgttcaaaaccagccaagatgaatctgtcctattaatcaggaaaatggttactgagaagtgggctgaaaggagagattttaaggctggtcctgttctgttttgtttttttttttctttttttccctttttcttttcttaaaattggagtgtagctctgttgcccaggctagagtgcagtggtgcagtcatataatagctcactgcatcctccaactcgtgggctcgaggggtcctcccacttcagtctcccgaatagctgggactagagataagcaccattgtgcccagctaaatttctgtgtatatgtctatgtctatgtctatgtctatgtctatgtctatgtctatgtctatgtctatgtctatgtgtgtgtatgtgtgtgtgtgtgtatatatatatacacatatatatgtgtgtgtatatatatatacacattatatatgtgtacacacacacacacacacacacacacagacacatatatatatatattttagagatgggatctcgctatgttgcccaggctgatcttgaactcctaggctcaagcgattccccttcctgggcctcccaaagtgctgagattacaggtatgagccacggtgcccagacttgttttgttcttgatctgtttgctagtcacatgggctatcagtttggaaaaatccaattacgtgtgcacttttctgtatgtaggtttagaaatgataataaatgccattataaagcacacattttaaaaggcgtttgcaggccaggcgtggtggctcacgcctgaaatctcagcactttgggaggccgaggcaggtggaccaattgaggtcaggagttcaagaccagcctggccaacatggcaaaaccccgtgtctactaaaaatataaaaattagccgggcatgttggtgatgcctgtaatcccagctactcgggaggctgaggcaagagaatcacttcaactctggaggcagaggttgcagtgagctgagatcacaccactgcacttaagcctgagagacagagaaagactctgtatcccaaaaataaaaaaataaaaaaataaataaataaacgtcatttgcaaagggccatccttcccaacagagacaagcgcctgctccctgacttccttggccttcccaggatctgactcttccctttcctttcaccccagatatcgcaggcaccagtgacaagtgggaaaagctggagaaggacattctggaccacctccccgctgaggtacaggaagactacggccaggactacatcttagcacagcggaatttcctcctattgatcaactcgttagccagcaaggacttctctccggtgctgcgggacatccagcatgctatcttggcgaagagcccttttgcctattacacgccagggaaaggcgcttacttgtggatctgccttgctcactatttgcctattggcatatatgattactttgctaaaagacattttggccaagacaagcccatgcccagagctctaagaatgcctaactacaagaaaaaggccacctaggcaatggaagccctcaaagaagtcggaatgtcatagtcttgaaatgaaagggaaactgggaaactgggtttctcattaaagttgtttcccactctg

SEQ ID NO: 79 - DNA, 401433 bp, Homo sapiens
tgaggctagagaatcgcttgaacccaggaggcggaggttgcagtgagctgagatcgcgccattgcactccagcctgggcgacagagtgagactccgtctaaaacaacaacaagcaacaacaacaacaaacttcaattatgtttggaaagaagtgctaatttaatttggcaaagatgaagacagcagtcataaagcaaaacattcggtctcaggttgggtggattcccacctagttgacgaggccagctgcagattcaggtgggatcacctgatgatctttatcaatgccatttctttctctggatccttattactgacattagcaagggctttcagctgcccagaagatgttctttgcagacatttgctctcccgggctgccagcaggctttacaaatttaaaactttcagtgtaggaacccagcctccgtcgtccttcccctccaaagttaagagatctgctctaagggttcctgaggggtggtctggggccatgggaacaggatcaaggccccctgagcgccgggcctggcttctgtggcttcgcaaacttttcagcctgtgtgccacggcgacgcgcagcggctgagtcggagcccacgcggcgcgcgcctcccgcgaggaacttttcggcttgtaggctgcttgtcactctcgctttccgacgcgcctccccctggctcgcgctcccggagttccctcccctcctggcgaggacctttcccggcgcccgcggctccgatccccgccgcgctgcgcccgctctcccggccccggctgccccgctgagggctcccctctcccaggcaccgcagccgcgcccccgcgtcccgcctcccgagcggctcgcttcgcccgatgccccggccccgtcccgcgcactgagcgcctggcagcagggcgccgagtcccggggcgctgcggggcgctgcgccgagaacggccgggcctgagccctgggcggcccccagagccgatcagagcgcggggaggcgggggcgaggaggaggggacccgccgccgggggctggctgcttcgctccgagccgacttttcgccaatggtccaaagggacatgtccaagtcgcctcccacagcggcggcggcggtggcgcaggagatccagatggaactgctagagaacgtggctcccgcgggggcgctcggagccgccgcacaggtagcgagagcgcggcgccttctccttcctttgtgagccgccgggcagggcaccgacctcgggttctcccggcgcctccactgcagggatctctagcctcgcacctcctcccctcgtcgcctgcccaccctctgctcctctcctggcgccggggaccctgcccctttgcgccttttcctggctctgcctcggcttccatttttctctgcttccgaaaagccagtggggaagggcgggggagacctgccagtcctcccagacttctcccgggttgctccagctggccctcctcgccccttcccgggagaggcacatggagagacatgaatcaggggagtggactggacctgctgaagatcgtgagtccgggtgggcgggagggggcccgcttcccgcagcgctttctacgatgccgactctcctggccacgctccgagccggggtgggcgtgggtgtgaggatgatggggtgcaggtgggcaggaggggagcgaatatgggggtgccctgccggatccccccagagctgcccggaccacgctgcgcacctggggctgacagctctccagtcccctcgggcacttgccaaggtttgcctgtcccacctcatgcctttcccttaagaagcgagtgagctggggacaagaaagtttttatttttccgtctcccctgaaatgttagccatttcagggatctccaggatcccctttctctccgttgagtgtttgcggtttctggaaaaagtcagcttcgctgcaggttgttgtgaaattggagatgtcagttgtaggcgctgggcaatgacaaggtggtttttacgtttttacgtaaggcttcagcaggtacagtttgggttacagacacctccaggtctcagcgatgaggagtcgctcaacttttctcccggcagggaaatgacttcagactcctagctgcgggctggctgttggctggccagtgatgtgaagaggtcttggttacatttcaggcagcattctggagaaatgtctgtttgcttaactgtgttggcttgttgatttcaagcctacatttgccagattttaatttgcggtaagatatatatgtgtgtgtatatatacttatatattaatacgtagacacacatacacacactagagagcatgttagagtatcatttgctgtagtagtgggggcaggagtgtgacaagctaataaaggtggcaaatgttttcttgctgttgttttgataggtggaacatgagtgctctagatattttgatattgtaatcatggcagttccaagtggcatagtagtctagctttattgaactttcttttaccattgggaaattaatgtgctaacttaaaacacataattcactttgacttgagaaggggaagaatgtggacaccaaggacttgtgtaatcagaaatctatttcttttgtagtggtaaaacagctagattttggtccaccctgggctgtttgcttcacaagccgagtagggacatgtaatgaaccagctacattcccatctggcctctgccagaggatctgaattttaaccaatagagtttgcatttgttctagactcctgatttttatctagatgcttgccaggttagacagaatgaaaaatgtacccggagacctcggttattctaggatgaaggtcttgaatactatcagtattcgagtcctccatcaaaggaaaggacatttagaccctcatttgcctttgatcttccttgagggatattttagaaaagtttttattcttatgataaaaatagagttcctaaattcctggacatcaaagtcagggctcacataactgcattcagataagagatactaatttactttgtgatttatgtacaatgattaaatgtaagtcaagttattgtacagcagcaatgtggaaatgattctgatgtgaaaagacacaatttctgccttcaaagaatttatattccagtagcagcaattaggatatatgtataggggctggaagagaagttctgactagtaaatggcttcaaaggaataaggataataaacacgctatttggaggaatctgtaaggacttcattgatgaggtggcatttgcaaagagaattgaaggatgggtcagattacaccagatatttttgagagagttggtaagcagtcgtacatgaaacagagtcccagaagtaagaagtcttacaggataatttatcgtttctagttcaaaaagagcatggtaaggtcaagattggacacaggcgtaaaactgacaaagcaatttgagactacatcttggggacttggaatctttagtgtattgagcgacagggaactgtggaaggagttcaaaagaggacccacatagcagctcatttgggaatattcacttggaaatgttctgtaagatagtttcaagtcttaggagtccagaggtgaagctgccaggcagcagacagatgtaacagtttgggccgaggtaataaggcctaagcgaaaaagagatgaaaagataatggatatgacagttctatgtatcaaacatttcaaagttcaattcacaggaattagcaagtgattgcatagataaaggagagagaagagaaagggcagaatggattttaaaagcaagtttaagagatataaatattcaactgcatcaacattcatctccttgctttctctgccttccaaaaatgaaagcaatttgacttgaattgcgttcatctcacacccattatttgagggaaacattaccttgtttattttatatctgataaatcatggcatcataggattgtgtgaggcttgggaaagccatctcttccatctctctgtttgggcagaacagaccagcagtaaaaactgcctgagaaaggaggctggctctagagcatcctccttgtatgtggcaccgagtaattctactcagaattattgggcagttctacctagaaatggagtttctatttacaaatggaacctctaaagcaatgattggttttaggaatcattctacctcacctctggattatagtattatatttgtatgaagaaagcagaagatgtagatttgcaaactctgccattttccttttctgtatcaatcattctgtctagagagagggagcatcctgatacattccggtccctttgccccagtacattgccataaacaaaatgatacatttctcaaagccctggtttttgttttgttttgtttttgtttttgttctgttttgtgttttgaaacggagtctcaccctgtcacccaggctggagtgcagtggcattatctcagctcactgcaacctccacctcctggtttcaagcaattttcctgcctcagcctcctcagtagctaggactacaggcgcccgccaccatgctcagctaatttttttgtatttttagtagagacgaggtttcaccatgttggctaggcttgtatcaaactcctgacctcaggtgatctgcccgccttggcctcccaaagtgctgggattacaggcgtgcgccaccatgcccagcccaaaatggatacgtttcttacatgggaaatgaatggcaatctaactgcaaattcttgaaagtccccatttaagaaaattgcattgctttttaggtaacctgttgaacagtttcagcgtgaacctggacacagtctacttccaaagtccaggtgctcatggaggaccctttctccaagctccagatctgtctgttcattgtggtagctgctagccacctgtggcttttgagcccttgaaatgtggctggtctgaactgatatgtgctgtaaatgtgaaatacacaccagatatcaaaggcttaagatgaaataaagaatataacacatcttcattagtaaattttaaattgatgacatgttgcaatgaccatgttttggatatgctgggttaaacaaatgcattgttacaattaatttcacctgttgctgtttacctttttaatgtggctgctggaaaatttcagtgatatatttggccatatgacatttctattgggcaacattaaagtatgaaactggtaattctccagggaattgaatagctcctgcgtgaaggttgggtgaacgggaagcaggtgacagggattgataggtaacagaagaggaaacggaggagtaacaagaacagtatctcagcactctaggcctcagagagattgtcagtggcacctccagtcgcacctgaaactgaacagacagtaaccagtgggcctgtttgttttgctcctagcaacaggtcccagctggtcccagcccagccgagtctgccagatgcttttcaagcatgttgtggtaatacagcctggtgatggcaacatcctgaatggctgtagcaaggagctttatccaaaaagagtagcagctgttttctagtggctcttcaactacatcaacactgttttcctgaaatattcttaggtcccgtgtgcaaatgagttttctgcagtctccaaagttggtggttacaggtcctgtgctttatgttttgctgaaatcttcactcttaaccaccatcactttcctcttgaatggtatttttttttttctaatgtgacatgggagaaatttacagacatgccaatcagaatttctgagtatgttttagaatttgaaatatatctgagtgatttgaggttttgttgttcttacaatatcatgctcattttatttttctctctctttttatgtgaagactcaatttacctgttgctgtatttaattcctttgaattatatagccttggccctttcaagagaagctaagcaaaatatgttaacctcataggggatggtgatactctacaattttgtggcatgtctctatcctacacgtagtctaggtcaaacataacataacatggttatgttacaaactaattgtaacaatgcattatttcacaactgcagacagagaaaactacttatgacatcacttaaaggaaccgggcctgtcttactgatctttccaagcctggcaggaggtagactgtgaagaaggcatgtgttgttcctggctttctgctctccctgcctgtgctcctccttactgggcagatagatctctgcttcctggcctcctccttcctccctcctccctcctgtacctgctagacacccacccccatccccaagaactctatttatgcaggctccttgttcctttctgcttttgtgtgaactgagccatattataaaaggcaacttacttctctcttttttctaggaatgtcatttagctacttcttgcctagtaaaggatcttacccttagcttattcacactaagctattggtaaatgaggagatttgatacatgatttctctctggatagttttggctttgtttgttttaggtcataagatgaggaaagtctggaaattcaaagggataaacatcaatgaatacgaactgagagagatggagactaatttttttttttttttttttttgagatggtgtctcactcggtagcccaggttggagtgcagtggtgcaatcttggctcactgtaacctccaccttccatgttgaagcaattgtcctgcctcagcctcctgagtagctgggactacaggcacatgccaccacggccagctaattttttttttttgtttttcgagacagaatctcgctctgtcactcaggctggagtgcagtggcgtgatctcggctcactgcaacctccacctcctgggttcaggcgattctcctgcctcatcctcctgagtagctggtatcacaggtgtccgccaccacgcctggcgaatttttttgtatttttagtagagatggggtttcaccatgttggtcacattagtcttgaactcctgacctcaaatgatctgtttccctctgcctctacctcccaaagtgctgggatgacaggtgtgagccactgtgcccagcctaacttttgtattttttagtagaaacagggtttcgccatgttggccaggctagtgtcaaactcctgacctcaggtggtccacccacattgctttctcaaagtgctgggattacaagcatgagccaccgtgcccggcctaattttaagtgtcagtattttgctcatgggaagtaatctgtaggtaggagaagtgtcacaataaccataaaagcacagaagccacatcattcttcaggttgtccccaggggctgccaagacaactttgagtgcacggctaaaatctccagttaactgacaacttctgtaattaattattcctgtctccttcaatcatgcagcaattagattttcattacctgtgaaaaggtcaacatttatttgctgatttttaagactggagtccattcttaagttacttcgtgtcaaggaagatggatattcattcacactaagctgatattaacatcatgatggattttgaatgtctttttaataagtcattaatatatttttggaaatttcttaagaatttttttccctagtttctgaaatcttagcttgatgttttggaacaactaaaggaatataaatataagagttttttttttctttttactgtggtgacataatttgttttaagcttcatatagctaatagcaattagtggaaattagtgacttttgggactctttcaagaaggacacagagacctgcatgtgtcagggagaatctataggtaacaccttgtactacagccaaatcccctttcctgtctccccttttccttatacaacctgggctgcactaatgattaactgtttcagatattgggcgttcatatattttaatgctggtaaaaaatatttagaaaaactgttcacaaaagtagctgcacttgaagtagcaaattaactaaaacaattacatatattttttttttcaaatttagtcagctaaatatttgaacacttaatcttccctgtcttttccgtttgggagaggtttggccttcacttttttccccccttaattccttcagaagaagtagtctagtccttattttcaaggatttcaagtaactgaaaaccaaatctttcgagcaagatggacttaattttaaatacacattagattaaaataaatttaattttgtaatagcaggatgaattttcactaacatttttaaaggtatatgaaaatggactattagctttccaaagatgctttaaatgtttttttgttttctgatcctgactgttattataataacaaaataactggtcagtaagtaatcactctacagttttttaaaaaaaaagaaactttagaagagaaattcctgtggaaattagtaaaataacagaatagagatataatgaagcatatatatttattttgtcttttaatatgatatatgatagggatttgctctaacactcttaaggcatgagcaaatgaatactttaaataaatcatcccttatacacttaagtaattgaagaacaattttttttctcaaaactatcaccagcatgcatgcagttcagtgtgctatagttgtttggtgtataaactatcttagtacagttgaaaactgtaataatttcattacatatactttgcataggtagctaagtacgcctgaaataacatttatgaacaggattcccaggggtctggaaaaattaatgtgagtttttaaatgtgttcaacttcttgcagagaacagccacctcctctgtgactgaatgtcttcaacattgtgtggctctcacagtgcctgttgtacaattgtaagcaaccacaaaaaagcttacacattcaagaagttggataatgagacatatttatcactaaaatgctaaaattaaaggacaatagaattgcgaagatactcttttctgttcatttaaaaacggtactggaggctggacatggtagctcactcctgtagtcccaccactttgggaggctggggcgggagaattgcttaaagtcatgagttcaagaccagcctaggcaacatagtgagaccctgtctctacaaaaaacaaaaattagccaagcacggcaatgtgtgcctgtagttccagttacttgggaggctgaggtgggaggattgcttgagcccagagggtgtggggtgtagtcaaggctgcagtgagccatgatcatatcactgcactccagcctgggtgacagcacaagacactgtctcaaaaaaaaaaaaaaaaatgggatgagattatattttgtctttgttctcaaagataattcatgttcctcatgaggataaacggtgaatttaacaaagattgtcgctacacccccaaagaaacaggccttaaaaatactttctaggtaataagtatttttgcacataggttaatataaatttaaaagaaaattttaaagagattttcatactttattttagccttcttaggccttagaaaatgcatctgtccaaacctttacataataattggaaaagaaaaaaagtggttaaaagaatgttatttttcaacagtttactgaataatgtttacacaagtaaaaagaatgagctgttaaccgaggacaaccttgtatattacattatgaaagaccagcgtagctttcttgccgtttatgaagttgagagttaattaaatgtcatggaaacacatttgtattatataaatcccttagatactctgaatagaacaaacatatataagaaaattttttgctttaagatgataccaccctctcactgatagcaaattcgtctaaattactcataacgcaaatgtttgtaatagatttcagcttgcctaagtgctacatatattatggcagatattttaatgaaaagcatatgaatagagaaagcataaccaaatagcattttgagaacctgaatgtgatgattttaaaaataaatgttgtaaattttgataatctaaggaagtctctatgagcctaataattgtcaacatgttatacgctttagtccagtttgtttccacatcttccaacccctgtataggtatcactttttatgtattactttgagtccttaccatgtgttagatcttatgctaaatgctataaatacattatttcgtttcatacttaatcctatgaggtattatttcatctaatacttaaccccattttaaagatgaaaagattgatgcttgaaaaagttaagaaatttggtgaagatttgctatgtccaggattctaacctgtgtgctacatttaactctaaactcaactgttaagctattgttcatttatattttaatgtttaatatttgcccttactgcatctatgcttagaattaaacatagattgatgtgtagtttattcttagggttctgaatgtaaacataataggaaaagcaagttcatttttagatgtttctgcttggcccaatcctattatcgaaacaaatcatcttacctttaacttcctgttttaaatgcttatttttaaatgctttatcattacaggcttttgcctcttgcctgctaacacatttataagacgacatccattgttttaattcactagttattaaatgctttgccaagaaaaccctcctcagccgggtgcaacggctcatgcctgtaatcctaacactttgggaggccaaggcgggcggatcacctgaggttgggagttcgagaccaccctgaccaacatggagaaaccctgtctctactgaaaatacaaaattagccagacgtggtggcacatgcttgtaatcccagctatgcgggaggctgaggcaggagaatcacttgaacctgggaggcggaggttgcggtgagccaagatggtgccattgcactccagcctggccagcaagagcgaaactctgtctcaaaaaagaaaagaaaagaaaactctcctccccacatcatcactgattggaaatggatttgtagagtcccaccagtattaactttctaatgatgcttacatgatggcaatgtattacttgtttttggtctttgacattttctgcaactaggcctacattcctgttaaagggtctcataataatcttatttgtctttttttttttttttttttttttttagtcatatggaaaaggagccagaaggaaaaacagatttaaaggatctgatggaagcacgtcatctgatactacctcaaatagttttgttcgccaggtaagagttttaagttcatggttttgataagtaccttaaaatgactttagatttttaaaggtgggtttcactcttttccttaagatttatgtagtatgattgtacttacttttaattgaagtgaagacggtgctgtttaatgtcataattaaaatattttaatcttaagtgagactaagtaataattacactctttcctggcaagttgaggaaagagaagtgtggcattcattacagaggatttctttgaaacagtgagagaactccagcagaaatgattatggatttggggggattgttttttttttttttcagtgggacagagagctgatgtgcatctgtatccctacctgtgagatactggggttcttctagttgagctttcttcttctcacttgggcttgcattgaaaactagaaaatcattcttggtcttgaaatggttgaggctatcgaggttaaacagaacatgcagtatcactgagacataatttaaaccatttctgcctttggagacatagccttcgtctcatttaatgtgtagtatcttcctgccaagcagcctggaacagtcccctaaacagacagtgccaggctccctaacatataaacacgcttatatatggtaacagaaaggaattccattaccagaggaagagcatagaggcagctggacctctgagggttgtggttatgtgttgagaatgaagtctcatcaggaatgagtgagcttgtttcttcctctaacccctctccatggggtggaaagtaggggcagagcatgcagcagagaatctgttcttgtggcccagggatgtccagtgtctgatcagtactctcatcatctcttgtcaatgacagctcactctacggaacagtggtagtcaactggaaaagctgcctcgtgtcatttggatgccactttccccagtgccgcttgagtccatcatcatggccatagattccacccctgccccctgtttgtgtggcaggactgtttcctataaatcctatatgaccttttgggttttatttttattggggacagttacatttccctagctgtctacccttattggctccttgtggcactccccaagtgcctccctcatgtttccttcccacagttagctgcagttgaacttgaacttgtccacctgcagcatcggtggggattttgatcttggctggttgctgcttctttgcactgtccttagacgaaggatgatctgtccccagccatcagtccccgcttgcaacatttgagtatgccagtggtacttccaagtaacttggcaactggaaaaaaactggtcctggtccgtgccaattgggaattgttgtggttgcaggaagtgagaaaaagagttacttaagaaggggcaaagcttttttggttagaaacatttagaaagaaaaaagatgaagccacgtgaggctcaaccctagagctatgttctaatggtgtcagcaggagctaggaaggctgtcagaggagtggaaggtgtatgcgttggcctcatgttttcgtgggcagaatccaggcatcatggtcctgctgatgaagggagggccttgggacatagtgacttgggagagtcagttaaaggaaagttacccatcgccttttccatttcaagctatttattctgcctctgagacaaagagattgaacctggagagctagagttagaatctacaactctgagtcatcatgcaggacctgaaacagaccaaaaaaaaaaaaaaaaaaaaaaacaaaaaacaaaacactagctccttagtgtgcatagtagctgcagtaaagcaacaaataatgccaagccgcttgttgaaattgcacggaaagaaaaactgatatgtttcaaataagcaagacataatgaatagaaacgaacagtgtagaacccgttattagtcatttaatccctgtagaaacgccacgtgaaggcagtcactggactccattttcaaatggtatttttggctgtgaattcctttttcatagagttttaataacccaattcacatggcaaggagggattaccatagtgtgtataagtaaactggaatttgtttttcttcacggtaattttcttttgtgttcttagtaatgtatgtagctttaaacaccattataagtgataacaagagttgttaaatgatttaatgtaaattttagtatatattgccaaaacatacataagcgtgtaagaaggcaaaaccaaatttatcccaaagggtaaatatacaggtctgtttcctagaatatcaataggacgaggtgtttgctatggcatggcttttggggtaatgattacacaggcgtatcattgaaaaccctcaaatgctggcttgcatctgtcacaaaaggaaaactagcgtctttggcaagaattctgagttaaaagttgtatttctcctttggtaatttaatctctattctgttaaaacagcattcccattttgctgccatttgaaaataagtaaaagctgccataagatagccagatatttaatagaaatggtttcctggagtgtttgcaggaatgcatggcagatagtgacaatgggcacactagattttacttatttatttatttatttatttatttatttatttttgagacagggtctcactctgttacccaggctggggtgcagtggcgcgatctcggctcactacaacctctgcctcctgggttcaagtgagtctcctgcctcagccttgcgagtagctgggattacaggcacaagctactatgcccagctgatttttgtatttttagtaaagatggagtttcaccatgttggcgaggctggtctcgaactcctgacctcaggtgatccgcccaccttggtgtgccaaagtgctgggattacaggcatgagcaaccatgcccggcagcatactagattattaagtaattagaaaaaatacctttacatgttgttttttaaagtaagtgtatgttttttaaacaagtgacttgcatcgacacatattgcgtacttgtctgtagctagggaacatatataattggtattacaaagatatttgcccaatagaattttgttttaaaatatcttgcagttagagtctactatagccctttgattaaaaatagttcctatataattttaaaaaccttagaattttattgttataaacagtatatgatttgaaagaaatttaaaaagtaaaatattcagaaacactaggtatacttttaggtagtctttataataccaagatttaaaagttttagaggttgataatgtgaaaatttgacataaaggaaaggaattaagaactttaaaaaaaaaaaaaacaacttggagaatatcagagagtttgttaaggaataaattgtcctcctatccaaccctcaaattcatctttagaagcgcagacacccagtgtgactatatttggagatgaggcctctgggagtggggctctaattcattaggactgttatcttttttttttgtttttgttttttgttttgaggtggagtctcactctgtcgcccaggctggagtgcggtggcctgatcttggctcactgcaacctccatctcctgggtttaagtagttctcttgcctcagcctccccagtagctgggattacaggtgtgcaccaccatgtctggctaatattcgtatttttagtagagacagggtttcgccatgttggccaggctggtctcaaactcctgacctcaagtgatccacccgcctcggcctcccaaagtgctgggattacagacatgagccaccgcactgggctgttatccttttaagaagacaaaaagagaatgaggttgcatgcacacagagaaaaggtcatgtgaggacacagtgaggaggcagcagtccgcaagctaaggcgagagaggcctcaccaaaaagcaaccctgctgacaccttgaccttgggcttttagtttccaaaactgcgagaaaattaattattgttgaaaccaccctgtagtaatctgttatggcagctcaagcagaccaatagagattaatatataattaggcttgaaaatgggccttttaaaatcaaccttcttattgatcatgtaacatatatgccaaaaagtgcacaaatcatgtgttcagcctggtgagttgtcataaggtcaacccctgtggagccaccacccaggtaaagaaataagcattcagcctcacctgtccccttttggacctttctcaatcatattccctctttcctcactaaagataatcaccatccttacttccaataccatacatttgttttacctgtttttgcagttttatgtaaatggaatcattttgtatctgaattctttcactgaacattatggctgttatatttatctatgttggacattttagtaatttgtggattgtctttggttgattttggtttgttggtgtgattttacagcattccactgtgtggaaagaccacatttgatttatgtgctctactgttggtagacattgggccatttccagttgagggaactgagattgatgttcctatgcacattcttatgtgctcctttcatacacatatgtatgcatttttgttcagtgaatagagtggaatgctaggtaatatggcatgcctgtgttcagctaaagtaaacatcatgaaacagttttccaagatggttgtaccagtttgcactcccacaagcagtgggtgatggtttcagttgtcttacatctttgctaacacttagtagtgtcaatctttttcattacagtcagttttatgacagtgcagtggtagctcaatgtggtattaatacccatttttctgatatctaacccacaatttaactgtggctaggcctagggaacatctagagaacagagagagagaatgagagagagagggagagagagagagagaacatattatatatatatatatatatatatgtcaatatgccatatacataccatatatatcacattatatacatgaaaggttttatcagagcattttattactctttgtagtcaatttctcattagtcataattaattctgtagcaatttaattaaaattataaatattagaatatggtgaaacatatttgaatatattgtaacatcagcagaaaaaggctacaaagtaaaagggtaaaaagcatttaccagtggttttatctttccagacttttagttgtatagtttagttaggtaacgaaccttatctttaagaagaatcactggtcttaaggaaagttttcttcttgatatgtttctgtgttaggctctaaagcagaacagcagctaccttgaaagaatttttgcagttatatatagatgaaggttccattttgttaataaaccagttcaccattagttagtcaattaactagtcttctggcccttgacattatcaacttatttgaagtcagtgatatgttacaagaggattggggaaatgacatgccccatgaagttagttaattttcccccggaaactggattcatgttagcctttggggtaagggctgagtcttgatccagtagtacaggaaggggtctgtccataggggtcattggctgtgcgtggcagatgttagtgggatttcccatgaactgtgaaatatgaggttgctgttggttctattccatataaacttgttgtaaagtgataaactagctcatcttatacagtacatcaaatatttcaaagacagaatctgttcttccttgcagtttcctaaaacattaattggaacaaaagttaactgtgggctgggcgtggtggctcacacctgtaatctcagcactttgggaggctgaagcaggagggtcacctgaggtcaggagatcgagaccagcctgaccaacatggagaaaccctgtctctactaaaagtagaaaaaaaaaaaaaaattggctgggtgtggtggcgcatgcctgtaatcccagctacttgggaggctggggcaggcaggagaattgcttgaacccaggaggcagagactgcggtgagccgagattgcgccattgcactcagattgcgccattgcactcctgcctgggcaacaagaacgaaactttgtctcaaaaaaaaaaaaaaaagtgaactgtggtttatctgattgctttttaaatgtcattcttttaggttgcagacaaaaatgttacctaggtgcaatacatgatcacttatatactgaacgtataatttctatatttatcttttatgtaaattatgatgttataagatttatttaaacagttttcttcaagaagctggttagtggcgaacgcctggacttggaagccaggctacatgagtctgaattctggctttgctatttattagttggcctttggacaagtaactgaatctttctgtacagcagctttttcctctggaaaaaaaatgcttacctcaaaattaggtgtaaggattacatgagttatcacttgtaatttgtttagaaccatacgtaatatgcattatttaagggtttattactattatttgtaaatattactgcctatttgtaacattagttaaaacccgaataagaaatagactatggagagggaaataatagtgttcattaaatgcttactttaagttctgtctccccgtttcacagatgagaaatggaggctcagaggtgaagtgacttttccacagtcacgtcaaatgtaaggttggagtcaaaatctgagtctaagtgattgactccagattcttgtccttattggttatgctatacttccttgtagctaaaggaaatgaataaattataataacaatttcattctttcatctaaggaagacatgcagaaaaattcctacgacaaatacatagaaagataaaagttagtcttctacttttaacttccttctgtaccggaaagtgagaatgtcttcagcgttgtaaattttcactaggcatcatgatttttttttagatcggcataattcccttctctcatgaaaagttcctcagattcctagtttgtgatactgtttggcatcctccagcactcttgctggtcatgaaaagtggaactggaattggaggagcatttatttttttcctttctcccacaaaagtcataggaacataaactttttggaattctgaaagtcctttttgaaaagaaaaataaacagaaatgaaatcaagtatgaatcacctgttttgaggtttggcggaggctgatgtgggcccatgaatcactcctgttgtgaatctgggtaaagttaggcatatttatggcacctagttttacagtaacctcatttagaaattgctttccagttcataagggcttttgctttgtaaattgtcataattttaatttattacggagaacaaagtgttaaacataacctctaggcactgttattagaatgaatgaatattattttcaaattgtttatgtgctataagagattcaatacataaagctatagttatcttggacttgttattaagattattgcagctattgaggttgtcttcaattcccgtagaaactctttggctatgggttgagaacagatacatgaatgaaaaaatttcatttatcattgtaataaacctggaaaagctataattcttaatcttttgtatttagtactttgcacaaatttatagcctattaagtgaattagtttttcatatcacttcttttctcctaacttcatcaaaagaaaggaaaaaaaaatctctaagtttagttgtcttagaagtttattttagagccaaaatctaaacagataaattaacttactggaagaaaaataggtggggaagagtaacaagtcctgcttggcatggatgggtagaacatttgtgctgttcttttcaagagattgtgcaagaattgctaagtgtataaattctttgatgctgccaaggtcagggaaaaatatgtacatctgcaaataagtactggttatcaaagttaaagcagctttgatgaggggggaggtagaggaggcagtgttagtaactgccactgcttatttagtgtagttctgttctctctcattctctctcttcctccctccctccctgttttgtcttctttttcttttttgaaaatgtcttcattttcttaaagacatgtgttctccttggctacatttatgtacctggcagcattccaaagttgaacaccaaatgctaagaggatgactgccagctttgctttatttttatgattccacagcatggccattttcattgaaagtacattgtcatctgagctttctactctatgctcctgccgcgtatagcccggactcgcgaactgtttacactgatttttttccataggttgctgcgttgcacacttgtgtcctttgtgcagaaagttgagctttaggaatccacaactgtttttgggattttcaagcgccattgttctttggggttaacggggaagaactttgcaactgatcagggattttgctcaccaacatatgctgtggttgtaacgaaattatcctgtagcttctaacagcttctagaatacaaatcaggatgacaaaatggaatgaaccaaatatttaacagaaggttgcatgacactttcagaacatggtattctaaacaaattccgtcgtctctcagtaccttgttcttggtgctgcatttttggatcttttatattagttcaaattggctttaaatgcaaatgattaatcacagaggcacacagtctattttttagttttgttttgcaaagacagattaaactgcgataatgattacagactccaggcctgcgtagactgatatgtttaaggttggataaatctttcagcccttaaatactggcctgttgccttgttatgctgtatgcgtcacaaacacactataaataataattcagtagatttattgccactgtgatttcctgtaaatttctttttatcttattatggagtcacttagattttgtgaatggcagagtctgtttggtgtcctaagaactcatcttaaagatatcagtataaaaatattgacctttttaaataaagaagtcccttgttttttctgtaggataagcctgtatactattaaaacattttacttttttctttttaggagatataggtactttagaaagtattaaaacaaaatttagattttgcacttcaacatataattaattttaacatgtctcgttgaacataattttggggagaacaagggtttgattatagaaaaaatcttcctcattcatatattatttttaggtatttggaacactttataaactaggcttgattaagtgctccagttattaaaataattttgtggattgagatttttttatgtttgcgtatatacttttctatgaagatacatcattttaaaaccaagaattctttctgtagttacttttattttcttcaactctcagatatgctttgaattacactttccaccgatacctcattttcttccatttttattcatcttctgtttggttaaaccatataaagtcttagaagtcacgcaaactgaattaaccttactagattggttgaaagtttatcttgattatctaatataaagtaactagcataactaggaaaatagaatttccttaaattctgaatttataaaaagcatgtgtttcagatgaatcataaacttttaggagtactactgaagattacttacttagcttaaagttagttattcttgtgtctcaggtcttcccaggcatggcatctaaggtggtggtctggtatgatcaaagaatacttccctcttccctattctgtcacttatagatgtaaatatagtcagttcctttctctcttgttttgtttctggaatcttcacatttgatgattatcacatgctggagaagtcatttttgagggttcagtattgagacataatctcaaaaatatttgctatggcttagttcattaagtaagttttccaatttttgtctcatctttagtccgcaattgtgaccaagcatgtgtgtctgttacaaagacctgagttggtgaaaaaggaatggtgtctccccctacccgcctcagagctgatcatgctcccattcaccatgtatttattgcagttggaggataaagaagaggggaaaacaggaagataatccaagaaggatggaagaagctctgtagagtcttccattaattcatatttaggaaaatgtagtaaaagttcttcaggaagtccctgtcccctgccattgccttggccatctgtgttatccttccaaaactgtcatcaggttctagaaaattattttggcttcaagcctgacatctccattaatattttcttatatccttagtatctgtagaaaagtgccagcctccatttcttcttttgcatagagtatggggatcgtgtgattgtttagacttctgtcaaggttactttgccctgaccatactttctcctcttcctgtctcagagtctgaacactatgaccctaccagcttttccttcttggaaagcacatctctgagccaggggtcttctttctcttgtaggtgtaaccttaaagtttagtcctattcatgacccccattctcattgccatggaaagatttgttgatttcttggtggtccaggtgccgcatctgaaagttggaacatggcaaatctctttttttttttttataacaactgccccttcccaccaaaacaaacaagcaaatttgaggcccaggcaggtgaatcacctgtggtcagtaattcaagaccagcctggccaacatgctgaaaccctgtctctactaaaaatattttttaaaaattagccgggcatggtggtgggcacctgtaatcccagctactggggagggtgaggcatgagaatcacttgaacctggaaggcaaacattccagtgagccaagatcacaccactgcactccagcctgggtgacggagtgagactccttctcagaaataaaataataaaataaaatgtaaaaaataatacaatagatgaattgtattaatttcatgacagccatgaatagacacatgcatttgtacatatatgtgtgtcagtacgtgttctgtaacttttaggttttccttttattcttttctctctcatatttaaaaacaaggctatattttacaatgtaattatatacctaagtcagtatccttcacagtatgctaagattatttagaagtaattttatacttccatttctcatagcacattacctcatctattgagttcttgaagttattactttaagcttatagaaatttaacacctaaaagcatgagaaataaagagcctcacttaatgtttctctctgataattataaggagagctgaagcaaggagaaaacccacatggtaagccagaatgccctgctgtggaattattacttgtcaggaaaaaaaaaaatcgaggatctgatgtcatctctggctgatttgttcaatgacgcgtactcgttcaccaatgtgtggatcgtactgaagaacattgtttactcttttcaaggtctgatttccagtcatgctgctttctgaacagaatgtgtttaaggagtaaagtctagaaatctctaggaaatatttctctgtcaattagattattattaacatcagggatctgaacacgtgcattttgaaaccaattcccagtggattctctatgacctggaagagctcaaggggtcagactgggtcataaaaaccttaggtaagaaccagctcctagggaattagtaaaccaaggcatgacttacttacataacatcagccattcgtgaacctggaggaagtatgtgttcatagaggtgcaaaagaaagccctgtgtgagccgagaggaagtgatgtgttactctgaatagtgagcatagatagtttttgcacactgatcgcaacattgatgtaaaacagtggggatgcacaatgtgtttctgggatggtaaataccggtaggctcagattctgggttcatggagaaatggatagaagagatcgatggatgggtgcatggagtttggaagcttacaagggcaccaggccatgaaggacctccaagacaggatatatatgaagcagtgtgccggaggggatgaaaggcttacagcatacacagaggtcgaagagttggaaaatcaagcatcgtaaaggaatcatttgataaaaggtggtaaaatagtggacgcatgctgaccatgtgctagctactctagtgagtactttatttgatcatttgcacaactcagtgagatggatgatgttagtatccccgtttaacagatgatgaatgaagaccttgacagattaattaattggcctgagtatatatccttataaatatgtagtatttattatatcaaattggtattactcttgggaatgtttacgtgtttgttgggcaacaagagacttttcaacaacagtgatacctgagatctggtagaaaagggggtggtgattctagacccttagtgcaaagccactgaccatgaccatgggcatgaggcactaagtcttcgcccctgagccaggactttggcaataccttggaagagggttgcatcccaagagctgagttggcctcaggcagggccgcaacactgacatcaagaaatcagggggtcatctgtttcgtattgagcatatatcaagaaacagaggtgttcagttagtgaacctacagaaaggttatataggtgttcattggaccattcttttgctttttctaccggtttggaacttttcaaaattaatagtgtggtgcaggaggaagtggtagagtgggtgggaatggacaggggctaggtcaaataaagggcaggagttctgtgagagagaccaggaccccagagcagggttattaaggttatgaggttggtgcttggttgactgtgtaatctactgtggcacgtggagaagcagtgctttcactcatcctaaggcagagtggaattgtgggaaggggaagggagttgttggaagattccttagatgatgtcctgcctatctgcctcttcagagatgttttgagggccaaagggcaggactaaatcagagttgggaggtagaggttgatgctttctattggcaaggttattacagagttttgcagttttaaaaagatctttgtaaacttttacgacagataaaataccaccatgtgcaatcacaatgtaaacaggttttctactagatgtcaattgaaggtcacagggtttagagctgcagacagctgtttatcttaagtccctgttgtggctttttctgtgaacttatgtaaagccctttgaaccagtgccactgactaatagacgttttcccttgcgcagaagtggtcattagtggtcatataagttgaaaatcagccattctctctctgcctcaggccatttgtttgtgggagagcaatcgttgaaagaaactaggttatttggttaccaagagacactgccctttaccatgagtaattaccctcttttggaagaagaattggttagtgtgtgttagacaattctgcaggcaatgggtctttggggagatgtttacaatattcctagaaaagaggccaaaacaattttactaacatttttcattgtttctggctcttgcaattaatacaagaagcatgaacatcctgaagctgtgatctataaggcaaacgagataaactgtataataatgatggtagattacacgtagcctgatttcaaacccagatgtttcagcccggacatctgtgtttagtcttttttactcaaagcagaagaataactctggatttaggacttggaggtgtctacattttattatgaaactatttctctgaccgttttgtgtgcgtgtgtatgtgaaaactgcgtgggaaacaggccaaaaatacacggacttcctgactctgctagactttatttgtactaagttcttgtcatgggttcttactgactcattcattcatttattcattcattttttttcaccaacatatggagtgcctttgccaggcagtgggccaaatgtagaacaaaataacatggttcctagattaaaatattaaagtattgatgtactcatgatgtgaagtccagcattacgagttctgcaaaagagctgaatacaaaaatgtggtgggtacacggggaggcgactgattaattctactgttgggaagaagagggagcattgccaagaaagtcatatttgagctggatattgaagaatgagttgaaatgttctaggagaagaaattgggaaggaatgcgtcatccgagagctcatcctgtggaagggcagagaggagggatggaaagcgatgagttccatctgctgcggctggtggctggctgagtccagataggtacagtgcagccaactcctgaaggtgtcgatgtcaaaacagagagaaacgatgtcactgcacctgtgccctcttttggaagaaggcacaggttgaggtgcaaaggcacgatctatcgcccaggctgaagtgcaaaggcacgatctcggctccctgtgacctccgcctcccaggttcaggcgactgttgagcctcagcctcctgagtaactgggactccaggcgtatgtcaccatgcccagctaatttttgttttctaatagagacagtgtctcaccatgttggccaggtacaggtagtatacctgcaatatcgtgttgcttttctcaagaccactattatgccagggaagttgtttatacatcttttgaaacaccttatttacatataccaattctgaataacctgtacaggaagtagtctatcccagtaaacatcaaataagagtgtatttttatagcttgctctattagtgtggaacattttaaagggcagtatgtttattaacaaatgccacatgtcttttcatttcctttgcaactgacgttagattgaccatagatgtttacatttctatggtttgaagagttgtaagtttctgggtccaaaatattgtgttcatgttagattttagatcgaaagtagtctattaagaaagttatttagcttaaaaatcaggctgtaaatatcaattgatcttatattcgtaatatatatgactgtatatgtacaagtatacatctgtttccttctatggatgtctttaggtttacatttagaatgaatctagattacttatgtaaactaacgttattattaaggtcataagtatttctaggataaatgaacagtgacaaatcttaaaaattaagacacttcaatcctgattcaattaataataattcaattaataatacagatatttatgaggattttttttttgagacagactgtagttctatcccaggctgaagtgcagtggcacaatcttggcacactgtgacctctgcctcccaggttcaagcgactttcatgcctcagcctcccgagtaactgggactacaggcgtgtgtcaccatgtccagctaatttttgttggccaggctggcctcaaacccctgacctcaggtgatctgcccacctcagcctcccaaagtgctgggattacaggcgtgagccaccgcacctggccaagtttttgttttaatcgctaaactcataaatattcctagatatgcttaagagattagataccctttattattttgtggatagttacttgaccaccagttctattggcttgtgaagtctagtccaggacagaggagaggagagtaaaaaccactgagggccccaggtggctctagaatggagacaggagaaaagaacatcacactctggggactgttgtcgggtagggggagcggggagggatagcattaggagatatacctaatgctaaatgacgagttaatgggtgcagcacaccaacatggcacatgtatacatatgtaacaatcctgcacgttgtgcacgtgtaccctaaaacttaaagtataataataaaaaataaataaaataaaaaagaaatgcacagaggagggaggtgctttcaggcccctaaatcccctgaatctccaagtcttcccgtttcctctcccgctcattgagaataagactggaaatcctggaaagccctgggctggccctccagcctcccttgctactccacctgcaccctgttcttcaaggtgaaggtacctagaataattattagctgcttaaaaaagaatgaaatcatgtctttcacagcgacatgagtggaactggagggtattatcctgagtgaactaactgagaatcagaaaatcaaacactgcatgttctcacttataagtgggtgggagctaaacaatgggtacatatgggcataaagatggaaacagtagacactggggcctccaaaagggggaagggtgagaggggaggggagggtcgacaaattactcattgggtactgtgttcactattggggtgatgagttcagtagaaacccaaaccttaccatcatgcaatattcccatgtaagatacctgcacagatattccctgagtctaaaataagataaaaaacaataaaggataaaggcacaatgatacagcctcggggaggagggccagtgaggggaaaatgttcaccagtttccctcttactgggctattcaaccttgcatctcatctcagaaatgctcgcatcgactgtgaaaaattgtctttattttattcgaggccctgcaactcagtacctgcatgatcgggggaagttttatcaactccaaatctcagctcctctggaaagtgaggataataatacagaatggcgcagggggtagccgttggggggagaagtagttcagcttgctcataatctctatcatcacaaacaaatctatagtttaaggaaaaccagaacattctccaggtaagtgtaaatgcagctttaagacacgtgtcatatattcaagcaattttacagccccagtgaaaaccctgtgtttactacaccagtgaagcttctcagtaagttccccgaggtcacccccgaccccaaccccattgcaagcagtttgttgccttgaaacccctttggtgtggaaattctggtgaagccacttaggatagaaacctctctatcttaatgagtaatcatgcagacattctatattccctattgctgggttttaaaaaaattgttgtttgtttgcattttttgttccctttttacttctcctgcaaaagcaaacactgctggacatgatggctcatgcctgtaatcatagcaacttgggaggttgaggcaggaggatcccttgagcccaggagttcaaggctgcagtgagctatgatcaaacctgggcaacagagcaagaccctgtctctaaaaatataactaaaagaaagcaagcttgggaggctgttaatgaggctggaaggactgctgctgaataaaccaactagtaggagaagaattcttaatcaccagataactaagtaattttccccccaaaattgattgagccagtatcttacttaaagagccttcattctgcaaaaacagatgatttcttgatatcttcatctagatttacatctttcttccttctttgtgtgtgtgtgtgtgtgtgtgagtgtgtgtgttttgttgctgttgttgttttatggagtaaggagctaaattttgaatatatgaagcacctcacactgccacttttttgttctctgctctcaggagctaaacatccattttgtccattaaattttccacattttactgaaacatttgaaaaccaagctctaggctctttttatcaatggttatttttcttctgatgccgtgtgatcctggaagatggatttagggcatgtaatggaaaattagctagattatagaactctgttttgaaaagcaaatgtattattttcccaaatacaagctccttgtgaatgatttttaactgtggttccttgacataggccaatgatgttgatttgattaaggcttgtgtttccctgcaaagaccttataaaatctacttgatcttggaactttttaatacagtctaacagccaagaaatttttaaaacaactgttttcttctgtttagttcatttataatcctcatcttattaagtatacataataaatggtggctagctactagcctaaataaccttattatactaataatagctgtaatagcatacaattacaaagaaaatcgagcatgatcatactgttgcattggtggtaatttaaaaagaaactgattcttcttttttattatatttttggcatatatatttttaaaaaaaataagtttaatttaaagatgatcagaagtcaatggtatagctgtggtttggtagggctagaaaagtcttgtgtacaatgagtaattcttttgttcaggaaagaatttacatgtttaccagatgatttaacttaaaatatatgctactctcattcttgttttatgtttacaaataggtttcttctgattacaaaaggcatataatactcccttgaaaataacccagaaaataaagattgcccattacctcacaacccagatctatttacattttaaaataaaatgtagaaaattagtgataacaggcataattgtacgggaaaaatattgctctctgaataaagtcatctgagttcaacctcaatttagagtactttgcccattcacttttaggcttttgaccaaatgcttatattttgtaaggtaggtgtttcatactaggtagcggagattaacactttattgggaactcatacttcttgggtcacagtgtcttcttgcttgtcacttgtagttacagaaccaatcttcccactttttcacatccttcccccagaatttccctatgctgatcgtctaaaagagggaaaacagggtacatcagttagaattctctgttgcaggagaccacaaacatgactcaggctggctttaaagcaacaaggacatttatggactcatgtaactgcagagcccagttgtcaatagctcattgatgtcattgggcagctgatgtctttccatctctggcctctactgtcttccatgttggtttcattctcagctctaggtgatgacaagatggctcccaacagctttaggcccactttcttcctggttcatactgcagtgcacctcattggctctggttggatgatggcatgtccatgaactaatcactgaggctggggatctgtgacccactgatgggcctggcccaagccataagttcactttagaggtgggagaaaaatcaactccacacaaggctaagaatgaggaggggtgttccttctcagagggctatttctggaggaggaatgaatggatgtaggatggtaacaaaaagaactgaggtccactttacagaatgaatgaatgaagttgacctgagagctctcagattcctacagatggcttaagaaaatgccagactccagggaaaggtgaaagaataagtccttgccatccctccagcctttttcaaactatagtgcacccttttctatttagtagaagtggattcctgatggcattgagagtgagtctgtgaaaatatatcttcctgggaatatacgtgtaaatatactggcatcagaacatgcattcagagtcatgtgtactgcctctatatttttaaaattttcaattcttagtcttcgtgataaaaccacgccccactgccattaaaaattagaatgttggtgggttgtgtgtttgtgtgttgaaaaacccttgtgaggacaagaagactaactaaatcaaatttttatagtcttaatgacatttgagcagcactgacgtgctagagggaaaacagttatgttggttttagaaaccaatacgttgtattcttgacaatgctcttttaagcttgattatagtattgtcacattttaccacaatactagacatcttagagaaatttaataacatgtttgggaatcttactaattgggggaaattaacatattaagattttccatatattttttaaagtaatgataattcttgcatggaatcttaattcaatggaagagaagattcatttaccgccttgcaaggtgctcaagaccgtgtgtgctctatttggtaccgctggctgcatcattaaacgcacactctgcctacctgcagagaaaatcgctgttcttgttgtttttagatctttgtagtcataattgtccattatgtttaacagcactggagattttgcaagtggaattgggtagatctgttaaggacattcagtcctgtcttctgccaggcattagggtctcttctagcatgtttcactcaatttctccagccaagaaatgtagggttattctttggaaaggggattgtgataagttaggatattttggttgtaagcttcagaatcccatttcaaagttgcataggcaacaagagatatgttgccacccataactgtaacagtcaggggtattcctgggctgggggcaggatgctgcctggactgtgtctcccccgcatgggtatttgattctctataacccaaaccagatttccccatgcaggcagcaacatggcagttggaagctccaggctcccttcttcccggctttgatagcagaaaaaaaaaaaaaaaaaaaaaaaaaaaaggctatttgttcttcttcatccttcttaattccagtttaaaaaaaaaaaaaaaaggaaggactcttatttgactcacttagtttacacaccaccgttcacacaccaccgtttggactcatctgtttggacaaggatgaagcactctgatgaaccagttgggatcaagtaccatcagagttggcagcagggcacaattctgagtttaatgcagaaaggagggtgggaattgttacccggagaagtcaaatacaataaataaagatgttgggcaagcagattattagtggcaataacacacttctgttattacatcaatgcttacatcagtgtctgcccctcacctcccaccccactatgtgcagagcaaaagctgacatttcataaatactctgtttcttctctgtggagctaactgatcctcctttaggcatatatctagatgaatagtagaggaaactaagaaggtagaaagtctaggaccgtgcgggattacaaaaccaggatcttggcatgtttcaagggcaaaaagtggtggggcacagtgtcccaggcctgtaatcccagcactttgggagactgaggtgggagaatcacttgaggtcaggagttcgagaccagcctggccaacatggcaaaaccccgtctctactgaaaatacaaaaaattagccgagtgtagtggcaagtgcctgtagtcccagctactcaggaggctgaggtgggaggatcacttggactggggaagtggaggttgcagtgagccaagatcatgccactgcactccagcctgggcgacacagcaagactccttctcaaaagaggcaaaaagctagcacttccatctggagagttgattggaaatgtttttctcttctcttgaatcttcactgtttccctgagatgccatttgattgtgttttctagttttccacgcattgtttttttgtaattttttttcaaactgtacaatatccctgagagtagggaagaaagagatgttcagagttgaaggtgtcagagctaggaagtggcagagactggatgtgaaacccttgtcctgtgcccattagcccactccaggctgcccttgctatccaggttttattaattttagtgtcatcagccttcactgcgaaaagcctacacctattttactttattttcagtggatggtgtagctaatggacaagtataagactagcatgtctgtgtttgtcctgcatgtaatgaccagaattccctagtcattatgaacaccaactccaagcctgaattcttatccacgctcctgaactctttagtcatcacacattgggcaagttacttaacccttgcgagtttcaattcatcttcaaatagggaaaataataaggcctttttttttttttttaaatggagttttactctgacacccaggctggagtgcagtggcacgatctcagcgcactgcaacctacacctcccaggttcaagtgattctcctgcctcagcctaccgagtagctgggattacaggagtgcacaaccatgactggctaattttgtgtttttagtagagatggggtttcaccatgttggccagactgatctagacctcctgatttcaagagatccacctgcctcagcctgccaaagtgctgggattataggcatgagccattgcacctggccataaggcctatcttataaagctattttgagaaatgaaagagatgatggagatgaaataaggataacttattaaatactctttaatgggattctgacacttacaaccaaaatgtcttaacttgtcataattgcctttccaaaggccatttgtacattacctagtgcatggtaaactctatacatgttggctcaaatggtactaataaaacatccaggccggtggcttatgttaggatggtgtatatacttccaggaaaaccacaggtgagagatgtattcctggttgagagattttggaaccttttaggaatgaggttcctgagagctgaggctgtaagaactttgagtatagttttgacttgtttgagggtgggtttagggttccttacaatatcaagtttgtggtttaattttttttgctcttggaattagcattatataatgaatcactgtgggttctgaatatagagagacatttctacttcttctaaccttttagtatgatatgttttctaagcctaaaaggcccaggacattgtatgttttgttgatattaagtttgtatctggtggtagggctgtgtctgttatatttttgcaggtttttaaaatgcttggccatttagaaacttttaaatgtttagattttacgtttctataaaagtgccacaaatactcctgcaaattagtaagttcagggaaactggtggtaaaatgttggtgagtctcagatggcctttattaaattagtactttattggtacaactctagtaacaaaaacttatagagagtgaaaaagaggattcattctgtaagaggtaatagaaacagactgttctctaatatttccttttaaataatttgtaaaaattttcttgtctttgcttaatcttaccattgtttgaaagaagtgaaaacttagcacctttgaagatgggagtttgagacatttccttctttccttacctccctccctccctccttctttcccttcctttctccttccccttccccttccttctcccctccccttcccttccctccctccctctccctctctctctttctctcttttccttccttccttccctccctccctcccccctcttttcttttctttctttctttttttccttccttcctttttctttctttctctttttcttttctttctttctctctttctttccttctttccttctttcttgagttttgctcttgccgcccaggctggagtgcaatgacacaatcttggctcactgcaacttctgccttcagggttcaagcaattctcctccctcagcctcctgagtagctgggattacaggtgcctgcccccatgcccagctaatttttgtatttttagtagagacggggtttcaccatgttggccctgctggtctcgaactcctgacctcaagtgatccacccgccttggcctcccaaagtgctgagattacaggcgtaagccaccatgccgggccaagacattttatttctgacttgagatttgttctgttctgcttgattcaagtattacagacaagtatgtgtgccagatgtctgttctaacatgagttcaaatttaaatacaattcagatttctagagtattacctttacagttttccctcaactaaaaaaaatgtttaaaatactaattcattggaaagaattgaaacttaacttttcactttggttttcagacagaaaaatttagaaacacaaaattgaagaggattatagcagcactaacataacaatcatttataaatagataaataaaataacacttaaatctgttctgttagccactttcaaccagagattaacaagactatttcatgtggctgacgagaattgacctctctatggtcttgtttaaaagtcttcttaaatagacgtatagaatcttaggatattccaggtttcttaatgttagaaacaatataattatgttggttactgtcaaaacttgcagtgttgtttgaaatatgtatttacagcaacagatagtcattgcgtctttcgttgtccacactggtaccagtttggtactgaggcatctgactaaagacctcagagaagcaccagaaaatggaaaagaaagatctgcccccaaatacgcagctggccacctttttgctactagtttactttgtcgcatataaaataacgaagacagatgcatgtcaaaggatgtgcgtattgggtcagaataaaaacatgcacaattttttttatgaggaacactcgttttatgaaagttcacaggctcttattcacttaagtctttagaaatttgtgtctctttgtctttcacacacacacccactgccagggatacagggctccagtcttccggcttcttgatgaattttttttaagtacttctttgagatggagtctcactctgccgcccaggctggagagcaatggtgcaatctcggctcactgtaacctctgtttcccaggttcaagctattctcctgcctcagcctcctgaatagctgggattacacgtgcctgccaccatgccctgctaatttttgtatttttcgtagagatggggtttcaccacattggtcaggctggtctcaaactcctgacctcaagtgatctgcccgcttcagcctcccaaagtgctgggattacaggcatgagccgctgcacccggcctctggctttttaggttcagaacattttcccctagaattactgtggtggtcaatagaaagaaagcccattatacgtatttatggtaggaacctgagagcagtgagtacttgttcgtgtgtgaaagacacctacagcatgttgtaactagactgaattctgaatgcagcctgttatacatgagaatatttcattcctagtatcatttctagtatgccaaagacagtggtgcgcttccattcatgaccacatagtgctcaccacacaattgtaccagtgcatatttggctttgtacaaacaggattaggacaagaaaattaccagttattgcgggggtcagtaacccaccaatataaaatagaagacactgatgatggtgaacagtattatgaaagagagacagtctctgattccaggaagtttactgttttaatgaggaggtaaaatgtgcacatgatgtatttaaaagaagaaaatgggaaggctttaaatagggaaatagagaaagtgctctaggagtttagtgtaggaacatattgttcttactagggaatcacaaaagcattgcagaagaaattaaatgtgaacctccaacagtggggatgggaaagatgggtgttctaggagtggagaccagggtaagtgaagctacagaagagggaaagtcacaattcctatagttgagcaatatttttcctggcattgaaggaacattgaaagtgattggaaggtaagtctgtgaaggtgggttgtagcaaatggtggagatctagaatgccaaatggaggttagcatttacagggtgcaagtcaaatggtctccacgtaccagcttccatgtgaggaccaccatagaggtgctagcctatgggcagccatgtttcagagaatgctgggtgggcaggcatggttcagttgaagaggtgaaggatgtggggatagtagttcactgcagttcggtgtttcaggggacattgagaaggtatgcggggaatgagtgaagataaggaagagatgagtgggacttttggttaggggtacagaattccagaacttgttagtgatggcagtgagaaagcgtatagaggtgagggagggaggtaccctccacattttaggtagtgactgagggaaagtgttgttttcactgtgtagcctcaaccctaaaccctaaggctggggtttaggttgcaaagacatttagcaaggagaacatacagaagcagaagtgcctgttagagtcctacagatcacccatcaaatcatgtgcatatacatgtagtaaaccaaaaagtgactgaagcagatctcaatccatcagaagtgtattttaccatagttgaagatgcacctgagaaaaacaaacacgtgcctcagtaggatctgcaacctatgctttatccacagagggttttgggatgttcagtatttaaccaagaaagaggctgggcacagtggctcatgcctataatcccagcactttgggaggccaaagtgggtggatcacttgaggtgaggggtttgagaccagcctggccaacgtggtgaaaccccgtctctattaaaaatgcaaaaaaaaaaaaaaaaatagctgggtgtggtggcaggcacctgtaatcccagctcttgagctgagatcacgccacggcactccagcctggaagacacagcaagactccatctcaaaaaaaaaaagaagaagaagaagaaagaaagaaagagcaagcatttggggaagaaaaagaaaaggaggacaggcaggcagtgaggcaagcggctccatcttggtaggctctgattagcactcagtgaatctacatgttacatgtgcaaagaagagtacaggaaaagccaattttgcattcttctcttgcttggttaatctacattttaacatgttacataagataaagtaagcatgtggaattacagctatttgggaacaaaaaggaaggcagtttttgtgtgactcagtttctaagcttaactttccatttggcatagtgagtttggggtgccaagattctattttcctttcacagtatatacgtaggtattcaagaggcatatcatatgcattttgcagctagactcccatccactggcacagtgaccatcctgggagaagatacaggcatgaagctgattgcagaatagtggtgtctcctctcatatctcggttttgcattgggatgcatacttcctgaagttctccttttcttggcggttgctactgaggatatagagttgaattcgggtaatgtagactggagtatgatgcgactttatcattatctccttaagtcataagcctgtagggattggggactttaccgttgaaatgagccttttctttttctgtgttttagtgatgtttgctgccagagatcttcagagagatttaaaagtcattttaaatggcacttttagcattaactctacctattaggctttgttagagcctaatcttctcagattccttctcattcaagaaatgttgattaaatatctgaattgtgcatgtatatcataatttaaatacatggtaaatactgaaaatcatacagagattaatcagatagaggtcctgttctcaaggatccagttgacccacagatttcttcttttttgattccttttatttttattattttttttagcttagagaaaggtcacacaaagatagtgatttgggagaaggttcttttccctatttgcttgtttcatttagcatgggtgatagaaacatctttgggtaaaagcaaacatctggcaagggtgcctcttagatggaaggttgagcagatattcggtgaaatatgaatcagtgttcctgcttttgctacgttcaattctgaagtttgtgttgccatggggatggagactgccaggagagctgccattagcaagtttgtttgaaactctgtgaacccttgagccccagggaagagaggttggataggtctggtaatagacccctgggagatgcttgggcatttctgctgccaaaccttgtagggacagggtggaggttgaggatagctgaaacatagagcagaagttgggtctatagaaagcacttgagactctttttttaaagaggcagaaaccttccagcaggtctgtgctctgggtgagatattcacataaacaaattagaattttctaggccttactgcggaacaggcttttaccagttgagtaaccacaaacgcttttattgcaatgtaaactaaacactataaaataaatgtcaataactttaatttttttctactttttttagcaaaaggaataaccctttagcagaagactagtaaacatatatgaggaagtctggacagaaaaagaaagggtttataaatagcagacatagcagcccttgctatctgagaaattgttgtagggaggtgatagctttcctaagaccactaataaaggtcttccgtgcctctgggtaaaagggacagtgagtcagttaccctgctcttgttcctgtttttctccctgcatcccaccccaaccattatgttctttccatttagtctgtaacttacctggtcattgctgaataaaactttgatttttgtggtcaggttcagttttttggaaccaaatgattctgaaagtgctatagtaatacatgcatgtttatcttttcattaaattttttaggatcttcgggtaaagataagctcaaatcagcagattttttttttttttaattcagggatttcttccaagtgcttaatttagcactgtgtgctttagtttggtgtttaactttttgtatgatgcctgattgcataccggttctttccttttgcttgtgagtaaacacgtgcatgccaatatttaaaatctgctttaaacagaaagaataatattaaaactctttcagttcagacaagtcactcaaactaaatttcctctccagtagtctaagttgtgaattttacctttcccttactagcagaattccacttgtagctcactggtgacagaggggcgtgttatttttcatagtattctccttggtatagatgaggcttgcaaaaaggacgtgtcctgaagattccattcctgtgcttatatgcactagttggcatgactacaggtctgcttcctctgctggctggagctggggctatttatagtttctcttcttggcttctgatttagcgtatcagcgtgtatttatgcaagggagaactccgaggccatataagactgtagtttagaaacctactagcctcatttgccttttgctctctggagggagaggaatgatcttatattttgccaacatagaactgtagcaggctggaggggaatgacataccgcacatcactctggcttctctgcaacagacagaggggtggtctaagagcctgtgatggggccatcttcccagatggaaagactattcgatccattgcactagatgaaatgtttaactcctttaataagtaggcagtacttcaaatctccttgtctttttcttttacgtcaggcaggatgatataatgggagaatgtggactgggtaaggctgcctttttttttttttaaggctgccttttaaccttgggtcttacggtcacaaatcctgttgcgtcgcagaggtcaacctccctgatcttcactgtcttcatctgcaaaatgggaaaattgtatccctccctcatggggcagttacgaggattagggacagtgtaaaccacacatcaatgtctggcacagagcagatgctgagaaaatcctgaaaactcagtcaaagaaatagaagaggccaggcgcggtggctcactcctgtaatcctagcactttgggaggcacgggccggcggatcacgaggtcaggagatcgagaccatcctggctaacatagtgaaaccccatctctactaaaaatacaaaaaattagctgtgcatggtggcacatgcctgtaatcccagctactcaggaggctgagacaggaacatcgcttgaacccgggagatggaggttgcagtgagccgagatcacaccactgcactccagcctgggcaacagagcgagactccatctcaaaaaacaaaacaaaacaaaacaaaaaaagaaatataagaaaatggagcagaggctattttcccctcaaggatttacattgaggcttttagccaaaatagaaaaaaaaaaaaaaaaagaggtcaagcatatcttgagagggtccatttctccttcccttttcttctgtctctgtccttggtatccattgacccagggtcaccttgccctctagaactgtgcatctgagtacatgcaagcactggaatgaccttacctagatccctactttctcccatgaaacttccctcttagcaaaagctagtccaccctcacactgcaaattttaagacattctcacaaatcaataagctgaatcttatttttctttctttcttcccattgacttaagtttttcacaagaagctcaatcttaatagtgagaagatgcaagactgtagccctggttaaacctctctgcccgtaaggaacttggtacccttccttatagaagtctgctaaagttagccctttgagaaaattacctatttgcagtactcttttgccattttttgaaaaaatggccggtagtcagagttttgaaatttgaggataacttttttattttattttattttattttattttattttattttattttattttattttattttattttatttttgagacagggtctcactctgtcacccaggatggagtgcagtggttcagtcatagttcactgcagcctggaactcctgggctcaggcgatcctcccacgtcagtctcccatgcagctgtaactatgggcgcatgcaactatatcctgctaatttttgtatttttttttttttacagagatggagtcttgacatgttatccaggctaaccttgaattcctggcctccagcaattctcccatgttggcctcccaaagttctgagattacaggcgtgatccactgtgcccggccttgaggtcaactttaaacagcttccaaacaaatcctcagaaaaattagtgaccctgtggggttctcctagtacgtggcttgtctgtgttgtgtgggctgattttggtaccaaagaataggtctgcagggcagtgaaagactatgaatctgaggaggaccttcctgggtcactggcagaaacagcctcccttgagcataccctaagccaccttccctttggcccaattatgtctggggtgtttatcaattttgaagtaagggccgggtacagtcgctcatgcctgtaatagcagcactttgggaggttgaggcgggcatccacctgaggtcaagagtttgagaccagtgagccgagattgcaccattgtactccagcctgggcaacagagcaagactccacctcaaaaaaaaatttttttttgaaataaggtagaaggggtaaaaatgtaaaatataaaaacgtaggtaacattttatagcaatccgaaaactttgagttcaataataattcattatgttgcaatttttgtaagcacaaaagtaacacatgcctgtaatagaaaatttgaaaaaggaaaagcatttcaggaagaagattaaaaaaaaaaaaatcacccaggcaggaggtggtggctcacacctgtaatcccagcactttgggaggcagaggtgggcagattgcctgagctcaggagtttgagaccagcctgggcaacgtggtaaaaccccgtctctactaaaatacaaaagattagccaggcgtggtggcgtgcacctgtaatccctgctactcgggaggctgaggcaggagaattgctggaaccagggagccagaggttgcagtgagccaagatcgcaccactgtactccagcctaggtgacagaatgagactctgtctcaaaaaaaaaaaaaacaaaaacccataatttccttcacctgaagcgttaacattattaatatcttggggtctttttacccaaatccttttatctcaatctcttacactcatgcatatgtaattattacatacatatacaatagctgagaaaatagtatacaaattgaattgtaacatctttttttttttaattaggagaagcagaggggcattgtggttgagagattatttgtgcagctgggcagacctgttggaatcctcattttgcagccaagtattatttgatagtggtggtaacttttcaaggctcttctttctcatctgtaaaacgcagatcccagtatcaacccacacaccaggattaaatgagatattatatgtgaagtgcttaggaccatgtctgccatatagtctgagttctctaaattatagctgaagcagacagctatcatcaggcttttctgcctctgtaacatttgttttctgtcctctccttctgcctgttcttttttattattttttttcattaaaaaactcctgctggtcatttaaagtctgcttcacattttgccactgtattagtccatcctcacactgcaaataaagacatactcgagactgggtaatttataaaggaaagaggtttaattgactcccagttccacatggctggggaggcctcacaatcatggtggaagggcaagtcacgtcttacatggcagcaggcaagagagagcttgtacaggggaacccctctttataaaaccatcagatctggtgagacttattcagtgtcatgagaacagcatgggaaaaacccacccccatgattcagtcatctcccactgggtccctcccatgacatgcaggaattatgggagctacaactcaagaggagatttgggtagggacaaagccaaaccgtatcagccacatatatggaagtgcagggattctcctagatgtgaacctatgggtgccctaggaggccgagtggtacaatggtgtagtggtgcatagtacaggtagttcaccgaatgccctaactttaatgccacatgccacctctgttattcactagctctgcaagcccaggagagttactgaattgttctagagctccgttgctcctctgtgcagatgaaacaattatagtacctatctaattgagttgttgaaaggattaaaagtgttaatccaagaaaaatgctaaaacagtgcccagccaaggttagctcttattaacagaacttgctgcactggggcattcatcttttaggaaagtatggatttaattttaatcatctttgtattcactctaaacttaccccaatgccagacctatggtagatgatcagtttatactcattgaactttgttgcatgggattaaaacctgcaagagaaagacaggacttcttgagatgatgacaaacctacagttctatttctgaggcatcatggttataggaagtattaagcacctaagtttaaaacagaaaaggaaatgaaaaatgctttttgtaatttactttttactttatgacaagtttagatttatcaaattattgtgaagatggtacagaaatctcataagccctagactcagtttcccctattattaacatcttgtataagtatggtacctttgttataattaatgaactaatactgatatactaaccaactaaagtccatactttattcaaattttctcagtttttccttaagttacttttactgttccaggaccctatcctaaatgtcacattacatttaggatacagtctttttaggcttcacttgcctgggacagtttctcagactttgttttttttttttttttttttttttttcagtgttgtgtatttgcttgtttttaatttcattcgattcaattcaattcaattcaattttaagttctaggatacaggtgcaggacatgcaggtttgttacctaggtaaacacctgccatgatgattcgctgcacatgtcgacccatcacctcggtattaagcccagcatgcattagctgtttttcctgatgctctctctgttgcccaggctggagtgcagtggcctgatgatggctcattgcagcttcaacctcccaggctcaggcaatcctgccacttcagcctcctgagtagctgggactacaggcatgcaccaccacgcctggccaatttttcattttttgtagcaacagaatcccactatgtttcccaagctggtctcaaactcctgggctcaagcaatcctcccaccttggcccatcccaaagtactgggattatagcgtgagccaccacacgcacttgactttgtttttggtgaccttgacggttttgaagattaccagttagatattttgtagaatttctttccattagtactttttaaaaattgagatatcattcataaaccttaaaattcacctttttaaagtatacagcaaacaaaatttaaaaagtttgttggtagcttgattctgttcaacctaaaatttattaacagaatcagatgagttaaattgtatacagagtatttccagataggaaatgtgttatttaaattccatttatctggtgagctcagatgcttctggtgaacatttatttgagcagggttataatgcattttggcaaaagcaaacttgaaggtcatcttggatttgctgttgccctggaaatgttgaaaggaatgaatttgttctggcatcttggactgttttggacacagtttctagcagggtacttgtttttatatactaactgaaatagtactgaggtcaatagcttgcatttggaaaacagaaatgaaaatacatcttttaccttgacaaaaggttggcaactgatggcagagatgatcagaaagtagaaatagggtgtgtgagtgggattcccatttgcgtagctttctttgcatacccagcacattcattcatttaataaatatttattctgtgcctaccatgtgccagaaactgttctcggtgcttgggatatggtagagaacaaagcaaacaaaatcatgttgtcatggagatgacatgctgatggtgccaacagagagtgaacaggtaagtgtgagtcaggggtgattggtggtttgaggaagtcatcgtaaggtgataaagaatggctggtgggaggtgttactcaaagaaagcttcttttagttgacatgtgaacagagacacaaatgtatatttgaataaatgtgtgtctgccacatggaagttatctttggaatgaagggaatataatttttctttattagaccattctcacattactataaagaaatacctgaggccaggcatggtagcgcacacctgtaatcccagcacttcgggaggtgaaggtgggcggatcacctgaggtcaggagttcgagaccagcctgaccaacatggagaaaccccatctctactaaaaatacaaaattagctgggcgtggtggtgcatgcctgtaatcccagctacttgggaggctgaggcaagagaattgcttgaacctgggaggcggaggctgcggtgagctgagatcatgctgttgcactccagcctgggcaacaagagtgaaactccgtctgaaaaaaaaaaagaaagaaagaaatacctgagactgggtaatttctaaagaaaagaagtttaattggctcacagttccacaggctgtacaggaagcatgatgctggcatctcctcagcttccggggaggcctcaggaaacttacagtcatggtggaaggcaaagggggagaaggcatgtcttacatgtccagagcaggagcaagcaagagagggtggagggaggtattacacttttaaagaccagatttcatgagaactcactcaggatcatgaggacaataccaagagagatggtgctaagccattcatgagaaatccacccccatgatccagtcatgtcccaccatgccccacttctaacactgaggattacaattcaacatgagatttgggcagggacacagatccaaaccatatcacttactatcatgtgttcaaataaaatcagtcaataaaacgaatggggcagcttttgtacaactgtcactatgtagcgccctaggggtttaatagtaagatacacattatctgcttccatggagcttatggccttgagcaggaacaggatgttaatgaattaaaataagcccatgggtgacgaaccatggaaagtgctaagaagggagggtatagggagctatgagccatgagaggggaatcagtctaggctgggtggtcagggaaggcttcctggtagaagtgatgcttgagctgagaggcaacacaggaggtagagttcacagccatcaagatgggtcaggaggaaggccagtgagtctgggcagcaggagtggggttaactgagaagaacctaccgtggggatggcagctaggagaacctcacttaacactgggcacattctgttattggaatttgatattcttcttgtaaatggtagtaagtgagcatacattaatctgaaaaagcccatccaattgacctgccttaacattttcagaatgtgcactatgcattagattttgctaagataagctaaaatatgctgttatgtatcaaatttctaacactttgtttgaatcaccaaaatgagaagaaatagatttacggcaatattttaaaagtgactgtgttagtaagaaaaagaaaggattctttttaggaaaacagattttaagtcaaaacatagagggttcttatatttttctttttttttaactatcatctagtgaaattttagagaaggcatttaactgtattatacaccatggtcctgagaggaaaaacagtctttggggaatgctttttaatctaataaaatgaattatctttgtttcaagctgttcttctagtacattcagttacttaacgtggtgcatcatcttttaagagtgttttcgatatgacacgctcagagtcaaatgactttataaagaccgaacgatgctcttgtgaaggatgcaaaaatgcctaatctctggccttcaaaatgtttctgcctttttaggaaaatccacatgtaattgtggagaagtcttaaatgaagggctgacaacagtggtggtggcgaacaaggctgagagtgatggcggcagtgtgggtttcttgagctgctgaaatattgtttggattaaggtagagagtaggatctgcttggtgacatttgtatactgttttgtatttctgttaattgacatcaacaacaaatgtaccaccagaaattctatttattattttaaatcttttaaaatagctctttcagagcttcagaatttttagcaaactttacagggccattttgcttgcttatctccttccttcctgccttcctgccttccttccgtcttgcctgcctgcctgcctgcctacctgccttctttccttcttgcctcctttccttcttgcctcctttccttcctgcccacctgccttcctgccttcttgccttccttcccagagtcccactctgttgtgcagggatgcagtggtgcaatcatagctcactgcagcctccaactcctgggttcaagcaatcttcccgcctcagcttcccaagtgcctaggactagaggtacacacaaatgccaacatgcctggctatttttttatagagacagggtcttactgtgttgcccaggctgctctggaactcctgggctcaagagatcctcctgccttggcctcccaaagtgatgggattataggtatgagcccctgtgcccggccttctttgtgtatttctgataattttttaaattatgaaaatagtatatgcttattttggaaaatttgggaaatacaggcaagtataaggagaaaaattttcaatcttataatgaaatcatctcgttatagcacatggaagggatattttgaatgaaaataggttttctctgattataaaaataatgtctacttagtatagaaaaaaaagacaattatatagtgagatcaccactgttaagactggggactagttctatgcgtgtgtgtggatcatactatgaaacttgaactcacattagtaccagaatagactctgagaagggataagaaccgcacttgagaggattgtctattgttatttatttatatttttgagacagggtctcactctgtcacccaagttggagtgcagtgtactgatcatatagctcactgcagcctccaactcctgggctcaagccatcctcttgcctccgcctcccaagtagctggtactacaggtgtgtactactgtgtccaactacagattgtttgtttttttaaaaaaaaattcctcaaagtagtttcttcttgaaaatcttgggcttttacagacttctaatttcataatttcagttgtggctttcagggctcttaaacgagaatttaatgctcatgaacgtgtcattaaaaatagctactaatctatttaatgagtaattcatatcaattgatgagaaattcaaaaataatatagcagaaagtgataaatgcacaatccacaatctcccagatattgtaagtttacattcttccagagttttttggatgcatgtatttaaattggggatatatgtatatattttatgcaaaatgacttcatattatttgcattgttcagtagcttattttcctgattaagttgaatactgtgaacccttttctattttgttcaacagaattttttctcctagcgtttgctatggcaggatactatttgattttgtagtagtaccatagtttaaatacttttttattataaaaattgtgttgttttaattttttcattattaaaagtagtgcaatggtgagcattggtgtcagattattgcctgaagatatctttttagaatttgaatttttcagcattaacagtgtgaatacttttcaagcttttgttacatattgccaacttttcctcctagaacactggaccagtttagatcaccactgcgttttccatcacatcttgatcaacactggatgttattccttgagatctttgcatgtttactaggcaaagaaaagtgattgttggttttaagttgtttcccgacaccctgggcaccttgaagatactgtgtttttagacagttgagttcataagtatgtacggaaagcccgtaagcaaatgctgttaatcttcagcacttgaatgatgatctcacagagtttggacaggcactggggatgtgctatggacaaagaagcaaggagctgattctcttacccccgaagcccttcatgggtggagctccttgagacccctggctaaatttagctcatgtccgcatcctctgcgtgctctcaataaacactatcagaaagggacatgctctctgggatttgcacctatgacccacaggcaaggagattcatccagtaatacagatacaataacgtaggttttctcagatacagagggttcaagaacatgatggcacaggggtcgcttccagtccctcagtgtattcccttcagttactattccaagaggagaggacccagtcccccacctgtcatgtattctccacccaccctgccccgagagtgacccttctgtgtaagaagacttggagggaatggtcatgggagacgtcctggaagaggcaaacaattgcttcaaacaagaattgaatgctcatagcatgctgttaaaaatagttactaatttatttaatgagtaattcctattcattgaggagaaactaaaaaataaatatagcaaaaagtagcaaatgcccaatccacaacctcccagatattgtactttgatgttcttccagacttttgggatgcatatattgatttatgtcctactgaaacctcatgatggaatttgatcgaatttattcaggccaagggtttgagaaggtggtagcagtaggagtgatgggaagtggagagatggggaaactatttcaagcagcatgaagagttcaagaaactccaggttaggtgttgacaagggaagggcaggaaagataagatgagtctgtatcagcaaaggtcttgaagccatattaggagtttgctccaagggcaatgggaaactagaaaagggttttaagcagaggtgtgatatcattagatttggttttgaaagatcatctcctgacagagcagagaatgcatgggaaacgcgcaagctgtgaataggctgccttagaaggttacagtaaaccaggtgcgggacaatgatgacgtcaggaactgggagagtgaaaatggaggagaaggaaaataaatggattcaaacaatattaggaggaagaaacagacaggactcagtagctggatatttactaagtgcttttatgtttcttttctcctttgacaattggaataaccctgtagataaatagggtagccattcctatctatattttatgaatgaaaatactgagattcagagaagctaaaggatttgtcccatgacacagagctggggaaggaactagaacttgacaccagctgccccccgtgtattgctgcttttgcagccctgtgcttcttgtttcagtgattgatgaaggtgggaagaagatcaaaacacctgtacatctagtttttttttctttcttatttttttccataagttattggggtacaggtggtatttggttacatgagtaagttgtttagtggtgatttgtgaaattttggtacaccatcacctgagcattatatactgtaccctatttgtagtcttttatccctcaccgcttcccacccttctccacaagtccccaaagtccactgtagcattcttatgcctttttgtcctcatagcttagctcccacatatcagtgagaacatacaatgtttgagtttccattcctgagttacttcgctgagaataatagtctctaatctcatccaggtcactgcaaatgctgttaattcattcctttttatggctgagtagtattcagttgtataaatataccacagtttttttatgcactcattgattcatggacatttgtgttggttccatatttttgcagttacaaattgtgctgctataaacatgcgtgtgcaagtgtctttttaatataatgtcttcttttcctctgggtagatacccattagtgggattgctgggtcaaatggtgatgtccacagtggtaaaaaggactaaagtgtgccctcatatcaatataaggtacaagtgaaatggaaagacttgaggcaggaatctaggatgctagataagtgaatcctgaaaaaatcgtctcctctgatctccagcaaatgcagaggcaacaagaacaaggccagacaaaggtacagtctgttgtttggtatagctttggatcaaagcaccagtggatttcatcacctgaaccttcaaggattctttgtctgtaccaggcaggcctgagtggcatcagacttacgttcattcattcattcattcatgtattataattcattgaagtgaaatttatgtaacatacaattaatcattttatttttattttaattaattattttagagacagggtctccctttgtcacccaggctggggtccagtggtgtgatcatggctgactgtagccgccaactcctgggctcaagtgatcctcctgccttagcctcacaaagcactggtattacaggtatgagccaccacctgtaaccattttaaagtggacaattcagtggcattaaatacattcacgatgttgtgtaactactctctctttctagttccaacacatttccgccacacctaagtaaaattccttacccattaagcaatttcttcctatccttcccatcccccaggccctggcaaccaccaatctgtgttctgtctctatggatttatttatcctgggtatttcatataaatgaaattagacaacatgtaaccttttgtgtctggcttcttttatgtagcgtaattttttaaaggaccacccacattgcagccatacttcattcttctttatgactgaatgatattttatagtattatcatcataatatttgtgtgccacaaattatccattcatccactgatggacatgggctgtttttgccttttggctattgtgaattgagctgctatgaacatttatgtatctgtacttgtttgagtccctgttttcaatccttttggatatatacgtagaaatagaattgcagggtcatgtgataattctttatttacaattcatatataattgtacatatttatggggtacatgtgatgttttgatacatttgaatacaatgtataatgatcaaatcagggtaattagcatatccatcacctcaaacatttgtcatttgtttgtgttgggaacatttcaaatcttctcttctagctattttgaaatatataataaattatataataatcctgtgtgtaactttttgagaaagtgtcaagcttttttttttttacagtgattgaatcattatacattttccccagcaataaacaagcattccaatttctccacatttttgccaacacttattattttctagtttttcgattatagccatcctgtgggtgtgaagtgcaggtggcttctttttattaggccattcctggtttccactcaaggaaaaggcccttttaatgtagaaggaaaaccaggcccaccttattatgctagctattagaaaagaaatctccaaggagatagattccagaagggcctctgcagggcagtactcccttctggaacccaaggctttactctcttggccagcatctgagctccccactctagtgtggtgggttgatgtgtgttttacctctgaggggctcactacagccctctctccttgaagatggagtgagctggtgggctatggaggagtgcttgtagaaaggaaactaaagctttctggacaaacagataaactcctagattcattcatttattcagtaaatatgtatgcatcctgattatatgctgggtactcctctgggtgctcatgaagcatcagtcactcaaacacatgaagcttgttgcttttgtgagcttccattctgcaggggaagatagacattgagcaataagcttaataaatacatcctatggtatgttaggaggtgataagtgctacagaaaaaaataaaaagaaaaagtagaccaggatagaaagcttctggagtattgggttggggaaagtggggtagaccttttggagaagctgtggtgtgagcacagtctggaaggagttgagtatgaaggattctctcaatcagagtttatccagacagagatgccccatgcctctgagctcactgctgtggttcctttcctgtcatctgagtccctgctcttccaggttttcacagtcatctcttgatgttcatctgtctccttcactttgctcaatacactaagatgtctttgcagttgcaactggttaatgaatgacggtgaaaattaggcccctagggctgtcagcaactccaggccccccagctgaaggaagccaggtgggagtgaaccaaatcttcccaatttacctgacaatgagactcaaagttgtaaagactgtaggctatagctcagtttgtcagggattctagaatcttctagaaggggcttctagaagattctggacatctttatagctcagacaatttgtaattatcaggtaccccatgggcttctggtgttgtgccctgagggcaaccaacaaaggctttaagtttatcaggttcctctctgtgatgtcctcttttaaatcagacctgttcattctgggacaggcaatcacagctgaggcaatagatgggtgtgggggagatatattttgtttagtgtctcctattagaagattttcacttgaaagatgagaattggagtctttttgtccctgagaaaatatccagattcaaccttatctttgcaggccttttacaaaattctgtgctgaagtctgtgttttatgaaacgaacattcctacaattatgtttttagcagttccagtcatgtgacatggaatacagtttcgacatcatgatgtccattcactttatagtgatgttgatttccagtttctcagaagattcatttcagaaataagaattgctctggtttcaaacttttagctctaaattcagcatttggagaccttcaatgaggctgattcttaggatgtgtatggtctcaaattttttttccttagagtttaaaaatatatgaccaagtataatgaagatatggcatttctttaaatatccagctactgcaaaggagagtttaagatgacctcaggaatgctttcccaaaatgtaatgggctttgctctttttcactccagctattttaggcagtcattaaacagttgttagcagtttagtaagtttatataaaagtgcatattttgaggctttacatgccacaggagaagttccaatgtaaacagaggaagacagaatcagtgcttcaaacggaagcgcccagcactatattctcataccagttgaggaaatgcttacacatacaagcccatcaacacacattgacccaccccagctatcagagaggttctgggataattgatctctcagggggtatcaagtgggaccaatcaggcgagatcccagttctagttctgggtgggtcaacgagattcactttgtgctggggttacagattgtgtctcagcttttggtaaatgtctcataaatgcattccactcatcaagagagcgtggattatgagctcctggctctcggccagagagatgcgcagcaatgctgggatgcacgtgccaagaatgttctctgttctttagactgttcagactgtcggtgcctgaccaggcagagatggctctttgtcactgtgatacctgcattcgttgataagtggtggggctcacccctcaatctgtggactggttctgacactggtccatttctccttgagttgttgcagaagaagaaaaaaagcagtaaaagctgtcgctttctgtgtaatgtctatgaacttgcatttgtcatcagagtcaactctttggtacagagcatactcttctttgtttcattaattaaaatgcatctgtagtcttcaaaacaagcttttatctggatctctgtgattcctttttaaaattctttatttctctctctgtgaatctcagcagcaatagtaaccctagtgatggccagcactgagcacttactatgtccccaggctctgttttgcatgagctttacacatattaactcatttgatccacaacgtatccctgccaaaaggaagctaatattattattactattcttattttacagatgtgacacagagattaagtaaattgcttataattacatggcttgtaactgtggggtttgtacccactatgtggcttcaaagttgactttaaccgacactactaagctgtttaacaatacaatggcagcaccaccaccaacaaaactttttttttttttttttgagacagggtcttgctctgttgcccaggctggagtgcagtggcctgatcatggctcattgcagcagcctggtcatggctcattgcagcctccacctcctggactcaagtgatcctcttacctcagcctcccgagtagctgggactacaggggtgctccagcatgcctggctaaatttttgaattttttgtagagaaggggctttgccatgttccccaggctagtctcgaagtcctggactccagtgatctgtccacctcaacctcccgaagtgatgggattacaggtatgagccactgcactggccaaagaaacatttttgactgctccctgtgtgccaatcacttactgatgcaagacttaacttttatcacatctattcatttcactggtgtctaaaacaaactcatcttccttccaaagggggttatctttttctttaatgccatcactgtgactgaaatgccttttgtgtgtgtgaaccactttctcctaaaagtaatttagggagactttagaacaattgttttccaggtaactggccttcaattactagtcaatttccttgtcttcctggatttttcagtgtcttttgatccagcccatcctgagtttttcttgctattgttgaattcaggatgccctgttgggcttctttctcctctcccctcctctcctcccctctcctccccctcttctcttctctccttttctcttcttctctctgcctctcattctctctcttcactccccatagggaacctcattatgcctcttagccccctgggcagtgcttccctataatgatcatgacattggttgatagttatcagatacagagctctttgatggcaggcctgtgtttcgttcctcgtcttgttcttctagcacctagcatttgggcctggcccacagggaacactcagtaaatgcttcctgaatgagcaaatcccttccttctcatcctctctagctcttggcctataacctactccagacactcattattatttcatgcctaagttatatcagctagaatgtttttgcctgcaaggaacagaaaatacaactcaacctggcttaagcaataaagaattttattggctgacagaactgaaagtccagagataaagcaggccccaacacaggcttaatccaagcaccccagtgtgtttctttgtgattctcctggctctgtcctccttcagccaacagtgtgatggttataggatttcagatcctcatattaggccacgatgacatccaaagtgcatcttaagagggcgcttttcctggaagtttctaggaaacctctctttgtatttcattgttagaattgggccacatgccggttcctgaaccaattcccatagtcagagcattgccatgttctgagtaacttacagctggatttgtggaccagacaagtgacagggagaatgggattcctttgagccaaaaaaacagtcagatcaacgtctcctggggcgtgaggcctcttatgaaggatgggtggacacctgaaagaaatgtggagtactgctggaaatatatgagctttgcatatattaacatgttatttatatattttataaattatatatgaatatatattaatggttaatatatagtcaattaattgtattataatcaatatacttaattataattaacattatatattttgtatattatatattagtaacaatataaatttacataatatacagaaaatatacataaataataaatgttaatgtatgtaacatattaacttacataattaacatgtaatatattcatatgacatatatgtaatatattaatatatattacatatcacacatattacatgtatgtaatatattaacatcacatatattacatataagtaatatattaacatatattaactcaaatgaattaatatttgagttaatatatgcaataatatatgttaatagtataatatatatttaaagctcatatgttcccaacagtaccccatatttcatatagtagttgatatatgtaaagctcataccgggggcacctgggggtatatgtaaatctcataggaagattcttggggctagtagccatcaatcttcaccacgctgcactctgcaaagcttcctagttggtgctacttttttgggcatgccttgttctgttcctttccatggtgtgtcactggagtcattgctctgaagcatgacatttatgatatgacattgatgaaaaatgttaaatgactccccattgtctactggaaaatagcctgacattcagacctctgttcaagcaatcccattttgttcttgcagattcatcttccaaccctcttggaaagtaaagctgggttttggccaaattggttttctactcatgctctgataatgtatgcccacacttttacttccacgctttcatttcctccacccagcatgactgctttccttccctgtatgtgtcaaagttctaagcttgctttcaagatccaccttccattctccctgacgcattgcatgaccactctagtttgaatcaatttacttctattccaaatataaatgtaaatattccgaatgttaaaattcactcattaatatagcatggcattcaacttagattgttttgcaatgttggataatgtctcatttaaatttatctttttttcagtctccctagaagtaaaattagatgcattcgtgattctcctaatgcctgagttagcaccttgcaactcataggtgctaataagtatgttgatatgtgtccgctgagaaaagtactagcaaaaaagcatgataggcacattgaaactgtgaaggtaccatccagctctttgaaaattagtctaaagtaaataattagtacaaacatttactgagaaactactatgcacaggcatggttcaaggttctagaaattgcaacaaagaatataccaagtcccttccatcagtgagcttatatttctagtggagagacatacaataaacaaattaatatttaataaaatgtcatgtaatgccaacttctaggaagaaaagcagagaagggtgagaggacattgggctgatattttgaaggtagggtgaccagagaaggcttctgagcaaagttctgagtaaacctccccgagatgacatggggcagatggaaccccatgagaaaaagccctggagagaagtcttgcttagtaggcttgagagagagccagaaggctagcatggttggagtgcactgatggagaaggagtaataggagacaggattgtcaagggataagggtttggataatgtcagatcttataaggtataccagatgttcagtttaattctaagtgaaatgaatgcctttgatggactttgattagggtaatcatctgacgtgatatatactgtaagataattactttgtcttctgtatggagaagagattttgagggagcaagactggaaggaggaaaaccagagaagaagctattacagtactaatagttcaggcgaagtgtgatggtagcttggtctagaacattggtggagaattgggaagaagcggttgggatctgtatacattttaaggtagaagcaacctgtagagtttgcaatgcattgtatatgaaactgtgtgtgtgtgtgtgtgtgtgtgtgtgtgtgtgtgtgtgtgtctgtattgttgtaaacaaagatgagcaaaaaagaatcaagtaagataatagtggcttctcaaatcaaacacttcatttagtttttgtttttaaaaatcaaacagacatccttgaacagtggacattttaaaacattgttcctaaaaattactaaaaagttccaacattgtttaaaaatactaaatacgtgacaacaattgaaaagcacttagggtgatcatttgcatttgtgccattaatttagacatctttttgtaggtattacattaattatactcaaaaaaaaagtttttttgtgttgaagatcttcattattgcaattgtgaaagaattgaggatattttgacttctgtaatccatatattgtactaatttaaaactcattctgcttggtgtaatctttggtatatcttatgacttacatgaattggaatatggctcctttccattcatgaaaggaaggggaaatctgattgaattagtgcataagaatgagcataaatataaataataaattttttataaaagtaaatattttaaaataataaaatttaaaacttccagtaaaaatgatccattgtgttcattactattaggtatgttttctgtacaattgcattgtttattattttatctgcttagaggaattagtctacctttttccccgcggtagaagtactgcttaaaaaattgatgcatttagtcttcttataccagatttttctaagaaacttgtaacttcatcaaatttattcacttttacaataattttatagttgccaagtagcagtcacttgcccccatttcttaagtaagaaaaatttaagagatagggaaatgagtaattgccatttagaagttgttttctaatgcccacatatctgaaggaagctccatctggaatgccttagcttctagaaacagatctttgcactacatttattttttgtgttgaaatttacctccatgacatctataccaactctgtgcagtaagaatttggtttcaatagtataatagggctaacgttcactggcttccattttatggccaaattaattctattgggtgatcattttaatgcccctctaggagagttatatgtttgtgtatttcttaataacttactactgggaacattttatctatgcattactattttattcattcaatggacgtatagtgagcactatcattttctagccactgtggttggttgttcattagaattttcaaaacagtagtcctgatcgatttctcacatacctgccttataatagggtccagtatctttttttttttttttttgagacatagtctcactctgtcagccaggctggagtacagcggcatgatcttgactcactgcaacctccgtctcctgggctcaagcagttctcctgcctcagcctcccaagtagctgggattacaggcatgcgccaccaggtccagctaatttttgtatttttagtagagatggggtttcaccatgttggacaagctggtcttgaactcctgacctcatgtgatcctcccaccttggcctcctaaagtggtgggattgcaggcatgggccagtatcatttctatgtgttgtttttaattgacacataataattttacatatttataaggtacatagtgatgtttcaatacataaaatatagaaatgatcagattagggcgatagcatatccgttttcttgaacactaatttcttgaacagaatattcaatatctcctcttcacagctattttaaaatgtataacatattattactaattgtaaccatcctgcagtcttctggaacaccagaatgtattcctctcatctagctgtaattttgtgtcctttaacaaatctctccctgacatttttaaaatgtcttatacaatttgagagccaaatgctacagaacaggtggaatttcagtgatccctgttctctaccttctcatctgctttaattctcataatttcttcaacaagtgacaaaatctttcattatgtagccaggaagaaaatgagtaagattctaatttttatgaaagtgccctttcaccaacattttaccagctctgtgttaatagacagttccctattttggtggtagtttgattagagagggaagagtacatgctttggacccttaaaatggaattgactttctctggtgaaggaagtcagtgaaaaagttggctgacaacacacaaaaagaggtgaatttggaagccatcacagtattgctggagataaccctattgactttcccttgggtggtgtcaagcagaactgtgaaggttatcttatgtgatttggatgatgaggatcctcggttacacagatcgaatttctagtttcttctctggctatgattgagtacatatactgatcttctctgggccttggtttctctaactctcaaatgagccaccatatattatagggaccaaaccatgggattttggggtcaaaaatatcctcggtgtaagtatcagctcatctgtttacttcaagtttttttttaactcctttaaaaacttcacattctcatctgtaaagcaaggataataatacacaatctataagggcttaagcaaattagagatgatatagtttaaggatttagtatagttcctggaacagagtaatttctcagtcattggccgcccaatggcatgaattgaaaaggttgagccagtgtctatagttccagaaccattctcaggttctattttggaatgtttatctcttctgtgttgtggctgtggagtaagatccatctggaatgtagtaacgtcaagaaatagcaagttctttgcctttctgtctttgtttcaggaagcacatactttgtaatctgtgacatttttatgctgaaattccctttcttgacatacagactgacactgtataattcagtcagtttcctattatctctgttgttaagcaagactggattttcatcactgggaaagctgttaacagagtccccattaagcgagccatcactgaacattttccttgattgatgctttaagattctgtcactcactctttgaaaatatcagactacagggtctgaagcaggtttctgcaatattctgcagtacctcatgggtacaaaagagacacaggaatatgccacagcatctagatccaattcttagtgaaaattttgttctttcatctgtattctggtcagccagcttgaagtagacacaggcagatgcttggagagtcgaaattatagccgaatgatatcacagagtagttaaataccagccaagctgtggttgcagcatggcaactttacaagccgggcaggttagcatggatgctgtgaaaagtgacccctctatctgaaaaagggttttgtaccttggctggcattagtcacttttccttgtttgatatttacagctttctcttgtcctttgtatcctttgggtaacacaccgtgagtgagagcagaaaagctttccttataaaggtagcaattttattcaagattaaaatgctctatttttccacattacatcaatgagtaccttcaaaaaaagatgacttaatgagggggaaacatgaataaataaacacccacacgtacatacatatgtatgtgtgtatatacatagagaaacataacggggcgagtgatcgttgattattttagcggaggctgtagagggaacaacacaattacatatatggtaatgaagaatgaacaagtaattgtgttgtaatttccctctgctttttgctagtggtgactgttatgaaaagcaggttgttggaataaaaaaaaagatactaaataaagaaccgtagttcttataatagcattttatagtctgtcttttgaaatatactaaaatttttcacaatccatgtttctctgcttttgccaattgtgtttgtgattgttcatttgtgcatagaagtttcagtaggaaaatacagtcgtttttgtaaaggttggatttataagcttcaataaaaacaggctcattcaaacaaaaaagcaatcagattgcaaaatggcaaataaaagaggaagcttatccttataggagaaaaaacgtttaattttaacattatgtttaaatagacaaagagacctactgcagacttttaaagtgttcattttgcttccgttgctgcagttcagcttacagatggtccctacgatagttgctatagaaaccaaacctttttcatcaatctctccctgttgctatggtgtgtttgcagccactgcatgtaaacttttgtataaagtgtcatttatgcttttcatgactgaccttataatgaaacatattgattatacattaaccaacaaagtctagcatgaaatgacacatcaccactaaacacccgttactaagtagaataggtggacctaacattatttgtagatgtgaattgtgcctttgttaaccaggctatttgaaatatcagtgggataaggaaatcttgctctaattgacaaaagcagaatcttttattttctttcttgaaagtgatagtttttcttttaaaatttagtttcttcaaagttaaacctgtcataggattcaaatttcctgctttgtaatttttgctctgacattttatgtgtggccttaggccacaaaatcatttaacctctggatttagtgagataacaaaactatggcatgatagatttggatgtgttaagctctgcgagggcaagtacactacctgttttgtttaccgttatacattcagaacttggtgatatccagacaaacagcctagaatacagtaaacattcaaaagtacttgttgagtaaatgaatatacatgttattgcttctgatcacatatgcattccatactgtactttctgtatagagtcaatttcaagagtaggcttcatttcattttaatgccacaaatatttaatgagttcctactagtggtaaaatgcttcacttcttgctggattccttaaactttaccagaaaaaaaaaaaaaaaaaggtctggctttcatgcccaagactctatattccaaactctctaatgtttatacatttgtagatgtcaagtgttttttgtttttgagggtttttaaaaaaaaattcttaagatctgtatcattgaatagaaatttcctggactttcctttcaacatatgttattaacatgacagttatctgtccagtggttagaagcatggtcctttgaatcagaaagacttgagcattaacttactacctctgcactattgggaaggttacatccctttgctagcctcagttttctcatccgtataatggggacactaatacctaactcatatagttattgtgagaattgaatgggatttataaagtactaagcgcagcaattagcccagcgagcactcgtaaatggtagctgttattgttgtctatatatgcatagaggatgcgcatgactagtttgttgaacagtcaaaaatctgtgaattttactatttttatttccattcaatgcctctaactgtgtgccatgacagctctttcttttccactgggtgagcacattttcttaatatttggtgtattgtttaatgtaccagtcattttggatttaaacaacaaaattctatgcagcttaaaattccattcacaaatatgaatgaaatctgatctccatgacctccaaaccacacttctgagtcttagaattggatggggtccttggcctgatcttcaattctttcttctattccagcttactggagtggagagaagagggtagtgtttcaatgttccctgctcctcatcaaaacctaactcctccagtgatttagatcagaagtcaaggaggcaaagagtttctacaacccatcagagacaggaaggcatctttgttcttgctccaatttgcaagggttccatctgttgatgcttacctctgtggggtgggtccagggagagagaatctacggttttcagtctccccaggccctctccatctatgagaatttttttgtttgtttgttttgagatggagtcttgctctgtcacccagggtagagtgcagtggtgcaatcttggctcactgcaatctccacctctcgggttcaagtgattctcatgcctcagcctcccaagtagctggaactacaggcatgcaccaccatggctgcccagttaatttttgcatttttagtagagacaaggtttcgctatgttggccaggcttgtctcaaactcctgacctcaggtgattcacccgcctcagcttcccaaagtgctggggactacaggcgtgagccactgcgcatggccatcatccatgaggattcttagagacacatagctgtatctcctttgtctcctgaaggcagtcctcttccctgacttcctctctccagatggggcatccactgctcgggctattgcctgggcatccctactatgtccacctcatcctcccacctgtgtattgtgtcacatggagccacagaaacagcagcattgtgcagtcacttctttctctcccattcccctcatgctgtgcatgttccttcttttccccgatgggaccaactgctccagccagccactctctggctttcagacatgtctaaggaaatgtaggagcaagacgcaggctgcgtccatgtacttccctcaaattccagaaaggggcacatgcagattctcacatgaacgtcccagtgtgctccagtcctctccaaaaagcatgctggggggcgcagtagtggtgccttctgcactgcagcttagcaagcaaagtggggagggtaatgccgggctccatttttcgctggaaggtgaagtaagacatgccagtgtaagcattaagccaaccaaagttttaagtccactgttggggagggattggtgcagtagttcccaattatccatggttttctttcaagatttcagttaatcgaggtcaacttgagtacagtacaataaaatattttgagggagagacgacattcacataacatttattacagtatattgttataattcttctatttatttatttagagacagagtctcactctgtcacccaggctggagtgctgtggcatgatctcagctcactgcaacctctacctcccgggttcaagtgattctcctgcctcagcctccctagtagctcagactacaggcgtgagccaccacacctgactaatttttgtagttttggtagagacagggtttcaccatgttggccaagctggtcttgaactcttgacctcaggtgatccgcctacctctgcctcccaaaatgctgggattacaggcatgacctcccaaaatgctgggattacaggcatgagccactgcacccagccaataattgttctattttatttttagctattgttaatctcttactgtgtctgacttagaaattaaactgtatcataggtgtgtatgtataggaagaaacagtatatcagaactatccatggtttcaggcatccaccagaggtcttggaaggcatccctcatggataaggtggggtgggggagaaactatatatcttagttaataagcattactagaatgttacaaaatatattgaagtttgtaacatatagaaatcatgtgtcacttaaatctgtaatgtaaacacctgcagtactgcaaagcttagaaaattgcacacattcatttaccttttgactaatttttgttctttcttttcaaatatatttaacatgtacatgggcatgatgtattatgttgcatgttgcatatcacatagcaaaactttagcttcatttgttacttaagaaccattattattaaaagcatcatattgtatactatatatatagtttctatttgtcaatttaaaaaatagtttacaaataagtaaaaagaatcatcgttatgaaaaaggagttatcattgtaccagcaaaaaggagagtgaattaacagttttgatgtagaattctgcatagtagaagttgacatatgtatgctttgtatgtgctgcttttaaaaaatctcaagtttctatttaaaccctgaattttagaaacctacgaatattagttgcatctttcttgtcagaggaactataaaaacactttaacacaaatgctaaaccctaaaacccaaacaggtaaatgagcccatggactgataagcctttagccatttagaaggagcttcaaaaaggctgttttagctggacacagtggctcatgcctgtaacctcagcactttgggaggctgaggctggaggatgacttgagctcaggagttcaagatcagcctgggcaacacagtgagaccctatctgtacacacacaaaaaacttttttttaattagtggaatgtagtgatatgtggctgttgtcccagctacacttggcatgctaaggtggaaggatcgcttgagcctgggagttcgagaccagactgggcaacatagtgagaccccatctatacaaaaactaaaaaattagtggggtgtggtggtgcacacctgtggtcccagctacttggcaagctgaggtgggaggattgcttgagcccaggagttggaggctgcagtgagccatgatcgtgccactgcactctagcctgtgcaacagagtgagaccctgtctcaaaaaaataaaataaaataaaaagattgttttaaaatgaatctgacgttattcctcattccttattgcttgttcaccttatttgttaaattttcagactggagcccagcctgaaaaaggactgaagtccttttctgtagtcatctcagctactggaaaggcaactcttaagcacactgttttagagaagggctgagcggtagaagatacgacgtttagagagagaaagcccctgaacacgtattaattctaaagaattctaaggaactgatgcgtatacatccacatatgaacccagggcgatgttgagttcttctggtgggattctctggagcacatcatcgttggcatttgatgactgtaaaatcgctggaagttgaatgtgcacatttaaatagaaactaaatgatgcaatgcaaaactaatataatcttttccagattagctgccattccacattacctgcagaactgcttccttcctcttttgtaggtaatgggcttgactgcatgtgaaacataatgtaaatgttatgtcttattaatgcatccaggaaatctgccttaaaaattactttttatcacagaaaaatgtggcttaattttttttaatcatatgccttaggcaaacaatggtttgacggcaacatcacctgcatggagcactgagtttattatttttatttttttgatagatggatatgtttctccaggggctttctgctttaagttacaaatggttattaaattttcaagaaaggtattctcttaactctcaaagtctgtctatttttagacttttgcagcaggaaatagaagtaaggatgtgcttttccagatgtttccagcttgctttttcgtcagctgtgtggttctacaacttgatacttatatttggaataattctgagctgtattacacaggcaatgaaggggtctgtttgaaaatttgtaaacaggttattttttcacttataattaaatatgtgttgctggtttgggaagaattgactatattagctattgatttttttttatatgtagcatacccaaacttgatgttttgaacattttcatgttttaagtagtgccgacaaatttgcttttagggcaccataatatggtcttttttgactttagaaattagtatttctaaaattattgattgtcttgagtcatttacatgttgaatatttctctggacaggtttaataggacaaaccaaacgtagtccaaaaaataaaattctttcaagacctatatattttcgtaaagataaaatactagttcagatagtttgtcattgacaaactaccaaaagctccttggtggatgtctagattttgaaatggataggagaaagaaaaggatgtatttctgaatactactgggcccttaagactaatttttcagagaatctttgctaaggttgagaagaggtctccttttgagttacaggaggagggaatgtcatatccccgtttgaaagtgaacagctcttcctagccatgccacatttccagtggttccacttgggagcgtggcaggacagagttgatacctgccaggtgagtaatgaggcttttagattgcatgaaaatacattcgtggtggtggctatagtcaatcttaagccaatctaagtgtgtggaagagaaaacgcagctccagaatggagagaaatgtatatacatgcaggtacacgtgtgtgtaggtatacatataacaattttagagtagttataaatggtatgataattcattgagattagaaactgcataccactctttatataactgtctttgaacaaaggtgaagaatggttttttttcccataggccttagaagctggtgggggttggggtgtggtatgaatctgtagaggcgataaatagaatgtcgtagttaagaacccagggattagggagaagacctggttggattgctggttctgccactctccacctgtataacgctgagttatatttatttgtctttctaagtctcagtttccttatctgaaaattggttacaataaaggactctacctcctagatttattgttagcatcaaatatagtaacattaatgtgtctttaattattacagaccccaaatctgtaagtaactcaaggaatgtttcctctcaacctgtctcatcattgagatcaaggaacttaaatgcttttaagtaaatgtaaaatatgtataatatattgcatgcacattatggaaagtggagtggtagttgataagcgtatggcttttggactcagaatatgagtacagggattatgcatttaccatttcttatctgcatgccttcagacaagtttctcagcctttgtaaattcctgcttcctcgtgtatacatggacaccattggagtagctactttgtagaattgctgtgaagattaaatgagagcatctgaagcactgagcatgaagctttgctcatgggaagacctccatgactattagctattatttttgctgttgatgttgtaaacagacttggaggcggagggctatgcagtaagttgatttgaaggagagcagtagagggtgagagaaacagaggggtagagaaagaggaagatggaaaagagaaagccgggtactcagtaagtaggttttgaagtgcagggtcaccgtgtttgtgacactaggcttggacattgccattgtctaggaaactagtctttgaaatgcataattccccattctttatttaatcatttatgagtaagtagcttgactggttctatttttaaatatttatcattcaacttttaagatatacaaaaaggctcaaagaataataaagtaaagcattacatacctatcacccagcttcatgagctgggtttgtttttattgccaatagagttgcttccctttgtgtagcactctttcctacttgcagactaccttaaatttcttaaaccagttctgtgagttttaaaatatttttattatacacgtgtatctctttaagcaatgtatagtactgagtattcttagatgttttcctgtaagatgtatttacagggttcagatttatataaatagcggaatactgtagtgtgctgctcacacctctcttgctgctaaacctgatggttgtaatttatcagtaatgttacacatggagcagttcattcattttcatgcagtagagtattccgtggcgtgaatgcgacacaattcacttatcacattttctgctgacagatatttatttacgtggtttctttttttttttctccccattaccaacaatgacattataaatatgcaggtgcattagttctggtacaaacgtgcagacgtttctctagggcagtgctttctcaatcttttctgaattatgacatatgtagaaaataatattttcagggtgttcacagctgtatcaacaggcccaaatcctccaggcctcaggtgtttgtacagctgaatagattgatatctcaggcacacctacaactcagtcaatcagtggggaagttctgcttaaggccgaccttggagtggaatggcttagttgtacggtgtgcatatttttacctttactcaatattgcacttctccaaaatcatggtgccatttttacatctcaaccagcagcatctgagttctcattcccccacattttatgaactcttggaaatattttactttcaccattttgtcagtctgatcctcttctgcttttataccttgacttgataccttttgccatatattgtgtttttttgctttttatattgatttgtagaagatatttttatatacttactgtaatcctttgtcagttttatgtgttgcaaatatctacccccagtctatgagttggttttccactgcattttcatgaatatgagtaccaagttgtgatgttgtcaacttgaaccattttttcctttgttttccatttctcatcttgtaagaaatattcttttatatttactgctaatatttttttaaatgtttgcttatttttgtttgtaatatgaaggaggaatctaattttaagttttctatttggataaggaattattccagggtcgtttataaaatgttttttaccccaccacagatctgcaagtgcaaccctgtcatatatggaacagctatttgttaagtttatttatcagaattaaacataaatcagaataaataaaaacgtaaaacctggaatccccccttctgcccataaaacaattacaaatcaccagattaaaagaagacttgggttctgagccaaactggaagtgagagccctggcaatagttaattatgatatatgacctcggatcaaatgtgttagactttttgcctttgagcactggtttaagtttctctgccttgtgggtttgtgaggaagcacataaaggatgtaagggaatagaggatcccatctctacagataatcatctggcctcatgcaaccagcatgccacttgttggagaagtgtgttcaaaactcatttctggttcgtgcacctgtggcccttggcggcaggtcctgtaacacacagcctgaccactgatacagaggaggcccctgggactgctttccttataagggtcctgcgccttggtagaatttagatttggagttgcagagactcaactcaggaaagcaagtctttaacctctttgaccttggttttctcacgtgttaagctcaggacgtggaaccggtgatttctcatgcctttgatttttaagagtatgtggaatagaattgtgcataactgtgaatcacagtcactgtagaaccacagggctggctggtagctttcggaatctgttagtggctttctctttgctctttgaaagattggtgctgttccatttcatgatgccagaaagtcatgttgggaattggtgttaatttttctgggctcaaaaaatcctgtttcttgactatttttcctacttctttccataatgtgagctattctgcaaaccaaagcactttagtaaaactctctactactagaaatgtgtttaacattattggtgtgttttcaacaatacacatcaaactttgagagccactcttgtgagtgaaattgctgtggagtatggagtgagaagttattctttgatctattttaggctacttgcaaagaaatataatagaatggctagaagagccatctctggagtcaggacagagtatctgtggccaagaattagcaggatgaccctgtagaagttattcacataactgaatttttaatgagataatgcatgtaaactactaagttttagatggtatagtatctgatcagtatacggtagctacttattatttgaatatgttctctaattcctgattgatttgtatttattaaagattattctacagattcaacttgtgctgatgtctttccactggctacagaagattcccagtttacttcacgtatctgaaaaaaagaatttcttatttaaatttacccctacacaactggaggcaggggggcagtgtgtgggaaaggtgaatttttatagaagtataagttcttctgaaagggacccaagctaaagtttccacgacagggtttcaaattcattttttaaaacgggggcagcacatcccggttctgatttggaaacaagcattgctgcctggaatggattaaaaacagaagatctctacttctgcatccatttgtaccttacacagggatgcttttaaaaatatttaacaactgtgactgggtgcagtggctcacgcctgtaatcgcagcactttgagaggccgaggcaggagtatcacttgaggtcagaagttcgagaccagcctggccaacatggtggaaccccatctttaccaaaaatataaaaaattagccgagtgtggtggcatgtgcctgtaatcccagctactcaggtggctgaggcaggagaatcgcttgaacccaggaggcagagcttgcagtgagccgagatagcaccactgcattacagcctgggcaatggagtgagactccatctcaaaaaaaaaaaaaaaaaaaaaaaaaaaaattaacaactgtatggcgtggcaacagctggtcggggaggttgcctaccattgccctgttggaacagatttgtaactcctttaattgtaggatcctggtgagagtttggggccgttgatgtaataggacacatttgggggcttgtagcagtggctgtttgtgaattagcagggaagcattttggtgtggcaacaactgggatggctgtgcctgtgtgtactggctgaatgtccctgtgtcatgtccacgccagggattttttgcccagtttgtcatagaaggaaggtagaatgtaatgcttatgctcacgataagagtaatacgaattatttacatggatttagttttttagaaaattattggctaaaaatcattgggtcttattggttgtaaagtgctgaacccactgtgcaaaaatcaagacacttagaatacaagaaatactgagactttttcccttcacggagattcccagtatggtattcatgggggcagtgacatctagcgttccctcccaagatagcaggcactctgaatgaagacagtgtgtttatttcacaagtagcctacaaactcagttatttcatccagggcctgaattttaccatttttgaaagtacgtcacattcatctaagtgagggggcctggtttgttccaaattttcatgaccatcggagcgggtctgacggtgagaccagacattttgcttgtatttctggttcagctccagctagggctgaactcagggggccccctggaaatggggcatttctgggaccaatctgaggatttgcaaagaattttaagtaagcacaaaacttttgattaaaaaggagggcacaaactgaagcccagcctttgtttctaacacactttgacaaaatggtcattttgaattagatatgattagaaacctcttaagaaataaaaatgaaaactcgccaaactcttttatggctatgcatgttctgtcctttgctgctctgtgtcagataatttttcttatacttgggatgtcctgaatatgtattttatttgtgctttttgatgagcacagcactaaggaaataagcgaggtgaagaatttaagaaagcagacggatctttttaggaggctataaattttccgcgtccctccactgcccactcccaaggccatgttgatgtttaagagaagcctgtggtctggtttttcagtctcgtgttggtgccaagtcagtgctttcattgtttcttactgagatcgggtctagatgctctgtgaacaattgtgcttatggttatgtagacttttagaatccttggtgattgtcattctataattctctcctgttattttaatttaaagtaagtcttgaggccaggtgtggtggctcatgcctgtaatcccagcactttgagaggccgaggcgggtggatcacctaaggtcaggagtttgagaccagcctgaccaacatggtgaaaccccgtctcaactaaaaaaaaaaaaaaatagccaaatgtgttggtgcatacctgtaatcctagctacttgggaggccaaggcaggagaattgcttgaacctgggaggtggtggttgcagtgagccaagattacaccattgcattccagcctgggcaaaaagagcaaaactccatctcaaaaatagcaataataaataataaaaaataaactaagtcttgaatgcttctctgagattcttgagtataagcactatctggtaaagtccatcaaaagaagagcatctctgtggatcccttgagcccctttagtcttaagcaaaccaaaaagctacatggtgattattatgagtggacatatcccacgtaagcatgtacaacagtcttaacacctgatttcattagatatggcagtaatacagctctagaatgactctatttcggtggtttatagacacttagtttttgtaaaacacttgtttttctttctttgtttttcagtgatagcttgtgcagaagaacataaatgcaaagcttgttcattgagactggagagaggaaggccagagtgccatctgctggctccttcccattctctcataacccctcatggcttttaaaaaatccattatgtgaaattcagctattccttaatctctccaaattccaaaacagaggtctcatgaaaaattccttaaaagcaagcataaataaatacattgagttatacatttctgcccaggtcataggaccaatgacaacctacatgtgagaccaggtcagaatggaagtgctataagtatcttatttaaccagttcatttatttgggtcaagttgaactattttctagcaataacccagagatcctttctaggatataaatagaacctttttattcatttatcttttcatacgtttattgaataaatatttacttcacctctgctctaggcaggcatatgagatgcattggtgagcaaatatttcttgggaccctgtgtgcaccccaggaaatccccttcccacatggggcttccattttggttggtagataaagctataaacaaatactataaataagtcggctgtgcaagctggctcacacctgtaatcccagcactttgggaggccgaggctggtggatcacctgaggtcaggagttcgagaccagtctggccaacatggtaaaaccccatctctcctgaaaatacaaaaattaaccaggcagagtggtgtgcgcctatagacccagtaactcggtaggctgaggcaggagaatcacttgaatccaggaggcagaggttgcagtgagccaagatcgtgccgctgtactccagcctgggcgacagagtgagactccatctcaaaataaagaaaggaaaataaaataaacaagtcaattgtttagtatggcaaaattgtataaatgttatagaaaaaaagaaaatggagatgagcataagggaagtcagagtgtgtatttccatcttaagcagggaggtcaagatggtcctcactgacagagtgacatttgagcaaaacttgatgtgagaaaataatcacatgcttatctaggagaacattccaagcagagagaacagccattgcgaaggcctaaagaccatgtgactggtgtgttcagatataccaaggccagtgtagctggagcagaaagagggaaggaggagaggtgggaaggggaaccaggccagttcatgcactaaaatatgtcttgtgaccctgtctccaccccaggaaatgcttgcccctgcgttacccttggtagccttttcttggttgagatggtggtgcatgctttagtttctcagtaagaatttcacactactaggaagagccccttgtgtcttcggtataatactgggtcatgactgatatgctcttcattccctgtattatattttgcaggacattctaaaggtttgggggagaactgaattctaacagatggtgcacactgctgttgtgatcacaaaggcctgaggcagaccacttcagtctaacatgtcattaccaatttaatagaaatatttcttgttggactagtctctaacaaatgtacattgtttgtgagaattggtcttactgaattctgaaggtatttttgtccttactggagtgacagcataatattttgacaaatcaattcaattaaacaacctactgattaagtcagacagacgaactgatttgttttccagattattgattgccatcactgaattccatacaatttatttgacatagtaagagtatagattgttcacaatctagatcccaagagacattaaatgttcttggttataacatttttattctgtagataagaaaatggaggcccagagatctgtatgaatgtgtatgtgtagcactgccattcaattagctgtgtgtgtgcatgtgtgtgcatgtaggtaccttatgtgtctgtctgaaatttatctgctattcaaaatacttctgggcagggcacagtggctcatgcctgtaaccccagtacttttgggtggatcatgaggtcaggagattgagaccatcctggctaacacagtgaaaccccgtctctactaaaagtacaaaaacttagccaggcatggtggcacgtgcctgtagtcccagctacttgggaggctgaggcaggatcacttgaactctggaggcacaagctgcagtgagccaagatcataccactgcaccccagcctgggtgacagaatgagactccatctcaaaaaaaagtacttctggccaagcacagtggctcacgcctgtaatcccaacactttggtaggctgaagcagaaggatctcttgagcccaggagtttaagaccggcctgggcaacatggagaaaccctgtctctacaaaaaaatttaaaaattagccaggtgtaatggtgtgcacctgtggtcctggctgcttcagaggctgaagtaggaggattgcttgagcctgggaggtcgaggctccagtgaaccatgatcatgccattgcattccaacctgggcaacagagcaagaccctgtctcaaagacacaaaaaatacttctacctccagaattcggaatggtatttttccattcttgtcacaagtgaatttcaaagatttgctggttataacatgttcctttttttgcctcaaatattaaatgactcagcagtcattgttctctgagggtggggaatgaagtgatttgagctggtgatgaaaaataggagagaaccagatgacctgataattcagtttccatgtgctgctggcaaagacatttgaccttctgagaaaagtcagcctccaaagactaaatattgttaatttttaaatatagttctagagaattcttttcctaatccttttactgtagtcctgttaatgcctatagccctgggacaagttgtccagcaccagaagtggacttgcacagaggaacatattagtaatttccatctggctctgtacatgacttgtagattaaacagccaattggggcctcctttagaatacaaaaacttggggaaattcaactgttatatattctagtcattttttacacttataattccctcaacttcaatagcttccaactgttattcatcttatctctggctttctggcttttctctggcaaatctttcatttttttttttttttgagacagagtctcactctgtcacccaggctcaagtgctgaggcacagtctcagctcactgcagcctccacctcccgagttgaagcagttctccgcctcaagcttcccgagtagctgggacagatgcccgccaccatgcctggctaatttttgtatttttaatagagatggggtttcttcctgttggccaggctggtcacgaactcctgacctcaactgatctgccctcctaagcctcccaaaatgctgggattacaggtatgagccaccacccctggccaaatctttccatcttaattcctcttctcctttttttattttttaatatatatatatatatatatatatatatatatatatatatatatacacacacacacacacacatacatatatatacatatatatgtgtgtgtatatatatatatatatatatatatatatatagagagagagagagagagagagagagagagagagagagagagaaagagagagaatcttattctgtcacccagactggagtgcagtggtgtgatctcagctcattgcaaccctcccctcctgcattcaagtgattctcctgtctcagcctcccaagtagctacgactacaggcacctgccaccatgcccagctaattttttttaatatatatttttaacagggtttcaccatgttggccaggctgggctcataatcctgacctcaagtcatctgcctgcctcagtctcccaaagttctgggcttacaggtgtgagccaccgcacccagccttatctgtgtttatttctttagactagagcagaggcccccaaaccccaggcagcagactagtactggcttgtggtctgttaggaaccaggccgcccagcagtaggtgagcgcctggcaagcaagcattgcagcctgagctccacctcctgttagatcagcagcagcatcagattctcataggagcgtgcaaaccctactgtgaactgcacgtgtcagggatccaggttgcgcgttccttatgggaatctaatgtctgatgatctgaggtggaacagtttcatcccaaaaccattccctacaatcccccctagtccgtgggaaacttatcttccatgaaaccggcctctggtgccaaaaagtttggggaccactaatgtagagggccctaaatggatgaagtttgaatggttcccttttatagaaaaatacaaatactcatgcttgtgatctaaagaaatcaacctggatgggggctgggcagttctgcctgcctggctcttttctgtagttagagaggctcagagaagagggaggagagaagggcagggggcagccaggccactttatgcctttggtaagaggttcttttgaaaggtattcatctttttcctcgaatcttaagaattttcaaaacttgacacctgcttccattctagcgtgactatataaattcgttccaaaggcaatagcagtactgttgattgtgtcatggaacaatatgggagttcagaattgactgttactcatacaaacactcacatctgctaattcctggacctattactgttctttcagaattcattacatagttcacaagtctcagtttaaaaaaagcaccaggcatggtggctcatgctggtcatgccagcactttgggaggctgaagcaagaggatcacttgaggccaggagttcgagaccagcctggccaacatggtgaagccctgtctctactaagaatacaaaagttagctggatgtggtgcctcttgcttgtagtcccagctccttgggaggctggggtgggaggactgcttaaacctgggaggtgaaggttgcagtgagctgagattgcgccactgcactccagcctgggcaacagagcgagactgtctcaaaaaataaaagtaaaaaatgaaaacctttgtgttcatgagcactgaaaaccattttaaaagacctttataaattcattgcaaaagaagtaaaatgtttgaaaatcatatctttctctcctctagtatagttttctttttatccatggaaaccaatccagaattttggaaggcattttgtgttctgtctttatcaaaagcttgcagtgtttccttttggaaagtagcattggcccaattggtattgaggtagtttctctttatagaagtatttcatctactacacaaaggagggaccagagaattaggatttcaccattatgcagtcctagagattggctggcaaacttgccaaagaaaggcagtgatatcagtagttgctaacgttacaaggaaaggaagaacctggcagtgtgtatccctggcaggagtacacaatacacctgtgacgtgtcctgccacattcacatcacaatccgatccaacctctagattgaaacagcagcctacactggaatatgttaaatgaccacatgccgaggcagaacccagattgtgtgaaattctgtaggacaaatgaccagttttcttttatgaccccattgctaaggggacaatgggaagaaatggggaatctgcagaggaaagaaacataagacccagcaaccagttgcaatgtttagaccttatttggatcctgatttaaacaaatgattgaaaacacacacacatacacacacacacacacacacacaaattctgtgagaccctctgcgaaataagaacacagactggatgtttgctgatattaaagagttactattttttgtttgtttgtttgcttgtgataatggcttttgttattaggttctatttaagtagtaccgatcatttagagatgcctgctgagatattcatggatgacatgcaaaaactggcattggattcaaaagcacattgagcataaaagatgtgaaatggccaggcacagtggctaatgcctgtaatcccagcactttgggaggccgaggtgagtggatcgtctgagttcaggagttcaagaccagcctggccaacatggtaaaaccctgtctctactaaaaatacaaaaagcagttgggcgtggtggtggacgcctgtaatcccagctacttgggaggctgaggcaggagaatttcttgaacccaggaggcggaggttgcagtgagctgagattgcgccattgcactccagcctgggcgacagagtgagactccatctcaaaaagaaaaataaaagatgtgaaacttgcctcaaaagtaagctttcattcctttgttaactttgttgctttgagtgttctgtgtgttacataaatgactcaaaaatcccatctgacacaactccagaaggctttctggtttgctgtcagtcatgggcatatttatgggcatgacacacacacagatgagccatttaaataggattttgagcattgctaattttgcttcagaaagatttgtttgattttgatgccttttgcttaatccctacatatctggtcttcaaatatgaactattaaatcatatatccaacaccttctatatatgtaatactgaatattaataattggcataaataattacaactccacagcactgcagaagagaatgtcattaaagaggctagtcagtaatatacatccagccaatgtttgttgaatgaataaatgaaatttcatttagcatatttaatttttgtgaaagcaaaagagtattacactactaatacattcctcttgttccatgaataattattgattatttaatgtattttacacgattttcaggagcaatcgttatagtaaaaatgtagtagtttttaatacttatgcagaaaagcacataaaacagaatgctcctatgttcccttctttttacattaggaaacatttttttctttatttaaaaatgaaatttttcagtataaactattatatggtaactaacaaaacatttaaaagtactacagtctttttctttcatcaccagatacaaccactattaatattttaatttcctttttagtttttaaaaataaagctgtaataatattaaggagaatttttgtcttcaatttcagagacagaatcctattgcagaaattttatttttaaattttccctttgtgttgcttttccccccaataaaacagaaactgctaggctcttagaaaatgggaactcttccatctagtgaaatatgtacagaaaaatagataataggcagcctaccccttctactaacatatcactgcatcttaaactaaggggtctattttttttttttgtcctgggaaaagtggactcattttcatatctagaattaatgaggtttagtttgataaggactgcttttaggtggccctagagatgagtaataaggacaaattagatataaaataaaatattactcttttgcaatgtttgcttttcctaaacctcttagcgaaagtctctgctgtttcttgtcttttttggctagaatggtttctaggactatgaacaactgctttaaacacagcaaactttctaactcctttttatcaggcttaaatatgattaagacctaccttccgtgtgccttctccctcctcttccctccctctttcaacttctcccttcaaaaaaaaaaaaattccaatttctttgtagtctcaaagctcagctgatatgaaatcgattttgggaagtgagtttcatacaaaattaaaggaaatccattttattgaagaaaattacccggctccttaaagttcctcattttgtagctactttatactttccaaagaatttctttctctaacccacgaagggttgggacagatgctcatattctcattttaccccaagttagttagcaacttggatcaggttaagaagctcgttctgatagaacctggatgagaacctgggccccctagtctcctgtgtcagagagtaggaggttatgcttgggaacagaaggcctacgtcccacaaccatgaccagcccagcgtttgtgggagttcagtccaatatagaatcactctttcaaggtaataactttactgcgggcttttacggcctgccgagccaaatcgaagtcatgccatctccagattgcaggagcagaaacaggttaaagggcctcagtcctcccttaaggtggcctaagctccgcctcctccctgctacatcctgacaggcacattcatctatacctcagcctgtcaatttccactccctttttcaggatgagcctagtgtggacaccaaggtgtccgcgtgtttcgctctctatggcccttgttcttttctgatgtcagccagccctctgtttgctcaaggccaaggctacataattacttagcatggacatttcatttccttcattttatgtgacctgctgtttctcaggcttttggctgcacataataagctttttttttttaaagtgatctattgtatttttccatgttctgttgagctgggaggagtcggcagaacctttttaatatcagatattacaaaatccctggcagaggatgggggatgggggagggtaaagcctggagagacagggctaagcagcttaaaaaccacaccactcacttccagtttattaagtccctacttgatgcaaacttttcgtaggtcacctcaaaatattacaacagcctttcatgataaatattagatgccccattttacaatgtaagaaactgagggtttaagaaatatggcctgggtccaggactgaaccaggattcgtgacaccacaggcaggctctgtgttagtcttcattcaaataattttctctctctcttttcttttctttttctttcttttctttcttttccctccctccctccctccctcgctccttccttccttccttccttcctttcttccgtcgtttcttccttccttcctttctttcttttcctttctttcatctttttggcagggtctccctctgtcacccaggctagagtgcagtggtgccatcatagctcacggcaacctccacctcccgggctctaatgatcttcccacctcagtcaccctagtagctggaactacagatgtgcaccatcacacctggataagtttttaaatttttgtagaaatggggtcccactatgttgctcaggctggtctccagctcctgggcttaagtgatcctcctgcctcagccttccaaagcactgggattacaggtgtgaagcactggacctggcctaattttcaaatattaaagacatgttcttagtggagggcaggctagcatgatgagagatgcttttttttaattttcttttcttttcttttctttttttttttcttgagacagggtcttgctgtgtagcccgggctggagtgctgtggtgtgatctaggcttactgcaacctccgcctcctgggctgaagtgatcctcccacctcatcctccctggtagctgggactacaggtgtgtgccaccatgcctggctaatttttgtatttttggtagcgaagaggttttgccatgttgcccaggctaatttcgaactcctgagctcaagtgatccattcacctcagcctcccagagtactgggattacaggtgtgagccaccgcccccagacggatggttttaagtttctattgactggcatcggctacttcagcagaagctggatccataatgcattttgttagctttgtaagagttacagtgagatctgagttaactattccttttcccaaattaccctagtgatgttttaatgctccttataaaccagtcccctgctgtggttccttcatttggtatgaccccaggctacacagccagtaagaggcagagatggggatttaaaacctgatcttcctgtttgttgcttctacgatctgccggcacttcttgagattcatgagcgtgtggccgtatgatcactaatgaattaactcaatcaatatcaattgaatgtctattctgtcttacatttgtatactgtttaatggtttacaaacagtttttgcaggtataatctcatttaaatcttacccagaaaccacaggaaagaagtaagccaggaaatatcaaaccaccccaagacacaggcagaatacagccaggattttaactcctgtcttttaactcccagttttgccacactgtacaggtctgcggttattggtgtctctttcagatgttgctactatccagcctgggaatatggaaaaaaagtgggggaggagggagcgagggttatttagctgcactttcaaatcaaggagaatggccacttaaatgagactatttcttcacccatagctctgaggatgacattagcagcccacattagaggcagaaaaagaaatctcccttctgaaaagaccataatgataaaacaacacgttttctgaaatgataggaagaattttatgtcgaatatcgtaatggggtcagtagcacttctcagaagggaggtcagcaaactgggtcttggtgagtgcatcagatcaaagcaaaagaaggagaaggggcagtgccttctgtaccgagaggaggagcagaagcacaggcatagctgtgatccagaagcgcagatttggggcccctggttgctggatggccagggggaggatttggtgtgggctggggagtggctggaggctctggaggcttccatgtcagagggtatgcagtcaaagagagataggagaaaaaaaataccccagctcggaatgaactgatggatggaaggaggaggaaagcgcagagatgggggtactaacgttatttcaattcagtagtgttccatgaaaggcacataaaggcaaagcaaacccaaatgccaaaggagctgagaaatcaaagagacagtttgttggaactgggtgatttattgagggaacttaacaacagaaaggtggtcttgggcggccgcaagacaggcagatctctgcgctgttactttccagacccagcgcttatctaccatagggaaagggagtatgcgctccagcaaggtgattaaaggcaccctccagaatagacaagtatgctgcgtgcctcaccgcctataatttgtgcagtgacgttaaggttgacatgttgtcatacaagagacagtaaataaagtaggaatcaaaaggcatttattggactggggctcatcagaagtcaacatggtgaattaacatccaagatagagtcacttttgtctccactccaacatcataaatttgatgattgagagagtgagaagatgctagtgctgtcttcagtgcatgctctgaaaggaggaaaaaaaaatttgcagtcaacatttttacattctttcagggtaggggacagccttttccacagagtgtcttttggtgtacaaatgaaaacctcaccctcaaaaggttgggttagttgatggttcatttggggggaaaaagaaaaataggccggacgcggtgactcacgccttgtaatcctagcacttagggaggccaaggcgggtgaatcacctaaggccaggagttcgagaccagcgtggtcaacatggtgaaaccttgtctctactaaaaaaaataaattcaaagttagccggatgtggtggcacatgcctgtaatcccagctacttgggaggctgaggcaggagaacaatcgcttgaacttggaaggcagaggttgcggtgagccgagatggcgacattgcactccagcctgagcaacaagagcaaaactctacctcaaaaaaaaaaaaaaaagaaaaaaaaaaagaaaagaaaaaacataatacattgtttttaggcaaagatggaaagcatcttattagtcttaccagacatgaaagaatagtgaaggatgtatcctcaaaagacaacctcctgtatttgaatccaggtctttcacgtcctggatgtgtgatcttgtacaagttagtgtcggtaggacagttggaagaacacatgggacagatatcactcaatgacttgcagagacagcctgtgtcagttttgttgtgagtggctcgtttttaccctcttccctcttaatggattttttttttcttttgagacagagtttcactcttgtcacccaggttggagtgcaatggtgcgatcccagctcgctgcagcctctgcctcctgggttcaaggattctcctgcctcagcctcccaagtagctgggattacaagcatgtgccaccatgcctggctaattatttttgtatttttagtagagatggggtttcaccacgtgggccaagctggtctcgaactcctgacctcaagtgatccacctgcctcagcctcacaaagtggtgggattacaggcatgagccaccgcatccggctctcttaatggatttctttgcagttctaaaaagcattgttacagcaaatatatacacaagcaagataaactatctgaactgtgtttcttatttggtcatgtaagtaatgatagtgtaattagtgtgagaaattagtattatttattagtatgcataatattagaatattaattaaggaaaggagatcagcatgttggcaatctgaagactaaatccataatttcaattacatgattttatttattcttataaaacaagaatcgttattcccatattgaggggttgaggcagaagttcaaaactttagttgtatttctgcttgggaaaatagcagagatctaaaattagtcttattagaccacagatatgtacccagccaaatttaatgtgggattttaaagttcatggagttaaatagttcaaagtagcactgtacaaagcaaatagaaaatgcacttttaaacttttttcaattttgcttggtaagatatgaaaatcatttaaggaatgtatttatatttttatgataatccttaaaatatttagcagcatgaaaaatgtattaaaatattaacaaaatgacaggctttttaaaaggacagttctttagtaggtatcatatttgttaaatcaaaagaaaacactcttctatggtaaacagtcctaatttttagctatagattcatatatttataggttggtttatagttatgtttgtcaatgaagtattatagctatgatgttagagccctttttagaaggatgtttatggtaatttttatgtagttaaatagattcaaattaagatgtactacggtaaaattacatatggcattactcctaccatttggagaaactggaatatgccatgcaacctttagtatcgaaactcgacacccactttcaaaacagcaagcatagagaaatcttgtgatttattcctccataagtcagcctcatgaatcctggtgacagcaattattttgatctgaatcactcagtgaccaattcttagttcactgattgcattccatgaatattacagcatcatctgtacctaacataggaaattattgacatcatattttacatagttggttcaaaagggctaactcattagaatgagggagacagagagagcatccccaactcccttgttctccaagatagaattgttagaagaaaaagtaatagaaatgtcagaaataaatcaaatcaacagcatacatttctgcagcaatgaactttccttgttgttagaaaataaaagcaagaagaatgaaccctctcttctacagaaaacttcttctttcacactcaagttgcctgttccctcgatcttttttttgtactgttattaaacacatgaatataaattcatatggggaaaagtttatagaccatggtatgattggaactagtcccagaaaataaaggcatctaacagcatgcatgtacagtatgtgttgttataaggcagttccttgagatttaaaaacctcaagatatgtggtactaaataggaataaggaacaagaatgaaaggaaggtgagaaaaacacgagttttctcttggaaaaatctataaatgattactgaagtaaaatatgtcattcttaaagaatcatagacatttagaaatcagacagagtattaagaatattaaagatcatgtcaccaaaagtcctcacctcttactaaatggggagacgtattttatttctttaatgtaaatgataaatgatcatttcaagtcccacatgaggtgaaactgaccataagaaggagatcattttttgtagcttttttttttttggtagcttctagttaatacttctatacaagaagggattaaaatgaaccataaattctttccagacaaaaagaaaaacccagaaatttctcaatggcaatgtgcatattttgcagcttgtgtcagttaggggaggagagaaggaaggttagtaggctgaaacgaaaggatgcgtctcagtgttttgtgtattctaatagcatgtacagaaagaagtagccctggctaggaatggtccacatgcaaactaaaaagtattgccctacatcttaggcctttggttgccataatgcatggcttgtggtatcatgttcaactcttttttcttcttcttcttttttgagacagcgttttgctctgttgcccaggctagagtgcagtggcccgatctcggctcactgcaacctccacctcccaggttcaagtgattctcctgcctcagcctcccaagtagctgggattacaggcaggcgccaccacacccagctaaactttttgtatttttagtagagatggggtttcgccatgttggccaggctggtctcaaactcttgacctcaggtgatccacctgcctcggcctcccaaagtgctgggattacaggcatgagccaccatgccacgccatgttcaaatccttatgtcttgtgtatctctttatgtatttgaatcctcttcccaattagactgcaatctcttttagagaatgtggcttattgttatcacctgtttcttatccattgaaccttcactggcacataaaatggcgccttatagaaacttgacagtacggtaagtgattgattgacagctgtacctttaaaatagaaacttgctgtcctggatctatgtgattcaggggtaaagcatgctgaagacttaagttctaaatcagattcttgtttgctccctgagtctctctgagagttctaattgctcttttattcaagactcattgttcactgtgtatgtctcaaagtagtttcagccctcatcactcccctgctgaaacccctttgtaagcaacaagaagtatttcttttcttttgtacaactcttagcagtgattgtgataaaatctgtataaatacatatttggaatgctccagacctccatgcaaaatgtactaacaccttcttttggaaattgtcctttattgcttttattttccttccccaagcacataaaaatgaccacaaaggtatttatgtgaaacattcttagttctcttctgaaggtaacaatgatacatactttctgatttgtttttcttttggggttgatcattggaggaaatatttaaaaccatagtgagaagaatttgccttaaggaaagaagatataataatatttctaacagtgtccatggcactttatatgtaatcactcatttaattctcatgaccaatctattcactagatcattaattattattattattatcattagcattttgcagaagagtgaacttaggaacagaaagaagccaagtaatttgttcacagttactcatccaagatctgagcacagaccgggctccacaggtcacaggtttaaccgtgaaccagaggtttaaccgtgtagccttcttgacaggtaagaaaggtataggaaaggaataattgaaatctcaaattcatggtttgcagtgtttaatacagtgagaaagttgattgaattgtctgtggctctttaaaaatatgctttttgggggtcagaatgatactaatctcttcctttaactagtgaccttagagtaagtttgagttatcaggttgcatagctgagccacgttatgtcagctgtgcgtaaaatttgctatcataaaagatatgaactgttgtttccattgctattgcaatttttggaaacagttttttaaaattcttttttgtgtattcgttacaagcataagtccaaatatcccagtatcttttgaatagcttagagaggctgggtgcagtggctcatgcctgtaatcccggcattctgggaagcctagacaggcagatggcttgagccatctttcaagaccagcctcagcaacatggaaaaaccccaactctacaaaaagtacaaaaaattagccgggtgtggtggcacacacctgtaatcccagctactttggaggctgaagcgggaggatctcgagctcagaaggtcaaggctgcagtgaaccatgatcgcaccactgcactccagcctgggtgacagggcaagaccctgtctcaaataaataaatagtttagagagcttgagaaaaaacatagatgtattcctcacacatacttctgccttgaaattgatgagagtctaggacagggcggcagataagtccaggtatcatattagcatcagctcacctgtctcaagatttactgtcatcccagaggacactgacgtcacacaagggagcttcctgctgctctacagtttatgcttgaggatgggacacttaagtctcctctctccagccacgagccatattgccacttttctatgtttagtgaccttaactggtaatttttttttatcacttccaaaatttgtaagcacttgagacttgggagctagtctctagtggaaacatctttttttctctctctctctattgctctgctagctaggtttctttttgttaggttaaaaaaaaaagaatgatgttcttattttttaaaaactaggtactgcgctgagaattacagattggggtttgatcgcaagctctgccaaagctgtgaattgaagcaaatcacatcagcactttgaacatctttgttgttcgaagagccaagcaaatattgaatattgagtgctagtaggtaggtattgtgctgggtgcattgtctgtctgaacttttatcagcaggcatctttcaagctcccgctgagtgtgaataaagtactaggctaggtagtgtggggcacaaaagaataaaaaataagatccccgctcccaagagcttatttatcaacacacgaatagcctcttttaggagggtcagccagtgtctgagccgtgtagagaaaggtcacggtcactgagtgctcagtcaactgaaatccctcaaatctccagtatgttcctgctcagagcataggcgtcccctactgttgcaaacctaagactgcaatccaataaaggagaccagcaattccagttcctgatggtacttagacataccagatactgggacaggcagggctgggcagtgggccagcagctgcaaggttatgtcctggcgttagaggctggttcatgactgagacacgttctctcactaggggagacacaggctcttccaccttggtccgaggctgtcggggaacatggctggggtcttcgtctctgatgtgctttgtgctgaatggaggtgtctgggtcacttttcttatttaagatatcttaaaatgagaatagagaaagcagttttggtaggaatggaaaaagatgtagccactgcagaaaacagtatggcagttcctcagcatattaagcataaaattaccatgtgatcagcaattccacttttgggtatacacccaagagaactgaaagcagggaccgagagagagatttgtacagccataacctagcagcattattcacaatagccaaaaagatggaggcaacccaactgtccatcagcaaatgaaagatgagcaaatcgtggtctgtacatacatggaataattttcagctttaggaaggtatttctcacacatgaagacattatgtgaagtgaaacaagccagtcacaaaaaggacaaatatggcttgattccatttacttgaggtacgtagagaagacaaatacgtagaaatagaaggtagaatggtggttcccagggaatggagagaacggaggaagatgaatgattgttccatgagtacggagttcagtttgggatgctgaaaagtcctggagatggatggtggtgatgattgcactatgatgtgaatgcacttaatgccactgagctgcacacttaaaaatagttaaaagggccgggcgcggtgactcacgcctgtaatcccagcactttgggaggctgaggcgggcagatcacgaggtcaggagatcgagaccatcctggctaacacggtgaaaccccgtctctactaaaaatataaaaaattagccaggtgtggtggcgggcgcctgtagtcccagctactcaggaggctgaggcaggagaatggcatgaacccgggaggcggagcttgcagtgagccgggatcacgccactgcactccagcctgggcgacagagcgagactctgtctcaaaaaaaaaaaaaaaaacagttaaaaggagctgggcgcagtggcttatgcctgtaatcccagcactttgggaggctggggcaggaggatcgctggagactgggcattcagaaccagcctgggcaatgtagcaagacccagtccctataaaaaataatctaaaaaaattagccaggcacagcagtgcatgcttgtagtctcagctactcaggaggctgaggcaggaggatcccttgatcctagaaggttaaggctgcagtgagctatgatcacaccactgcactccagcctgggagacaaagcaagaccctgtctctaaattttttaaattaaaaagatagttaaagtggtacattgtaggttatgtatatttagcaataataataataaaacaacacagtttccttttccaagagacagaaggggtctgtttggttaaatgaaaaggacgtggtacaaagtggttgagagtagttgctgttcaggctcggggctgctgctgctctctgtctgccaacagccaaaggcaagtcggttggagcaaactgactggtcttggctctgcctcagagctgccctagagctttgactgtatgaggaagaggggcaatgaggttttggttggttagatattacagcagccacggaggtatggtttggatttgtgtccccacccaaatctcatgtgggattgtaatccccatgttggaggagggggctggtgggatgggattagatcgtaggggcagatttcccccttgctgttctcatgatagtgagtgagtgatttctcacaagacctggttgtttaaaagtgagtggcacctccccttaaactctcttcctcttgctccagccatgtaacatggctgttttcccttctgccatgattgtaaatttcctgaggcatattcatccatgtttcctgtacagcctgtggaaccgtgagccaattaaacctctttcctttataaattagccagtctcaggtatttctttctagcagtgtgagaacagactaataaacaggacttctgatcctgtggctccagtgtgactgcagcctgattaggaccccacacctggctgatgccgttctgtcactctgtctacttacaagcagagacattcgccattggttaaaaccaaacacagaggcacgatcggctgctacagtaccacctagtctccaaaatggcaggaaagggcgcaagcccacagtatggacatctctgtattgatgggagatcacaaatccataaaaaacaggtgaggtagagagaaaaagaaggaaattctgcaggtgcctacagcttcccattacatgtcttggacaatcttatcttagttgtatttccagagcccctcagtaggccccccaagagcaaggggccaccttctgcagaaacttaaatgccaattgttggtattagccaaagtggagaaagagaatgaaacttactggtttgagatcaagctattgccaaatagacatatcataccagaagacatgtgtttgtgttattaaaaaaagtagttcccccaaaatgacagtctctgcctcataatctacctgccatttacccctacctgccactccctgaagccatcggtaaccttggaaatgcttgcatcagtgatccaagtgtggatctccctacccccaccctttcttattcagaactttgcagtctgagcctcctctcggctaaggatctcctttgggggactgtttcaatctgacatcctggcttatctatagggaatatgctaggaagctggggatattccagaattaaactgcagagaattatgttcattcatgggcctgtagtactatgcaccaggcgaagtgccaagcaaggcaagtgcaaacatggaaaatagaaagaaagaggctctgcttacccagggatctcaaaggcgaaagggtgagtgcattgcaattgcctccaatgtggtcagtgttattgtagggtaaatgcatagaggtagcaacctactcttggggtctggagtaggaatagaaaaaggtggtgttctgggttgaattgtgttcccccagaaagtatgttgaggtcataatccccagtacttatgaatgtaatcttatttagaaataaagaggttttaaagatatcatcaaattaagattagattttactcaattagggttgcctcaaatccagtatgactgatgatgtccttataagaagagaaaaccaagacacagatacacagagagaaaagatggtcatccaaaggtggaggcagagatggggcagatgcatctacaagccaaggaatgtcaaggactgctggcaacctcagaggctaagagaatggtgtagaacaagttctcccctagagcctcagaaatggcatggccttgccaacaccttgattttgaatgtctagcctccagaactggagagagtgtatttccattgctttcagccacctatcctatggtgcatagctgtggcagccccaggaaacaaatgcagatggtatcatttgaacttgatcttgacgttggaatggttcttcaggtgcatcaacaaagacaggaagagataggggctagagaaggacaagagctgttcagaaagcagctttgattcagtgtgatatacccaacaggggtaatggtatgcaccagtgtaccgcaatataccatagatggagttgagttgtgttctggaatgatggtagaaaggtaggcaggaattagcccagacaggggatcttttgctatgctaacaaggctggactttgttcactgagggtttcatggctgaaggattgtaaaggctcccatagcctcactcattctgctccccactctctctctgtagcgtggagcatatcctagtttggacctcatgttgtcttgctctctagagttcttccagatggaaggttgggccagatgtagactgactttaggatgggaactatgaaggctcttttctgaaacatctctcccgcttgcatttggcatgtggttttataactccccatgtccaccccagacataaccttatgattggcatataatgtactcgaatccaaaccatgattaaagtctgttttgttttgcaaattcttggcactgttttgtgaaactcttccagttctagcctggtcctctcttaataaaaccaaagcttttgatagcaagtattccaaggttgccttactcgcgtgccctgattctgtactgatgaaagccatcgttttgagatttaccttggttccattttccaattcttattttcttatcagaaacacacttcattcttttcatttttctcattatatgattaatgattttccaaatcatttctgattaatatgttttccatccaatgtgaacctaaaaataaggaaaaatctcaatccaacataagggactacttgctacacattcttaaaggattattttaaatcttttgagcttctaagttgctttaaatagtataacatgaatgagttgactgccaaggagtatgggattgtagtgattcaaaatttcttcgtgatcactctaagaatgacttcttatttgccagagtagcttcattcagataatagtaattataacagtgctacagttttaaaaaacaatgtggaaaattactacaggaagatgctggaggcctgagtgggagcccatctctgcctttaactaacacaaccgtaaaccattcaactatttttggcttcagtttccagaaaatgaaaaaagacctgattcgattatttctaaactcctacaattgtgaagtcacgaatttgctttttaattacagaggcgatgtgaaccctgaaggagtgttttaagatttgatggcagctggaacccaaatgctttcaggaagatttgaatcttgcaaaaatcttttcagtgggggcagtattctttagcaaagtttgccatctagtggccaccaggactaaatggggctttgcttaaagtgttgaacaaaagactccttgactaagtttatttatttttaatttttttatttttatatatttagcaggtacaagtacagttttgttacacggatatattgtgtagtgggcaagtctaggcttttagtgtaaccatcccccgaatagcgtgcattataccagttaggtcatttctcatccctaacctccctcccacctttccgagtctccagtgtctattattccactttatgggtccatgcgtacacactgtttagctcccacttagtatttgactttctgtttctgagttatttcacttaagacaatggcctccagttccatccatgtcactgcaagagacatgatttcattctttttaagggttgggtagtattccctggtgtgcgtatatgtgtgcatgtgtaagtagatatatacaccccacacattttgtttatccagtcatacattgatggacacttaggttgattccatatctttgctattgtgaatagtgctgcaataaatatacaagtgcaagtatcttttgtatgtaatagaccttatctaagtttcatagacagttgagtacaattatattaattaagttttgaagaattgagtcaactttaaaagtagagaagtgttctaaataccagttaatcatggatcttagttcttctagattttctttatagtttctagatcaccctccccagctccaaagattataaagcactaaatgcttttatttgtttcaaataagagcttgtgaaatccaagtcctggaattacatatcaaggaatatgtatattacctgatctttactgatgactttggattctcatgtcttctcatatctgataaggcagatagctgcctctctgccttatcagctgtaacaatctcacatgacttttgggtagcttcatatttaaaaacttttttaaaaatcttcagtatggcaacttatgtactatttttgtaaaaatattgaataactggaataatagaaatggttcacgctttgaactagcataacaaaaactatgagtattctgttgacattagagaaatgcctaaaaacacattctccttgacattttgttccatcccacttggactctctcttgaacaatattattctacaatccaaataacatgttgcaaaacaatcgcagagtgactcaaatcgctaaacatcttttcttcctgtataaaacttgacaaaagctttgattaaagtctcatgcaggttgtggattcggttccaagcagcgtggtatgtgatggcgtactcaaaactagtctggctcaactgtacagttttataatttgcctgcagggagatattgagaaagtggaacgtgtaaccaggtcgctcactattaatcttttagctggggaaagaacaaatccaacttctttcttgacatctcctcttggttttctcaaaaacacctcagactcaacacatccaaaattgaaacttgcgatcttgtctccccatatcctggcacatttctactgtttcagcaaaagccatttctgtctaactggttacgcaaaccagtaacctcagagtcattctcgatgaccttcctctccctcggatgcagaaccagtctgtcacccagtcctttggtctcatcattaagaatcctgagcagatgcctccttcccttttctcccccatcctgcctgcctactcaaagccaacaccccctctgcctgcccatggcattggtcagtggcctccactctgccctctctcgctcttgtttcccacgtggcacttactcagagtaatcttttcccagtgaaaagaaaaacacagaagatgttgccataatgagttttacaatgccacttaggacaaacctgcctcctgttctgttcacggttatccctctgctcagcgagataaatgcatacctgattgcctcctttggaaaggctgatcagaaactcaaaaacatgcaaccatttgtctctgagttgtcctgcctttccagactaaactcgtgttcatcttacatatattgattgatgtcttgtgtctccctaaaatgtgtaaaaccaagctgtgccctgaccccaccttgggcacatgtcaccaggacctcctaaggctgtgtcatgggcacacatccttaactttggccaaataaacttcttaaattgactgaaaaaagataaataaataaaatgcattaaagagactacatttaagtggtgaaaaagtgcttgcttttgtgcttttgactttgttccattaaagatgcaggtgacctacagggagggaacatcacacactggggcctgtcacgaggtgggaggctaggggagggatagcattaggagaaatacctaatgtagatgacgggttgatgggtgcagcaaaccaccatggcatatgtatacctatgtaagaaacctgcatgttatgtacatgtaccccagaacttgaagtatattaaaaaaaaaagatacatacaggtgacctataaagaggtacatgggaaacaaaagtaaaaaattaaccatgaatacaaaaatgagacaaggggaaagaaatgtaaaaactaaaaggattttgaagtcaacctgggcaatttagattatattttaattatttttatttatatctatatttactgacctttttttgaacttttaatctttatagtctgctgaaaagccagagaaatgacttctggaatatttgtacaaatagtaagtgtcagctaaaatgagcttctacgtcatgtaatattttgaaagagaagaattgtaagtggattgatcatcttggttatattcaagtcacaataaacaaaatattcaaataacaataactattcaattacgtatatagtcaaccaccaattttatatttatttcaatattcaaattctagtacatagtcaagtaacaaaagagaaggatacattttttagaatgcatgtatatatgtatatatgtgtgtgtatatatatgtatacatgtgtgtgtgtgtgtatatatatatatacacacaataagacacttaagaaaatgaatgtcctattataaattgaactctcaactggctttcaatttatgtaatatatataaaaatataaaacaatagtgcaaaaattatttaacaaacaatataaaaattgcattgggataactagttaagtacttaaagaattaggcccacaccttgtgtcaaaaccaattagagagttaaatggaatatacttgagtagagagttggatataaaacaaatcataattagaataaatgtgttgatttattagaacgatgaaaaggttgaaaggtctttcttagttttgatgtaataaaaatattcacaaagcagcacatactgttattttaaaatagtaaactgcattacaagaaaataagttgaaaaggtatgttgggaaaatatttgaagcaaatatataaatgaagaatcaaaacatcacataaacagtttctacaaattggtaaggctgcagcaatgtgaaaactgatttcagaagtgtctgtattagaagtacaattaaaagtagagaaattttaaagaaaacatgcaaaaagttggccgggcgcagtggctcatgcctgtaatcccagcactttgggaggctgaggcaggtggatcacgaggtcaggagattgagaccatcctggctaacacagtgaaaccccgtctctactaaaaatgcaaaaaaaaaaaaaccaaaaaaacaaaaaaacattagccgggcatggtggtgggcacctgtagtcccagctattcgggaggctgagtcaggagaatggcatgaacccgggaggcggagcttgcagtgagccgagattgcgccactgcactccagcctgggcgacagagcaagactgtctcaaaaaaaaaaaacaaaaaaaagaaaacatgcaaaaagtcttgaacatatattgagataaagactaaattttatttgatactttctaagttgtcaatattgttatattttcaataaaattaataaaacaaatgtatgaaacatcctggtagatattaaaagagactattttagaatctacaggactagtaatacacaaagtccctaaattttaacagcattctagatatactgttgtattaaatttgatcaagaataaatacaaagttcccattaacacatttattcaaggtaaggggaaataaaggtgattcataggagtcctgggtaggcccaggtaagttggagaattttgtgtttaagggtagggtcaccctggctgtttacagggatcatgctcacgactatggaaacaaggagaatggtgaaagagactcaactcaagacaacatggcagagtttaagagtgctgtggcttggatgtagttcgtgcctcccaaaactcatgttgaaatttgattcccaatgaggtaacgttgggagctggggcctagtgggtggtgtttggttcatgaggacagatttcttatgaatagattaatgcccttcctcggggatgagtgagttctcactgtcttgggaataggttagttcctgcaagagcaggatggttaagaagagtctggctcctcaatttctctctcttgcttttcctcttggcacatgatttctacacacacctgatccccttccggctgctgagtggaagcagcctgaggccctcaccagatacagctgcccaattttggactttccaaccaccagaatcatgagccaaataaacctcttttctttataaataacccagcctcaagtattcagttatagccatggcaaatggactaagacagggaacaacgagagctttggtatctgagagtgctgagttggaaacctagctatgtctctttactcttagaaccctgtttcttccatcgtgcaactgagctaccactaactgtagtgctgcattgctggggagaactaataatgcaatgtggcaaggaagatgttgctggcttttatttaacagcactcaatcaatcaggtgatgccaggcctgcttctccatagtgcagtgtctttgatatttactgcaatgatgttggctataattctgttacatgataaaagagatttcaagagttttaaaaaccccatcaaaaaaagagttcattctggaaccacagatgtctggtttctttgctgagattcatatagagtaagatcattgaatttagcaatggatttcagacatcaaattctacctttaaaaacatcatttaaaaactaaaattagaatcatcaaccgcttctcaactaccatatgtcagtgattatggggatccctaaaggatatggcttttcctaacgtgcaaaacagtctctcataaaaaaattgatgcacatattcaggtgaagcataatactgattcttgcctgtggcagaaattctgttaagtacacctagcaattttgttggagagttctgatttcatctgttaatttcaaatttctggacagctctttgaattcttttgtcaaccttatgtaggaagacttgagagttgttagggctccataggggagtatccttagagaaggatggctccctaccaagcacacacagatgtggggcactagagtaggctgagtaatcgccccccaaagatgtccatgttccaatctatggaacctatgaatatgttaccttatgtggcaaataaaattttgcagatgtgattaagttaaagatcttgagctaggaagattatcctggattagctgggtgggcacagtgtaatcacaagggttcttttgagtagaagagacagataggaaagttggagtcagagagggagataggacaacaggtgcagaggtcagaaggaaattgcagttgctgtctttgaagttgtggaggggccatgagccaaggaatacagcagccgctaacagatggaaaaggcaagaaaacaaactcttccctgaaggctccagaaggaacacagccttggattttttttttttccccagtaagactcatttcggactcccagcctgcagaactgtgagataatacatttgtattgttttatgccactgtatttatggtaatttgttaaagcagcaatagcaaacacatacaggcacacagtgtgtagaaatgtcttctatgtgtcttttttgtgtgtccagatgaactaaggtagaactgctgtaaggaaacctgcagcactgttgcctgtgttcatttttttgttcttattcgagacagggtctcactccgttgcacaggctggagtgtactggtgtaatcagagctcactgcagcctctgtccttccctggcccaagtgatcctcctacctcaggctcttgagtggctgggacttacaggcatgcaccatcatacctggctaatttatttattttaatattttttgtgaagatagggtctcactatgtttcccacagctggtcttaaactcctgggctcaagctattctcctgcctcagcttcccaaagtgttggaattacaggcaggagccgtcacacctggtctcctcctgttcatttttatttttgccaacagcatcacaaaatgtgtttggccttttgagttagccacgtgattacctctgctccaccaagacacgagaaggtcagcagtcactagtcattctcctctccagcaaggtatagtctagtaatcagagattcagagtcctgggtaggtgaaggtatggggtgggaagtgttcctatctgtacaagacctttcatttatttttaatctgaccttgcttttaaatgtgcatagtgcttatattaatcaggagttgggaagcaatcgatgggcatcagtgggtaggtgctggggaaggagtgaagaaatagcactgaagcactggaaataaatggtcagaaaggattctgttggctcttctactcctggaacccggagaacagctccaggtcaaaaggtgcagtgaccctcttgatctccgagaggaagaaacctcagatgaaagactgtgtgtctactgggttaaacacaccaattctctattcagactgcctagaattgaagcccactacccttcccctggctctgagagcttacgccagttaggaacctctaggctcagctttcctgtgtgctaaattggtacaaaaatattatcttgaaggatggttacaataattaaatgtgaagtgctcagcacataacaagcactctataaatgtttaactagtattatattaataatattataaccttagggaacttccaaattttgagaggaggataaggctcctagttctctctttcttttaaaaaaaaacatttttacaatgtcttctctacttcctctgttacataaatgaggtaaagataggctctgtgtattggtccccaggttgtttatttcttcaatgggggttgaaatgcattatctcagaagcctaatggtaccaatctcaaatgtttacacacccagctgttatttatttatttgtttgtgtttacagtcagggtctcactctgtcatacaggctggagtgcagtggtgcgatcatggcttactacagcctccaactcctgggctcaagtgatcctcccgcctcagcctcctgagtagctgggaatacaggcatgcaccaccaggcccggctaattttcagggttttttagttttgttttttgtttgtttgtttgttttgtagagacagggtttcactattttgcccaggctgttctcgaactcctggcctcaggcagtctttcaactttgacctcactgagtgctggaattacaggcatgagccaccagacccagcccatccagttgttttaaacctagcccgaataagtagttttttaagcccttttgcctgccttgcataccccgtgaaacctcatttccacctgctgaccgtaggtaagatgcagcctcgcagttgtaaggcataatctgctggggccttcagagctctctgacccagagactgccaccctactgctgaatgacatcacctcgacacgtgagacccgtctgctatctcctctcctgggaattccctggcccttctccccttctaagtagcaacctctgtgtgccatagcctctgcacagaatcctgctgtgaggggcttcctcccatgcagagttgtcataattacccagtaaagctgtgtgtgctttagccacctcctagacatcgtatctttttccttgatcagtccccaaatccctcaggatcttcttcttgtccaactaacaccaattcccaataaaggaccattcaaacatatttttacttctccgcttcatcataagccaaaatagaaccaagagacagaatagtcaatgtgttagttttctttagagttgcccagtagggggtatgaagtgccggctggatataggaagattgtcagggttgccaaatatcccaaatgattatattctttccatcatctcttaaaaaaaaaatcatactgtgattttaggcacatctgtaggtactttgcaaaataactttgtctaagtccattcaggctgctgtaatgaaatagcatcaattgggtggcttatcaaaaatgcatttatttctcacagttctgaagctgggaagtcgaaggttgaggcagatttggtgtctggtgacaaactctccccctctgagtttccataaattttagatcttttactccattaccttcatagtatctgtgaggaccaccttttctggggtaaaggaaaccatgatttcattctgaatgctaatgcatatgacatagagtacctctgatgatgttacagtaacacacagcttcccctgtttcataaatggtaccttcttactgtgttctaatatggtggaaggggcagtggatctctctgggacctctttgataatggtgcttaatcccaatcatgacctaatcacctcccaaaggcctctcctaattccatcacattggtgattaggttgcaacatatgaattttgagggaaatgcaaagattcagaccacagtacctaccaaactagaaaagagaaattgaaatccacaaactttagccttcaaattcagtagaaaagccccacttttccaagctaattgagctgatgttaggacccaaatgaactgttctttatgaggaagtagagaacatactgcttgtgtcaaacataatgagttggatctttcaaaaattaaaaattcgtatttcaattaatttacctttggtgagtgtctgattcataagtaagaataatggaatacttctgtggtctaataattaaaaagtaattgggcaaatacattttttgaagtattttgtcataaatcatatgaatctccccaagttctactatttctgatcttaaatttgagaagaactttttctgttgtatctgtcattcttatagtgttctcaactaaatccaataggaaaagaaaaattgagattttcctcattcatttctttgtcactatgtagctcatagctaattcaatattaggagaagtgagcttcttttaaacatatcttaaaagagaatgtctatgatctcattggacatatccaatatcactctctgagaagtcttcctcttgttctgtcctgtaattttatatctttgtaaccaacatcgtttgatagcccatcacctcctctcctcagatcctcatttccttccttatctgagttcccgtgatggagacagactttctcaactctctgttcctctctccctctgtcttattttcctgggaaatgtgacatcagcctaaacctgactctcattcactctgcccttgaatttcagcagacacacatagtgggggaaaaagaccactctgggcactgttttactggaagttcatgaccacaaatatccacctgcactcaattctacctgttgattctgttttcctggccagtccactcacctactcctgagaggtctctttcacaccttccttgtacttaaatctgcaacagtttctcccatctcctcattctcggttaatgatctttctcctaatttcatctgagaaaatagcaactctctaaaaagaccttcccactactgctaccattaaatccacccactggtacccaaatcttctgcttccttcctgcgacagtgggtgaaccaactaagagtctatctgagccaaccactctgcttatgcatggggttccagccccttggcccaaccaaggactttgctcctacaattatctgtgatctctgttgaagtgtcttttgtttttcctttcttacctgtaatacctcctattccaagaaaaaaaaatgtcttattcctgcatctctttgcagctttgttttcatttttctactctctgcttaagaaaatctccttgaaaaatgtgtgtccacccactgtatcaaattgttcacctcgctctctttattgaactcatttcagactcttgactctgtccccccaatgacttcacttgagatgctatcatcagtggcctctacctgaccagatctgatggtcagttctcagtcttcatcttacttgacctcacctctaatgggcgagatgctccaggaatcagttttcagctcctctttcttgggaaatttctcaagggaatttcacaaaagcttgtggttctcaagaccatctatatgccaccttcctagtttatttctctactcacacctcccttctggaccctgggattatatatgaaattgcctacctgactgctccacatcgatgtcctacagacgtctcaaaattaatatccctgcaaaagtattttttgttttctcctctgatcctgctcctccctaaatatttttcttctcaggaaatggagcaatcatgtgaatggttgctcagccccatctccccccttccagcttccaactggactcattcttggattctttctctccaataagacatcaatctataggtcaattctgtcacactggacttcaaaatatatccagaatcctaccacttctcaaggtgtcctcgcacgaacactttagaccaagcccttctctcttatctgaactattgcaatagtctaaaaactcatctctgtgtttcctcattagctcttggcagtctccacacagcaggcagaatactacttctgagatataaatcaagctaggtgtccttttcaaagtcctccagtggctttcctcccaattagaagaaaatgcagtccttgttgtaactttgtgaacctatatgatctggccactcaacgggcttcatccataggcaacttcttactgtcctttctgtgggcaaagtgtgttcctgcctcagggcatttgcctggacttttcttctgccatgttgtctgactccttcactttattcactttgttctgctcaaaactcatctttctaagaggtcaaggaggtctgcctattgtcaattttatctctctcttttttttttttttgaaagttgtccattctaaatgtagagggtgcctaagctagcaatgactatggacgaatgtcttttatttttggaaaattaaatatttaagatttaggatatctagatacttacgaccactgtacagcctagtggtagaatcaagaccatcgcaaactgattttgaatgaaacaagatccatctttggcttcctccatttccgtttccccatctctactttcttaagccctcatccagttatccaatactgtgcaggtttatgctccaactccctcccaggtctgctcttactcctgaagtgtccatgcaccaaagctacctacatcatcttctccccagtctctggaacttctcattggtagttaggtgttgggaggaaaagccgtttgctttaactacagctgcaagctgaggtggatggccttcccttaagtgtcttcatcttttattacttccagctttgttggtaaatgatatgcatctgtgttgagtagtcttaaggtcattgccctcaaatatttatctgaagctcattgatgagaaacaacactcagtgggattgtttaatagacacagaattcattcagtgtctaaaactccggttgggagctagatttttacagttcagcaaatctgggttcaaatcctatttctgctgcatatgaattttgtagccttaagcaagtctctcggctctttttttttttctttttttgagatggagtttcactctgtcgcccaggctggaatgtgatggcatgatctcagctcactgcaacctccacctcctgggttcaagtgattctcctgcctcagcctcctcctgagtagctgaggtcacacacgcctgccacaacgcccagccaatttttgtatttttagtagagatggggtttcaccatgttggccaggctggtcttgaactcctgaccccaggtgatccacccacctcggcctcccaaagtgctgagattacaggcgtgggccaccatgcccggcctcaactcttaagtctgtttcctcatttgtaacccactgtattagtccgttctcacactgctctaaagaactacctgagactgggtaacttatgaagaaaagaggtttaattgactcagttccacaggctatacaggaggcatggctgagaagccatcagaaaacttataatcatggcagacaggtgaaggggaagcaaccacatcttaccatggtggaaaaggggacagagagcgcgaagagggaagtgctacatgcttttaaaccatcagatctcgtgagaactcactatcacaagaaacagcaagggggaaatctgcccccatgatccagtcacctcccaccaagtccctcccccaacactgggtgttacaattcaacatgagacttgagtggggacacagagccaaaccatatcacccagggataaagagtaatagtcttcttcataattgatatgaggattaaaggaataatgctcactgggtgcctgtatcagtaaataaatgctaatgttttttgtcattgtttttattactattcttgggtcaagccaaatctataaggagttaattatcttatctaacctattgtcctttctctctgcccagattattttactgaatgttgctatggtgggaaacctttagcttcccctgaccgtcagtctaagaagcagcttttcagaacccactggggcatttaccggaaggaatgctgttcataagtttacacaatgttcctttttatggggcctccaggagaaatcggtgtctggtgttagtgccaaacagagtcgttcttttgagcatttggtttattttaagcttatggatggtaaattacataaccgaccgagtttcactttttgagttggctgctcgaaagcttacagccagatctatggctcatagtaagaagtacttccattattatgggatgcatttcgagccttgtttctgcattttgtattgccatctttgctttgctttttttcttttaatccctcttttatgttatttaagtgtccttttaaaatttatccttgtaaattgccttaaattatttctgaaacaaggtgaggaatagatagatacatagctgtaggtagatgaaatatggttttaaataatttgtcatagtgcttatatttaagagaggtttaatttttataagaagatacttgtggcataaaatgaattttccaattggtaaaatttcagactttgcaagaaagcgcaaggaaaaagtataaggtgggaatgtttttgcagaaaggtgatttgggaaactgctggaaggggaacctctgaaaggtaggcaggtaggcagatgatggctcgggtggaaaagtgcctgttgtatgactggattggttaattaaccattatgtgatcctccaaggtcagcttataaaattaattttcacctttcaaagagaaggtaggaagaggtttaaagccatgggctcaggagtcaaacatctggatagaagttctaactctgccattgccttgagcaacttacttgacttcacagtgcctcaatcacttcgtatatgaaatggagatgaagggctcatggagttgtcatgagaatcagaggatgagctagtgacgtgtttagaatagtgactggaacttagcaggagtcagtgaaactctttgtacctcttcgcttgagtccctgggtttttaaaaagttgcaaacagtccattttttaaatgaattgcatagtaaggtaagtcagatactggtggggctgagtacatagcaatatttatgacaagtatgaattttaataaaaatatatgcagttcattagatacatcatagaattctaaaatctatcaggagtattttatggcaacttcagagaaatggtatgtttctctttcgtggtctttccaaacaaagaggaaatcaaaattgctgctgggaaatattttatcctgttatcatcctagatttgttcatgaaatgttacactatgaatagcctttcttgtcttttgccaccaaaaagctaccattttctttcttatatacatgttgcattttcttagatctacaatgaatgaaatgaactggtcaaatggattctctgagagtgtggaaaatttaagacatgaatatgcctcgccttttcccctctcctttctcacttcctccactccctgtaataaagagaattttacttttctctactcagtgcttctccttccatccccatgtaataatgttctatcattgcccccgactctggagcatgaaatctgaagtttgggcgcgaagacaattggctgaagatacaaaataaaaggaatcaggtttttgtttcctggctcttcttgtttagaatctgaatgatgggtacaatagggcaaatgtaaagaaaatttttaaaagcccagaaactaagcaaatttacatcatacgaagctgagggatataggttgaggaagagagagtcaggaactctgtacgtgggagagtccatttttgatgtttttgtttgtgctagaaagcataggtcctcaaatggctttggttatgagagaatcagggaggaaaggaaaaaggatgtttgagaagtgttgctgtgtggattataggatcctgtgttacattctttgagctacgcaattaaaaattggcatttgattttcaagtttttgttgctacattgtattcctttaagtatgactgggctatcagagaactgggatttattagggttacacaatcttgttctcacaatcttgaatgtagcaagtgtagtctacctcaataacacaaaatatgttttaaatttatcattgaggtttagtgtgcattccatgattattagtaatttcaaaagtatgactttttccctaatttcattgcttttagttatcttatttacttctcctgctatctgcgtctaggtggtaaataaacaaatgttgccactctcattactgagaaaaaaaaatgattgattgttggtctgaaaaacaaaacaaaaaccaaaaaaaatcccgtacatcaaaagacaacccagacactttggtgagaaataaaggaaaattagagaaaggttttcagttctgtagaagctggaatgaaatagagtgtgcattttggtggctaaagaagtggagttcagtggaagctgcaagcagccagatagagattttgttcaggaccctaaggagagaaatgaggactggaccaagaaatagaagtacactggcactgacatgaaaacaaaggtttatcacagatcggattactgaagactgaacttcagaaatgcatggaaatgttcaggaatgagagaacacgggaacgtgtatgtattacattgggtttcattttctgtttctgtccttgcacttacctacttgaattccccaatatctaatagattcattcattttccttatctcccatcttcagctccttagcatgagagcatcatcttttgcttgggtaaaagtacttcctagctgatctccctggcttctctctagccgtcttccaatctgtcttcaactgtcctgccaaagtggattttaaatggcacaaatctgatcatgcctcttgtgggaaagaaatcccactgctcttagtagaaagagaaaagatccccagcgtggccctcatgatcttgcctgataatcacctgcctctctaacctcatcttctcctccctctcttactttattctccaactgcttaagctgggccttctcccttctaccacgtagagcttccctctccctgcctttagtgaactccttcccacccttgagcctcagctcaggtagcagtgccccagagacaccttttctgacccttctaattctcgaagatgtcaaccccctctacattctcatagtattctgtacattcatgcaaagatcttattagcttgtaattctatgcttatgtgattatttgattcaaattgccttgccccctggactttaagctccttgaaggcaaggacattggttgttttacttgtcgttttcctactggtgcccagcagagacacgcacttgatgagcagcactcagttgatattgttgactgaatggatggatagagacagttggtcctttttttgtttttactgaaattagcaagagtttttggtcaacttaagcaccctaggctcttcatagttgcagacgtactgtgaagggagagtctaatgagtatttaagcaggtgtctgtcagaagacggacccttctttcctaaaatcgcagccacagaaaagccagaagcacttaagcagagtcaattctgacaaaaaaccttcagttctgctacagaaggcttctttaggtctttcatttcttattatgaaagagttctcttcttgaaggaagcacttcatctgatgtttaactctgactgtgttcttgccactcctaactaatagtaacatagaaagtgaatagtaaagaaacattaatcctcatactttcaaaagactggccaggaataaatcccttggatttaaaaacatatatcttccatcgatattatctacatttacctttgattacttttaatttgttgatttttgtcattgagcctcttcttaacgcttttcaatattttgcttttaagatatctcgtattataacaaaatagctaatttagcaattcattaggtttgtaatttagctacatgagccaagcagctagtttttgttgactttatttgattatttagtaaatgaacagttatcacagacaagtatacaagctcaaaagctttcaatttcttgctgaagttgaactattgaccaggttatttttagactcaacagtctggaattttttttctacttcttaataaaacaacagatattttcacatttaaaagtttcagtaattctgcatgtactgccagttcaattctaaactctttgctgtgtctaaactcttttgctgggacccaggtagtcccagcctgagttcctgattctcgtctccattcttgccttttcttttttccctcttccactcccccgcctcctccacaggcttggatctgtgaattcatcattcattccagaaacactttgaggtgcttttaaaatccatgtttaggccgggcatggtggctcaggcctctaatcccagcactttgagaggccaaggtgggtagattgcacgagctcaggagttcaagaccagcctgggaaacatggcaaaaccccatctctacaaaaaaatacaaaaattagctgcgcatgttggcacatacctgtagtcccaactactacttgggaggctgaggtgggaggatcactgtgagcctaggaggttgaggctatagtgagctgagactgcaccactgcactccagcctgggtaacagacacagaccctgtctcaaaaattaataataataacaatagtaataatagtacaagtttagcatctataattggaatcagagcaaaagtgccaatataggagttaatgtctctttcttggtgtagtccaaacgtaaacactattgggccaatatggcagctcccctgtcctagggacttgggtctgtcttgtcgctctcttctcctgaatgtgcagctttcttctcattataaatggctgtcccagctctcagcagtgacacatgacttgggtattggcacataccatttctacatctgcccattgaccagaatctagtcccgtggccatccaagttgcaggagaagctgggacattcatcttagcccagcagccgatgtctgtctctattactgtaaatgaagtaaagaatggatcaggaggggacaactatgaatctttgtgatacctactatgtttcagtcactgtgctaagtgctagggatatagagataagtaaagactgaatctggtggagaactgagtttagaatgaggacttggggtagatccctgttgtctgaagatacccttcttcgtatacactatagaaacacaatttgttctgtgtatgttctgtatgtaaccttctgtgcttttgcatcttctgcccattgcctgggatcctttctccctcgcactttccactgaatgcaattccgtccattctgcaaggccagcccaagtgtcctcatctttgtgaaggctctatttttccttccagggatggttaggagttgttcccttggcgttcccattgctctgaaacactgtgttctctttcctctgttttttgagatggagtttccgtctgtcacccaggctggagtgcagtggcatgatctcggctcactgcaacctctgcctctcaggttcaagcaattctccttcctcagcctcccgagtagctgggattacagacatgtgccaccctgcccagcagatttttgtatttttagtagagacgaggtttcgtcatgttggtcaggctggtctcaaacttctgacctcaggtgatctgcccacctgggcctcccaaagtgctgggattataggcgtgagccaccccgcccagcctcctcagttcttatacgtgcctagaggaatacatggattgtattttattcatttcatatccccagcaccttagcacagcactgagcaaacagaaggtgctctataaatgtttgccgaatcaaattagttagtgcttggaatccttttgtggattcttgaatgacaaggtgggtggaatatctaatgaatgggggaatctctctcatattgtgtataaaaatatcatagttaataaaatgttaagtgaattccaaatcaaattcagaatcatagaggggatagatcatttccccagtgttttcatcttattctaactttaagctaaatttttattctttattcagttattctagtaaaaatgtggtgatagaggtgatgaaggggccttaagaaaaaacttgaggccgggcacggtggctcacgcctgtaatcccagcactttgggaggccgaggcgggcggatcacgaggactggagtttaagaccagacttcctaccgtggtgaaaccccatctctactaaaaatacaaaaatttagccaggctggtagcgggcacctgtaatcccagctactcaggagcctgaggaaggagaatcacttgaacccaggaggtggaggttgcagtgagctgagatcatgccactgcactcgagcctgggtgacaagagcgaaactctgtgtcaaaaacaaacaaacaagcaaacaaaaaacaaaaaaaaacttgaatttgaattatgtgttcttttatattacttagtgttcctctcactgaagtttctttaaaaaatcaaattgaagtcctacctacttggaatatatcatgtatggttcagaaaatggtgagggatttttttttttttccaggatgtacttcaagagccaatttacagtgtaattcagaaattttgttttactctaggtttctgatttaatcactaaagtgtccttattttctgtctatagactatgttattttccttttggaccttcaaatccacaaaggtttaactagtatatgataggaccatagaattttcacagactatgtagattatataagtttcagagtttaaattatgctattgcttatattactgataaacaaaacatggaatcattttgggacccagtttgtcagttaaataaggagattaaggcagaatttttttgtcacctctatcaacctcttagactattaataataatataaaagtgttgctttaaatcatagactttaaaggccaggcatggtgactcacacttgtaatcctagcactttgggaggctggggcaggagaatggcctggagccaggagtttgagaccagcctgggcaacaaagtgagacccctgtctctataaaaaaatttttaaaattaggctgggcactgtggcttacacctgtaatctcaacactttgggaggccaagcttggcagatcacttgagtccaagagttcaagaccagcctggccaacatggtgaaactccatctctactgaaaaaaaaacaaaaaacaaacaaaaaaaaaaagtaaaagtagccaggcatggtggtgcacacctgtagtcccagctactcaggagtctgaggcaggagaattgcttgagccctggaggtggaggttgcagtgagctgaggttgtgccactgcactccagtctgggtgacagagtgagactctgtctcagaaaaaaaaaaaaaaaaaaaaattaagcaggtgtggtggcatgcacctacaattctagctacttgggagtcggaggtgggaggactgcctgagcaaggcaatcaagagttcaaggctgcagtgagccatgattgcaccactgcacttcagcttgggcagtagagtaagaccctatctcaaaaaagccttgagaaaatactggtaaagtgttgagaattaattgtcttttatttttccaggagcctaaaggatgtagtggtggttaatctgtgacatgaaatcattaacataccttcttaggtctcaacagaatatggaatgacttgggcatgggtgcaaatttggatcaatatctgtgacacactaaagatattgcgtattagaatggctgatatcataccaatgaacagctgaatctccacatgtcttaatgattcatctttttaggtgtgacatttacatggtctttagggagaatattaggatcagctcagtccctgaaaactgggtctttagggaaagatctaaataatagcttacaaagaatattgacttgggagctctcacacttggaaggcagccttatgtagtttattatatctaaatcataggtggtatgagatctaatgaattaatgaggtctgagtcggatcaaattcgccttccagagttatgtttatttaacatgctttaacccagaaaatgaacatttgccagcgagcaccaaacaactgtgcgccgcagtgcttgagcgagtcaggtcctgaggccactctggcgatcctccttacaattcatgtgaaatacctactgcaggacaaagcatctgacggtttggaggatgtttctgtagtcctaggaatccacagtgaattcgagtctagactcagtcatttttcagggtcaggggaggagggagaagtagcaaatcagatatgcccaaaacgttacagaggtaacagtgaatccaggatgctgctgtcagcctgtgcattgtgaagaaggcaatcataggcgagcagccgcgggagcaggaacagcagcgtgctaagaagcagtcacataaacagcagcaggagtaggcctcctgcttttcaaaagcagagtactgcagggtcgcgaaatgcaagacactcagatgtttgaaaatctcccgagttgagaatggctactgtaaaagcgtcaccaagaaactctgacgatctggacagtcctaactctgtgttagcaatacttacttccggaaaattaatgctacttcttgtagatttttgcaaataggaaacccccttgaagaagatctcaaattacgccccccacccccaaaaaaagacaaacaggggagaacaaagttttggcatgcctgcaggaacggtggcttttttagaaactacctaggaggcagaagctaagtgatttgctcatgcctcttacctgggagtagaaggtgggaagaaatggaccgaggctgtgacgagaagacaaggcacagtgcagcttggtgaagccacacgctgactgcgttctgccccctcttcatgcagtgctgcgggctggtgcatcgccggcgagtacgggtgtcctatgtaagtttctattgctgtagaattgcagctgggagctgaaaatactattcgtgtctgtctggtgcatgttgcctctttcagctgtttttattccctgtgctgaaccaaccagacagtcgatcatttcgtaccatgagttttcaaggaatctgaggtataggagattctgagatatttattttttcccagagatgtttttatctgtcttttgtgccttgtgactttgataaggttggaaataacttgcgcggggattggtttgagaagtccattgtctcagagatctgcctcattcaaaccagttgatactctcttttacctagagtagtcctgttttcatatttgaatgatgggatggtggggggaagaaataccacggagtttgacaaattatagataggcgcagaggctaacactaaatcctattttgagcagcttcagaaaaatagtagataataatcactggatggatgacacagctgttgcaacagctttatcatcctgtgactctttcactgaaatagcccttatttcatggccctgctgtgttttgcaaaatggctgtctgagtattaaattctacaaggcaggctcacacaaatattgaagtgtatcactacttaacatgattggatgctaattgcaatatgctgtgccttacactagccgaccagctccgagcaagcgctggcttgattttcatactccttttgcgagcagctactctattttcaggaagggttgtaaaagggaacaggaggtttatgcaggctgggcaaactgcagtgctgaattgcttaacactggtttgacattcctgactgcaaaacaaatagaaaattgacaaagcaagctaatcaatacttaaagtattgaaggtaaagaaacccgtgaccttggaaaattggccacagaaaagagatatatgtgagacttacaggacaaacaaggtcaaaatctgatatgatctcaataataaagttggaaatggtgacggggtggggtgggagggcagggagagataactatactgtcaaaccttaaagagagtattcaattttattaaataagtaaaagcatgaaaaaccccttttatttaaaggtttttgcagttgttacatatttggtgccatttgtcttttgaatgcaacagttgacatatcagaaatcaatggaggagtcaggtagccagccaagatttctaaagacgacatctgcagggatagatggtttttatccagtcaaaaaattaattgctttttaaataagatttgggaataagtgttacaaactttttagagtataagattagccgcctaaagaaaaccttaagttaaaaacaaaaataattttaatttaaaaatccatagtttctagaatagtgaagagtgagaatttcttagctttctgtgtttctgtttattcttgtataatgaattagaagaaatccatggttatgtgtgcctattgaatacaaaaattctgaaataaggcctccaacaaagcaacaaatttttaccctacttattttagttcttcttcttacattgaacatgtaaataaatagaaagaagagacaacataatctggatttttgaagtcttgattgaaagctacagagacttggttcatctgctcattctcaaatatttttaccctgtattttgaataaagtaccacaaaatatagagcacagatgtcttttaaagataaaagaaatgcatacccttggtcactagaaataaattttcgtttactttagagtgtttttctcttgggaagccttacctctaacccacctgctgctgttttaacctctcttctttgacactttatggattgcagttttctttacagatggccaacccagagtggaagataggttaaatcgaaacctatttttttccttgaaggaaaagaacccactgtgcatctatctgtaacggagactttagatttgaccgcaaagcagatgagtctagaggctgctcattgaatacaaagggcagccagacccctatgtggtactggtggttaggacctcgtcatactggttgggctgtcctggtgtcctttctcaaatctgttgtcagtttccaggaatcacaattctggtaatactggaactaaatgtcaatatttatatacatacatgtatgcatatatctgttagatctaattacataaataatatattttagatgtaatataaatcaattgataaatatgcacctgtgtgtgcatgtgtcttaatctttcactagttcttataccttttctttttagtatgacagctttcttaagaattcctcctactcaaacattgtctctcagaaagaatatgaaagttatgtgggtttcaaagaaagttatactcatatgccatagttctttatttctaggtttttacctttctaagctgttgcttttattaggttgcctccgctcacttgtttaacgttacattcagattcaaaacttctctgagcagtgggctcacagaagtaggctgcagactgtagtcctgtcttgctctttaagactcaatgcataagctttattcttgacattattattgatgttcaatatctagtcttcattcttttgtttactcctaaccatcattcttttagaactcagcttcgcagctcagaagtaattcctgtgtttacctaaactgtcttgctatttcgttaaggacatgaaaatctgtgagctgaataaatactcttaaatttaaaaggatatataaacatggtaagctctgtgtgcatttctgtgaaacacttctcaagtattgacatttgcatgctttggagagcagagacactaactctttttggtaagctttttgaaaaaatgttttaatttttgtgggtacataataggtgtatatatttatggggtacataagatgcttggatacaggtatgcaatgcataataatctcatcatggaaaattgggtatccatcccatcaagcatttatcctttgtgtcacaaacaatccaattatacccttttagttattttaaaatgtactattatcgaagtataacatacatgcagaaaagtgggtgcagaaattatataagcattgagcttgaagaatgttctcaaagcaaacatgcctttgtaaccaacactcaaatcaagaaaccaagcattgtgagcaaccttctcctcccttccaattccagctgtctcccacctcccccagggtacccactaaacagacttctaacatggtggattggtttttcctgtttctgaattttattcaaatgaactcaaacagcatgtactctcctctcatccagcttgtgttgctcaccattgtattcatgatattaacccacgtggctgcacatagttaaagctgcaatttctcgtgctcacggttgtacagtattccattgtgtggctctgtgatgacttagtgatccatgctactgttgatgggcatttgggtagtttccagtttggggctatcataaatagtgctgttataaacagttgggacatgccatattgtgaatgtttatgtatgcatttctcttggatgcaaaccaaggaatgaaactgccaagtcatagggtacagtataaatacattgtgcttaagtagatgctggtcagcagctttctgaaacatcgggtcaatgttcactcccacctgtgtgcctcccccctacacctagtattgtcatttgcattttagcgtgtctgatgagtatgtcagagtatcccattatggctttgctgtgcatttccctgataactaatgaagtcaagcatgttttcatatatttattgaccatttggccatcttctttttttttttttttttttgagatggagtctcactctgttgcccaggctgaagcgtagtggcacaatctcagctctctgcaacctccacctcccgcattcaagcctcagcctcctgactacaagtgcccgccaatttcacgcccagctaatttttgtatttttggtagagacggggtttcaccatattggccaggctggtcttgaaatcctgcccttgtgatccgcccacctcagcttcccaaagggctgggattacaggtgtgagccaccacacccggccatttagccatcttcttttgtgaagtacctgttcaagtatcttgcttctttttgtcttaggttatctgtcttttcaggcattttccttcagaaaagaactggcaaggagaaaagcatctggtgattagcataacaaaatcattaaagacaaatgttactgacagagatatatacaaatggaatcagacttagcctgggtttgaattttgatataatcatttacttaccgtgtgatagtggggttcttttctttctttgagtctcggttttctcacccatataatcaggataatagtaaaatttcaaaagtttattgtgagagttaagatgaaataatgtttgtgtgcacttacttctggcctgatacgtagttgtttttgaaaaatgagtagttattgtgataggagatcatgaagcaggggagtttgctgtctacttggttgctgcctgtgttagttgctaactactaatagtcttgaaaagcttttattaataaatgactagatactggaaggtaatgtagtccacatgttagtaatctcttataagatccacactttccatagtgtgtgatcacctttgagcttttagagcatttaaatgtcaccaaatgatattgcatttgtatatataccgtaacttaagcaattcggtactctagttaaattctgattgttccaacgcacatttacatagttcttcaaagtttacaaaatgcttttatgcccactatttcatttgacattaaagcagtcactagggataggcaaaggaagtgatgatgtcttcattttatagatgagaaaatttcaaaccagggaagtaaactgtactgccaaaggccacagagtctgaggatggtcaaactgagattcaagctgaaattgactcttattccatgtatagtgctttggtcatcttgtttggaatgtctttccaagtttaaataatgggattataattaaatttaattaacatgaaaatgttgtagtgcttttgggtataaaaatcaattatcactgggctagagaagtgctgaagtgcctgttcacagagatttctggttagtagaatgtaggtagtatagttttttttttttaattgtggttgttcactcacaattcatactttttacaagtgatcagaattgtcccgacagttaaaataagtgtgagcgggccgggcacggtggctcacgcctgtaatctcagcactttgctaggccgagatgagcagataacttgaggtcaggagttcaggaccagcctggacaacagggtgaaacctcgtctctactaaaaatacaagaacttagccgtgcgtggtggtgcatgcctgtaatcccagctactcgggaggctgaggcgggagaatcactggaaccccagaggtggaggctgcagtgagccgagatcgtgccactgcactccagcctgggagacagacgagactctatctctaaataaataaataagtatgagctatacacttatatatgccttgggaaatatatttgcacagtaaatgatttttaaaggcatgtgtgtatgtatgtgtgtatatatactatgtgtgtgtgtgtatatatgtgtgtgtgtgtgtatgtatatatatctgtctccttaaatcactcagagcttttccagataatgtcttaagatgtcctttaagggtgatatttggcttttaagacctctgtatctttgaatgtcaagttcatatatgtattttcgtaagaaattgataacttcatatttggaactgcattttttttttattaataatagcttttaatattggccatgttaaaatccttaatttttttcagaactttaaatttggctttaattataaacctcactacataatgacattttattaaaattaaataaggggctgggtgtggtggctcgctcctgtaatcccaacactttgggaagccaaggtgggcagatcacttgaggtcgggatttcaagaccagcctggccaacatggtgaaaccccatctctactaaacatacagaaattagccaggtgtggtggcgggcacctgtaatcccagttactcaggaggctgaggcatgagaatcacttgaacccaggaggtggaggttgcagtgaactgagatcacaccactgcactccagcctgggtgacagagtgagactccatctcaaaaaagaaaacaaaaaaataaaaagggaaatgaggtaaactttcatataaacattaagaagcacagaggcgggaaaatgaaattaagttggtggttggcaacctctgggcatgtgtagagaatgagcttgttggtgcatgttcagggtcatgggaccctctggttgccttagcatctcccagcacagccccagttaacacctatcactttttcttcccattggagaggcagtttcatgtgtgaatgacacttccggggcagcggcccagcctttgcacaccagagaagctcctgcaagttacttcatcactctgtgcctcaacttgcctttctatgaaacaagaataataagagtcttactcttaagttttctatgattattaaatgtgttaaactatgaaaacacttggcacggagtaagtactcaagtaaatgtgaactgtttcaattgtgattattcccacctccctctgcatctgagtacaacttctccagtgctgaaaaagagcagtcccttttagaaggatgccttcattgttttaaagaaagctcttgtaaagcgtattgaattatgtaggaatgtagtggtcatcatctaactgttcattcatgaagcaattactgagtccctgctctttgcccaaggctattctgaaagttagaaatgtacagaggaattgaacctttcatctctgttctcagaaaagtctagtctagcagtggaaatatatgagtttccggaacattaaaatgtgtttgacataacaggattatctgacaataggaataaataaatggtataccacctatagtaggaaatagcatatagacattaaagagaaaaggctagatttgtatagacttacgtagaaggaggtttatattctgagaatacgttatataaaaattaagacgtagagcaatgtatatagtatgattgcatttattctacatgtgtttgcatttatattggtgtttgcatgagtagaggtctaaaagactttaccagtatacgaacagcacatgaaaatgagattatagaggaacaggcaggattttaccttttacatcattaagtatgttgcaataagtatgttttaatttaataatacatatttaatgtgacaaatgccttaaaattaatttatccctcaccttttcccagaaaggcttataaaatttaaatatgttatctcctacctcactagaaaacactcaacctgaaatgcattgagcaaaagtaattcataaatggaggagtctactgattgagaaattgtcatatgtactcaaagtattttggaataaagaagggcaaggtctggccttcttcttgatcaagaagtgtctcatagcagcactgctatgagctcccaaatgtcctttaggtctggccttcatgagatgttatatgtggaggtgcttaactgtgggttagggttaagtcctttgctttgcatgataagaacctgtttcacgaagggtgatcaagtcctactgagttgatttgcactgtggtacaccttcgttgctggcagatttcctaaataaataaaggtcagaaggaatatatgagatctaagcaggtgaatttacatcatcttaagagatatttccattaatttgtgctagcctactgaattatcatccgtcactaaagatacacacaactcatgatggtcacatggtcacatctgttagacatggccccatcccactgtctaaaacacttttcccttcacttctgtgataccacattctcctgtctccatttttttcttcctatttctcctaatctacatatgatatattcaatgtcttgccatattgctattccttcaggtggtcatgagtccatcctcaactctagagaagctggtgaatggtaacataacatttgaggaatgctcaaaagaaagaaaatctgaaagaaaatagacctagaaaaaatggctagagaaattgaagttaaacttttctgcacatacgctgatagctaccaaatcaatatgcccagcccagatctttcttccaagttttagacccatattcaaaagtttccagacatctctatttggaaactctccaggcactgtaaacatggttatacaagactgagctccatccttgcggtcctgttcctccctctctctgctcctcccttccactctcccaccactacttatatctactcctcatttactggttagattaaatgacacttttatactctccattgtccaagccagaaacatggtcctgtccctcttctttactttctgatccattcaatcatgttcgatcattgctacttccttgagagctctggaatcttttctttctattccacctatctccatcctagtgcaggctgttattttcttccccagttaccacagtaactgcagtagtccattctcaccctgctgtaaagtagtactcaagactggataatttataaaggaaagatgtttaattgactcacagttcctcataactgggtagacctcaggaaacttacagtcatggcaggaggcaaaggagaaataaggaccttcttcacgtggcggcaggagagagtagagagcaaagggggaagaaccccttataaaaccatcagatctcataaaaacttactatcataaaaacaatgtggaagaaactgcacccattaaccagtcacctcccactgggtccctccctcgacaaggggggattatggggattacaattccacatgagatttgggtggggacaaagccaaactctatcagcagcctcctaactggtcaccccatcttagtcttcatccttcaacaatccattctccacattggaactgccattgtgattttttttcaagagcaatcatggtatttctctgcttaaagcccccagttggttcccattttctgagaatatgagtgcaatctgagcaatgttgctatgagacacttcttgatcaagccactgcttgtctccttagccttaattctcagcaccttcatcctctggagtcccccagtggcattgaatttcatacagtttcctaacaatcaacactcttttatttgcctgtgctcctccacagaggctgttccctggtctcggttaggtatccttgcttttcccctatcataacacttaccctaccttatcctaattatccctctagttgtctgcccatcttagaacttaagtttctttcattccctttttgattgttgtatctctgttgcccagcaagaatgcctggcctctgacagacactcaagacgtaatggttgaatacatatatacataatgctggggaaatatcaaatttttactctttcactactacctctttattcctacttgtcattataatatgtcgttttgggggatgggggtaatgctctcagtcagtctatgaagcttcccctagatacttcattgatttatgtgatatatgtgaaatttactgtatacttgtgtgtataaacacacatacacagagctttgtgatggtataagtgttccttggtctcatcaatatgcagaaagtagaagagaaatttggttgatatgcataaagtagaagagaaatttggttgctacagtttgcaactatgtaatcatttcctcttttggcctcttttcccgatttagatgatattccttgtatttcttttaagaatataaagcaagaagcagcttatttacccataacaaggacctactgaagtgcagaggagatctaagttctgattgaaagcacgaaattgactaaaagccacaaactaactttgttttaaaacagcagttacaaaagtaggtaaatatgtttaaaaacaaaaacatatttaaaaacaaaaacctatcttcaagcacagccatttaaaaataaaaacaccaccagattatttaaagccttgagttaagggctttaatggctatatgtatggaaaccttccctaacatctttatcatatataaaacaagcagctcctattttaggagatgtgtccttcctccttccttctcccggtggcagcacaggcaggtagccgttctctgaagcagccttttgtgttgttggtttagaggctttcattgcccgctaacctttctgctgaatagatctgtttcccattgagccagactcctgtgtgtgttctcttccttggtattacattgagataacagccaattctcttctgtttgaatcatcagaagtagctttattttttgtttattggggtttttttcttccttgcacttttgtgatgagcaggtcaccattctcctccataccaccaaaggaataaataatttatgtaacctaccctgatttccaaacaataaacctgaataaagagagtaagggacaagggttctgttgtaatttccatctcttaccatttttttctttcttcctttcttttttctttttttttctggagggagtaatatttccagtgagtctgtgaagcttccccagagtgtcccattgacttctctatggtagtttcattattgggtgaatcagttttttctttggagcagatatgatattatgaaacaatgtgatagctattcgaaagagtggatcacaatcttttttctacagagaggagtgggacatagttctaattagaacaaaggcttcttaatgactttcaaggctcgtagttaagggagacagggcaagatgtcaaggaatggtgagctaaaagaatctacttggaagatgtgggatctctcccttcctctcccccaaggttctatgcctctatattcataattaccctccaaaaaacttcagagagggtggataatataattcggtggtacatactagaaatcacctctttctaatttaaaagatagaatttattggaggtttgtagcaatgctgctgatatggtttggctctgtgttcccacccaaatctcaccttgaagtgtaataatccccacgagtcatgggaaggacccggtgagaggtaattgaatcatgggggcagatttttctcatgctgttctcatgatagtgaacaagtcttacaatatctgatggttttataaaggggagttcccctgcacaagccctcttatccgccgccatgtaagatgtccctttgctcttcctttgccttcggccgttgattgtgaggcctccgcagccatgaagaactgtaagtccattaaacctctttcttttataaattacccagtttcaggtatgtcttttttagcagcattagaatggactaatacagcttcttagtgtgtactttgggtcactagcgttaggattcccagggatgttggtccccaaaaaaatgcagatctctgggaaccatcttagactcatagactctgaatctcagggatggatcctgataatttaatgtttaataatctctcaatgtgacttcattgtgcatcactattttttgagggctactggccaacagcagagctatggaaggaaagctgaaggttggatcagggctgctctgagaatttcagtattgggaactgtggctgggctccttggagtctatcttttgaggtgagtcagctcacctcaagtcaactggtgtcaagtgtctcaaggttcaagttcctaggagaggggatcagagtgacctggcttgatctccccaggtcaggagaggggagggctacttgatcggctctctcaccatgcttacagacagtggaggacgaagaggatttccctgaggaaaatccaagtgctgttttccagaaaacaaaacaaaacaaaaacaaaacaaaaaaaaaagagggaaatggatcctgggcagataaaaaccgcattttttttttgcacatacacagaactttatgataccatttttaaaagtgaaccatgctctcctgtggtgaaagcttagaaagtgaagaattaacatatttaagcttagcagtgctgatgttcctcattacataaatggggattatggaaatggtggctaatagtgatggagtttacaaggaaacatccagaattcaaaatacagaattgcctttccagtaggatttgtacctggcaaaaacttgcagagtagggactcagtatttgaattaatttaagtagtcatggcaaaaagattttactcagatattcagtaagtattggcaacttactgaattataatactgaattatagtaggagcttgcagaattgactgagcaacactttgaagaacatatttataaaatagctaaaatgaaataccacatactctttcattcctttcaaggtacaactttaactactagatccagttcataccgtttgtttcttcttgttgttggaatttcttcttgttgttgttggaaccacaggtctgaacaaacactgttctgttgaatatctagaaggaaagacacaatttggattttgcttttccagaaagttccactccttgggggtcctactaacctctaactttgacatcattatggatgctgcagaaataagtcggatgtcctgggcgcaatggactacattgtgaagcctgttggcaacttcccttatataaggttaattcgggtgaaataaatcaacccgactacttattttgatgaaaataaatgtcagtccagaaaaaaaaagaggagagagaaggcacctgcagtggaaaggaataagaaaagtatcttgcaaactgttcaaactgtaagtaactatcagcacccctcagcaccatttttatctgaaagaacactgcaaatatcttaaaaagtgacttaaggttgtgcaagaagcttcctcaacttactcctgaacgcctgcctctcaaatctgaatatggcagcaggacagaaagaccctagaatttctcaccttgtatgtaagcactctaagcaaggtttgcctatgaatttttgtttgattaaagatgggtgaagagagggtcagaacttctctatgtcacgacctctcttccttcagggttgtacatgttttaaaagagaaatccacaatttttttttctcatatagtacacaccttcacttaatttagtcttatggctttaaaatgtattattttaaataacctttggtcaatcctcctcaaagcaccaatttcataggattttcatttctgaactatagttacaacatgcttataaccatttaaaaataataggattcttatttctatggaccaaaaaaacacttaaaatttcaaaatgaatccccgcttcaaagggaaaaaccatcagggctggagggtccttttctgatttttcatttttttcttctctgtatgatttcttattacacagttttatttttccaatgaacttaactcttgagccatgattgacactacaatcagattaaaggatactcttttaaaagacactgatttggactctactccacaaaaaaggagatgaaagctggctttttctgacttgattggctgttctgtgtttacctttttaatgtccttgatgagacaggtgtttctcatggcattttatgcagtcagtcagtcaaccgggatttcactctgacagctgtgctccatcgctatctggagaaaatggcagcagctcagagttcctacagatacccctgtgatttgatttccagctatagactttcgttttctgccaggcctctgatgggtcagatttaagtaccaatgtgccatctaaatactagctttctgaactcatttcccaactttatcctgttaatgccaaacttctttatgaagggggaaggttagcttcgtaataaggggatagatacaagagactccatacacacgtggttttgaatatcagcttctaggagctgatggaagagtatgcacagaatattagtctcatattaagcatcaggaagaatagctagtggatgctgggcttaatacctaggtgatgggatgatctttgaagcaaaccaccatggcacacgtttacctatgtaatgaacctgcacatcctgcacatgtacccctgaacataaactaaaagttgaagatttaaaaaaagaaaaataaaatttatttttctaaaaaaagaaagtttcatattaaatgagtggctcatgaagaaaataaaattggattttattctcccatgcaactcatcatggttttaaaaatttattcttgttaaataatggctctgtgttttgtaaactgcatagaataacacaatcaatgttttattaatagtttctaaattaccatgcagaccacagaagctcaagattttaaattttgaagtaggactttactatcagttgttattagtaatttgaaccaatttctctggtttcaaaatacgttacttaattgccacgagagtggtgaaactttgttcagatttaatgaggaaattctggttcagcttttctttattccttgtctatctttcatacatttcaacatgtcaaagtattaacatatattttatagtaatctcaaataataactaatcaataaatacagaacatctctgtaccatgcaacaatttcagtttcacatgatataaaagattagaactgttacagactttgggcaaaagtggtgagctcagacaatttcacgataaattaaacttagaatcaaagagtgaaaccagaataagcaacgttaagaagtggatgatcaggccaatcttattggaaacgtcaatcgtgtacttgctaacctacagccttctactacatgaagctgcccaactcacagtcactgccaaatggcagttctgtatatacaaactacatggacggcaccctcaccccacaaacaagcagccaaaatgtattcggttgagcactttgacttaggaatttgaatggagaattcacagtatcacttagcagtggagcaggagctgaaagattaccatatgagaattaaagtcatagagggctggatacagtggcacgcacccagctctgtaatcccagagctttgggaggccaaggcaaaaggattttttttttttaagatggagttttgctgtttgcccaagctgaagtgaagtggtgtgatcttggcccactgcaacgtctgacccccaggttcaagcgattatcctgccgcagcctcccaagtagctgggattataggcatgtgccaccacacccggctaatttttgtatttttagtagagacagggtttcgccatgttggccaggctggtcttgaactcctgacctcagacagtccacccacttcagcctcccaaagcgctaggattaaaggcgtgagccaccacacccggccttgcaggaggatcttttgaggccatgagttcaagaccagacagggcaacataacgaaacccccatctccacaaaaaaattaaaaaattattagcctggtgtggtggtacgcacctgcagtcccagctacttgggaggctgaggtaggaggagctcttgagcctgggaggtcgaggctgcagtgagccgtgttcgtgccactgcactccagcctgagggatggagcgagatcttgtctcttagaagaaaaaagtcatggagggtcatggcaagccaaattctgagtaaagaatcccgtgaggaagtggaagctatgtgataaagaatctgcatggaaaagggaaagagtcagccaggtggcaccgggtgcagaccgcagagcatgcaggaggagtggcctataaaggcaacaccctttaagacagaatgttgtgttcatggcagaacaccagagtgaagatcaaaagtcgtctctggtttttctgaagtcttatggtccagcttttctgagttgccacaagtgtatattctttaagtaaggcccggccccttgtggggacttcagtgatctctgttcttttccgccaagtggccaacactctaatacaacgaggaaaatatatgatcaaccaaggagacaaaagtgagtgagcgctaaatgttagcataagcttaaatgatgcgacatgataaatcaatataaagatgaaatatatacagaggtttctaaaacacaaatgataattaaagcatatctcataaattatgaagtgagacatacttaatcttcagcttaacaatgtctacacttattcgtttaatcaatatttatttaatgcctagcatgtctcagacactatgttattcttgggggatgtaaagatgaatcaaataatcttttccctcaaggaaatcatagtctggcagctagaatgagacatcgctttcatttttttcttttttaaaaaatggattgcttttgattcctgagtcaatctgttatcctcacttaagcagatcatgtatgggaatttgtctgggaaccagtttcctataaccagctataacacaatgtgattaattagacgtatattttggctcaaatcttggatttaagtgagtaacctaggtagtatacagaaatggatatttttcaggctaatggataaagatatgtgttccagtaaatcaagttacaaggaaaatattgtccttaatattgttgttattatgtagattaattttaagattaattatataactgctatgcatacatcatgacgaaagaaatgcaggatttagcttatgacttgatgtggtggctgggcacagtgtcccacacctgtaattccagcattttgggaggccaaggcagaaggatagcttgagtccaggagtttgagaccagcctgagcaacatagtgagaccctatctctacccagaaaagatttaatgtggtgagtaataaggaactggcttcatgatgatcatgagtctgcattgatgtggcaagaggcactccagaaagacttctggcgacgtaggcaattggatttgaatggagactgtcaggaaggccacagtcttatgtattccccaggtgaggtgatcaagggatgagaaaagtcgcagtgacaggggctattgagagaaaaacaaagaaaatgaaacataaatatgatgattttatctttttctattttacttataaaacatgatttatatagactaaaattttatttgcgataagggaaatggagatagaaaacggctaagtcagaaaaagatagtcattctgcttttcacagcctattttgggccaattgctccctgaaaataaattttttaaaaaaacttctagggcgcagtgaccacacttgtaatcccagcacttttgggggccgaggcgggtggatcccttgagtcaaggagttcgagaccagcctggggaacatgatgagacccctactctacaaaaaatacaaaaattagctaggcctggtggcatgtgcctatagttccagctacttagggaggctgaggtgggaggatcgcttgaacccaggaagtcaaggctgcagtgagccatgatcatgccactgcactccagcttggacaacagagagagatcctgtcttacaaaaaaaaatctttagtatgttttggtttgaaattgagcatattggaaacctcctgaattcttcctctatacattccttcacccatttcttatcaaggacgttttaatttagttggttggccaaattaatcaaatctgaaaggatttggctgtctttctgaaagctgtcccagaactggtaaaacaaatggttcttttcttcctggaagaaattcagagagcccctccctcccggatctccccatttccttttttctctacctttccccaatgatcacagtcagtaagagccagaaatggctttgtaactcttacgaataatgaaaagtcattgctgatgattcgcaccaagggggaaggatgctgtggttagatccttgcttaagaaacgattgtttgtaacattattcatgtctttgtcatctctgggttctgtcactgcagcatgttctactgggatgtgtctttgaagttcccttggcagacatttgtattatcattttagcagcattttcttgcatataatatgccagagtaatatatactaaaatgataaatatagtttttgcccttgaagagttgataatctgacaagggttggcatttagttactaaatcatccaaagagaagttatcataagaagtatcatgacctattgacaaagttttaggcaacctgttagaaatactcagcttggtctaaactaaatacagagctcttcaaagtcattggtactaaaagcctagcttgagctaaagaaaacaattttccacccgagagctgggcgcagtggctcatgcctgtaatcccagcactttgggaggctgaggtgggcagatcacttgaggtctggagttgaagaccagcctggccaacatgacaaaagtccgtctctaccaaaaatacaaaattagatgagcatggtggcatgtgcctgtaatcccagccacctgggaggctgaggcaagagaatcacttgaacccaggaggtggaggttgctgtgagccgagatcgcactgctgcactccagcctgggcaacagagtgagactctgtctcaaataagtaaataaatacaaattatccacccaagagaataaattctggtggccacttattcaaagtagaataagttctactttgaattattactactatgtgttgtttcaccatagctgacacatggggattataaattacatttacaagaataaaaactagaaaaattaaccatgagtatttattgagcaattactatttagcaggtactatcctaagtgctttacatatgttcatgaaatactcataacctatgagcactataagaatcttttattttgtagatgatgaaattgaggcacaagggcactgtgtccaaggatgcccgagccaagatttgaacacgttgagcctggtcctaaagtctactattgaattcgtacacttaatccctctcctagtcactgcggcccctctgtgtgtattataaaaaggtactctctttgagtgggaaaattagaaaaatgcaccctcacagggagcatgtagcctctctttatttcacccctaactcatcctttggcctgggcttttgaacagtacacagaatgtacaactgtacatggcagccctgtcttcactgtcttcactaccagtcagtacctttacaaatttcaagtaactttgacatgcataatcttatttgattttggcttcagccacatgaaataaaaatgacagttaattacctttctcttacaaaacagaaatctattctctttatgtattgatgtattgatcacacaaaaggtacatcataaaaaccaagcagtggcccaggggcaggaaagatcctgggtatgaaccactgtgtgctttactatactacatgctttgcacatgacttaatttactgttcccaaaagccctacaaggtaggggatcactaacgcctgtacacagattaggaaacagcttcaataaagtgaattaccttgctgggctttccatattttgtaggttgaggtgtctgaattcaaccctgggctatctgacttgaaatctatgcttcttccaccattcttagaccatctctatttgagtctatctgattgtttggtgtagacatgttcaaacaagataatactcattagtgttggacaattggagattaggataaagcgtgcctcaagcagagaaaattgcccagggaagatacactagggaagatactgcctgcttcttaataagctagaacaaaaagaggtcacactcaagattatgagccacttattttgttaatcagcacatactaatggagcacctattaaatgcttggcagccatttaggagctgtgtgggaaacaacaatgaaagtcaaaccacttaccctcaaggggattgccgtctaattagtaagacaactaacaagcctgaatgtgaacactgaagctacttagtaatctccaaggacctctttcagtagggactcatttagtgaatttgcagaagaaacacacacagattgggagcttcccttccgttctttccactaaatggtggggtactgtttgctgttgtgtgtgtccaaaaataacagacctctttcccaaaaagcacagtctgagacaaggacttagtgtaggtaatttcctggaatggatgtttctgggagacagaggaggaaacgccaaaataaaggaacattatagcacttttggaggctgtggcaggtggatcacctgaggtcaggagttcgagaccagcctggccaacatggcaaaaccgtgtctctactaaaaatacaaaaaattagccgggcatgatagtgcatggctatagtcccagctacttgggaggctaaggcaggagaatcactggagctcaggagctggaggttgcagtgagccgagatggtgccactgcattccagcctgggtgacagagtgagactccatctcaaaaaaaaaaaaaaaaaaaaaaagggggaaataatgttattaaagttgtggacataaggggtctggattccatcagggccccctggaagatgtaccaaaaccttccagaattgtccactttaaggatggcagtggggagcatttgttcacagcttctgtcccctattcattgagagttgtccctaggggcagtcattaccccacatttctgggctggctggtgaaaagaatggatgtttacaggtcgtaagaccctggggcagagtggagagtcccatggcttaggtttgaggtagcacagaggacactgcagctgtggctgggttcagaggtggattgacagaatggaatgcagagcaacagaggtgtctgctgcaaatctctttcagccccctccgtgtgtgagcactagatggctgtccttgtcatagacaaaagatagaccagtcacctggggaggcactggcatcagcctgggaaatggtcaaagctgggttttaccagtagtcatttaaagtctcttggtctccatttcccataagatggaaagagtaataggacctgccttacagattgttaggaagacttattaactcagtgtgataaaatgtttcatagaatgctgagcactctttctggcaaatatgagtattcaatttgttgggaaacagagatcccaaaaggcttatattgactggacaaggagttgctttttttaagtgtgtttttttccttttattgtctgccttgttcattcacctagtatattagtccatttccacactgctgataaagacagtccctagactgggtaatttagaaaggaaagaggttgttgacaaatgggatctaattaaagagcttctgcacagcaaaagaaactaccatcagagtgaacaggcaacctacagaatgggagaaaatgtttacaatctacccatctgacaaagggctaatatccagaatctacaaagaactcaaacaaatttacaagaaaaaaatcaaacaaccccatcaaaaagtgggcaaaggatatcaacagacacttctcaaaagaagacatttatgcagccaacagacacatgaaaaaatgctcatcatcactggccatcagagaaattcaaatcaaaaccacaatgagatactatctcacaccagttagatggcaatcattaaaaagtcaggaaacaacaggtgctagagaggatgtggagaaataggaacacttttacactgttgatgggagtgtaaactagttcaaccattgtggaagacagtgtggtgattcctcagggatctagaactagaaataccatttgacccaaccatcccattactgggtatatacccaaaggattatacgtcatgctgcgataaagacacatgcacaggtatatttattgcagcactattcacaatagcaaagacttggaaccaacccttatgtccaccaatgataggctggattaagaaaatgtggcacatatacaccatggaacactatgcagccataaaaaaggatgagttcatgtcctttgtagggacatggatgaagctggaaaccatcattctgagcaaactatctcaaagacagaaaaccaaacaccgcatgttctcactcataggtggaaactgaacaatgagaacacttggacacggggtgggaacgtcacacactggggcctgtcatgagtttgggggaggggggagggatggcattaggagatatacctaatgtaaatgacgagttaatgggtgcagcacaccaacatggcatatgtatacatatgtaactaacctgcacattgtgcacatgtaccctagaacttaaagtataataaaaaaattaataaaaagtgttcttcaaacaactgtgagcaaagatggactagtagatatagctcccctgaatactaaccattaatatgcaaagaagattgattttgacaatgtcatggacaacttttcagaagtttccaaaacagaaattgtagtgttattattattcatcactgataccagcctatatgtaagaataagtttttccttttttcaaaaatacactaatgtgattaaaaccttaaaaaaaataaaaataaaaaaataataaataataaaggaaagaggttgtttaactgactcatagttccacatggttggggaggcctcacaatcatggcagaaggcaaagaagagcaaagtcacgtcttacgtggatagttaacaggcaaagagataacttgtgcagggaaactccctcttaaaaaccatcagggctcatgagacttattcactatcatgagaacagcagggaaagacccacccccatgattcaattacctcctaccaggtccctcccaccaatacgtgggaattgtgggagctacaattcaagatgagatttggatggggacacagctaaatcatatcacgtagttgatctgttttcaatttttattccactgaaaggtcaattcagatttgctaaagtatccttgattgataggatatacctggttggacacaataaaaatcagttcctttactggaaacatgtgcacttaaaggagaatgctgaatcccatcaaggaacaaaactttctcccattctgtccccagaaactagtcacagaagggtttgcatattctttgtggtgagtgcatactgatgacaacttctgtttattcctccaacccacttcctagagccaggatagctttgtgcatctgattcttatgatgaaaattgttagattatttttggggaactgctgtgtatgaggcagtatgcttggtcctagaaatgtgaagggtataaaaacaaaaaaatatatagaatgcatttcttgtctacaaaaaaagacgattctggttgaaggaactggatgcaaatggttgagcttttagagataatggggaactagggagtactaaatcacagatttggtcccatttttacttatccaagacgaacataagaaattcaatgggaaaggaattcacctggggctctttgagaaataatgagctaaatgtattggagacgtaagtgagaaaggccagcagtcagcagttctgtgctcatcaaattcaggttatgcacagtccttttcctagatatgtatggtagtcttacagatgtggcacatctggtctccagagatgcacctctcccaacccatgagccatataccctgtattcctgtctttgtacagtcctctcccttgaatctgggctgcctccgtgactcacttttggcaggtctaacgtggtgaaagttatgccatgtgactttcaaggttaggtgagaagctttgcagctccttagggtttcttggaatgcttgttcttgggatgctgtctcttggaacccagaaaacaagctgtgagaagctcaagctatacacagcggtcacatgtttttctgtggtcaccatccccagctgagctaccaggtgacagccagcactgtctgccacttgggtgagccatcatggatgtccagctaagatatccagctaaggcttgaataaggcttcacatggcagccccagcagctatctgactgttaccatgtcagagtcctcaaatgaaaactgcctaactgagctcaatgaatacacagaaccataagataataagttgttcttttaagctatcaagttctgggagagtttgttacacagcagttgataactggtacaaaatgtaatttatgtcttaaatatcagcaagcttttaatttttttcacagttgttatgtgacattttgaagtctccatttttttgtttttgcttttcttacttttgacatactataaactcgatcctttcaaatagctttatggaataatattgctgttcattagtttttaaatcataaccttacagatgaaattcttaagtgtattgtcaacccttttgtagtctggtgaagcctacggaagtcttttattattaagtgaataataagaaatttgtagaatcacagaagaaaccaatcatgtgggaacacagtttttgaaatactttaaaacccaaatctgtggtgtagtaatatatgtacatctgtgaacacattaaataacactattgatgggcacaattataattttgaagtaccaataaacataatcattttctaacattttgtaacattttagcatggacatttttaaacatgcagcaaagttgatcccacaaagaatatctgtatactcactgcctagactctcccattaacattacttatgctgccgggcgcagtggctcacgcctgtaatcccagcactttgggaggccaaggcgggcggatcacgaggtcaggagatccagaccatcctggctaacacggtgaaaccccgtctctactaaaaaaatacaaaaaattagccaggcgcggtggcgggcgcctgtagtcccagctactcgggaggctgaggcaggaaaatggcgtgaaccctgcaggtggagcttgcagcaagccgagatagcgccactgcactccgacctgggcaaaagagcgagattctgtctcaaaaaaaaaaaaaaaaaaaaaaaaaaaaaaaaaaggaacattacttatgcttgctttatcatgttatctatctaaccatccgtcatcaatcttaatgtttttatgcattttccatgtaaattgcaaagcaaattgcaattctctatgaataattcagtgtgtatataattagctggaagatggacttaagattgtgattgtgatatatgtgaaaatattgtaatctgatggaaaaatgttggtgattcctattgctgacattactaggtattgctgttatcactgtggcttgttaccagtattcatattttaaagcaatgctaagtttcagtcagaagttactgaaaataaagatgtaaatttgttcacattcaagttcatgaccctacctattaatcgaccccatagggtccacgatctccaagttaaggagacctaataaatgaaatgtgcagatagtctatgaataagttaaaattcaaggcaaatatgtaaactaatataggcatactttaaaaatcaagccataggccaggtgtggtgcctcacgcctgtaatcccagcactttgggaggctgaggtgggtagatcactagaggtcaggagttcaagaccggcctagccaacatagtgaaaccccgtctctactaaaaacacaaaaattaaccaggcatggtggcttgtggctgtaatcccagctactcaggaggctgaggcacgagaatcacttaaatatgggaggcagaggttgcagtgagctgagatcacaccactgcactccagcctgtttgacacagcgagactctttctcaaaaaaaaaatcaagtcacaaatataaattctgacatttttccctttaacattttacagtgacattaatgaaaggagcttggaatactccaaagagtcatggaaaaggagaagggagtgttagtgatttgacatctgtattagctagggctggtgtaacaaaagcaccaaaaaatggtgtggtttaatacaacagaaatttactgtctcacagctctgaagcctggaaattcaaaaacagggccaggcgcagtggctcacgcctgtaatcccagcactttgggaggccaaggtggacagatcacctgagcccaagagtttaagaccagcctaggcaacataacaaaaccccattcctacaaaaaatacaaaaatcggctgggcacgatggcacgccctgtagtctcagctacttaagaggctgagttgggaggattgcttgagcccaggaatttgaggctgcactgagctatgatcatgacactgcactccagcctgggtgacaaagtgagaccctatctcaaaaacaaaacaaaacaaaaaaacagaggtgttactggggctgtgctattgctgatgattgtaggggaggattctcccttgcctactccagcttctggtgtttgctgacagtcctggcaatgctcagctcctagctgtatcactccaatcacgtgctgtcttctcctgtatctttacatcatcttccctctgtgcaggtctgtctctgtgtccaactttcctctttttataaggacaccagtcatattggattaaggcccaccctagtgacctcatttgaacctgattacctctgtaaagaccttaatttctaaatcaggccacattctgaggtcctaaggcctagaatttcaacacagctttttgtggggtcataactcaaacccataacaacatcagaacattgtaattcaaaggaacacaaattcaggtttactttgaaactaaatatttctagaattaaatttgtccagagttacatggtctagtcttactttcatacaactctcttctaacacactgtgtttgtgctggatatccctttatgagttttaagaactctgaaatgtgaaaagtacaaataagtaatctcttgcattcctattttagtcaaaagatcaggctccaaattgctttattcatctttgagtagtattgcagaaaattttaactgaaaattatattcaaaatactgttttcaatttcctaatggaactgtaaccaattagtcaaccacaattattgaacaaccatgagtactgtattccctgaggagaaaaaacatagtttttaggcaactatagcaagatgcagcaaatgagatttatacacacacacacacacacacacacacacagagatacccagtagatgcagaatcaaggcactcttttatttaaaaaatccttttctctgccaggcgcggtgcctcacacctataatcccagcactttggggggccaaggtgggcagatcacttgaggtcaggagatcgagaccagcctggtcaacacggtgaaaccctgtctctgctaaaaatacaaaaatcagccgggcatggcagcacatgcctgtcctcccagctactcaggaggttgaagtgggagaattgctttaacccaggaggcagagattacagtgagccaagatggcatcactgcactccagcctgggcgacagagcaagactccatctcaaaacaaagaaaagtaaagtaaaaaaatttttctccagttttgtgtctattttaatttttcttctgattttgaactgattaaaaatttcatatctgcaactttagttgtaatatcaagttttgcttttttaaaatcaaatgctggttaatactgcctctacccccgaccccctccccagcaaaaaaatccagaatcattcaaaatcaatcttacgaagttgtcttcatttttttttcttgtttttttgttttgtttttttttttttttgagatggggtctcactctgttgcccaggctggagtgcagtggcgtgatctcggctcactgcaagctccgcctcccgggttcatgccattctcctgcctcagcctcacgagtagctgggactacaggtgcctgacaccacacccagctaattttttgtatttttagtagagatggagtttcacccagttagccaggatggtcttaatctcctgacctcgtgatctgcccgtctcagcctctcaaagtgctgggattacaggcatgagccaccgcgcccggccaaagttgtcttcattttgagtaagatttttaaaaatgtaaaatacttaccacagagaacattttcagcaaatggtagctattataattgtagatgctggatggatggatggcacagagttatcagtggcttaagcccctgctgatagcactgatatttacgtgacgtttagctgtgtggccccctttagttgttctatcctttataaaattttactccaaaatatgttttttgaggagtcctggaacattattatttttaaaataagtaggaaccataattccaaagaattcttagacacataagggcaacatatggtcctttaaaaatatatagatgagcaattcttttagagtaggttgaaagagactgaaagaaaaaaatccagatgccatttgatttcagtgagagaagagtctaaaaagcactcctttgacttaatagatcttttttgagaggtatatgacatctctgtatcttaatttccttctctttaaagtttttttcttttttctttttctttttttttttttttttttttttttttgcctcagcctcctaagtagctgggactataagcgcgcgccaccatgcctggctaatttttgtatttttatagacacggggtttcaccgtgttggtcaggccggtcccaaactcctgacctcaggtgatccgcccacctcggcctccgaaaatgctgggattacaggcatgagccactgagcctggcctccttttctttaaagtgtttatgttaatacctatttcccagattgcttgaggctgagtatatataaatgtctttgtgcatataatagaagctcaagaaaagtgacatccagtttctggctccctctgtcacctcccatcacctcaatctcttggtcaaagtgaccattctcccaggaagaaaaaaactcaatgaaataaaataataacatgcatttcttctgttgtaactgacctttcaatctaaaagaacatcagaatttggaagaaaaagtaaaaagtgaaatagatggttccttccacctctatttgtttctgagcagcttctggtggccaaatgttttcttggtagcatattccctccagcagaaccttccagaatgcttcactccggtgaagagaaggacaacaggctttctaatcacacggtgttgcttgctgagggggaaggcagaggtccgcctgtataatccgatttcatcaactcacactaatcactactgatagtagcaaaatttagcctggatctgcgctgttaatctagattgacaggaggtaaaaggagaggaacgcaagggcacaggaacaaagggcggagcgccagcactcatttccagccttgctcttccgtctggggcttctaatttggtcccctttggggcttctatttttcttaccttataaacaaatgtccctggttgttaggataccagcctttcatggagcggtttcatcaacaacaggtgcgcagtgagcttctggaactgcagggagagcgataacctacgtcgtgaggctgcgcagaaggtacttacaggtactcattgtacctgagactatgtattatttattgaaactgagccctgaattatctttatcctctgagcggcactagtgcctcctaaaatggatgccaacagcagctaatctacaagagctcccacatgctccttgctctcattatttttcttattagtaattgtaagtggtagctaccaagcttcttattaaagcttggagagtaattgggaattgcaattgaacagccgagagaggaacacctctgtgattttggacgtttccacgtggactgaagttttaattttttcaagggactactccacttcggatgttgtggctatacagaagataacatgttgcagattctgcctccatagtgatcagagtagcaatctgtgatgtgtgtgttcacgtgcttaatgcccagaaggaagatgggctatgggaaggttactttcgctgttacttatgatatctgtgtctggcaaaccagagaactttttgcatttgggtaacaaagacgtttggaaatatactccattggattttccatgttggtgaaactattgttgaccgcttcagtactgtatgttgccatgccaaaatcacctaagggcaaaaatgtctcctgggtaagtagatgttgattttatatctcttaaaaagtatattttaagcagaaacacatgctttaagaacttaaagacatctagttgtttcatgttggtaagagtatttggaaaaccttcagaaagcatttgtcttagaaaagcatataaatatctttgtaagtgttagaaatcctttggcaaagtcacggtggagtgcttgctaaaatatgaactataagacatgtaaacactcagtttgttttgccatttttaggtttttaggtttgcttcacctttgcatacacacacagaatttaaagtgcattcatacaaagtcaaggttatgattttaacatgttttcaactccaaaactgtttgtgttgagtaaagattgcctagatttcttttttggggtaagtcaaatgttaagggtagaatatgtgattttcattattcagtgatattgttggtgtgttccttttttccttggaaacaagatagcatagctgtttcttaattttacgtatctaagtaattgccctcaatcaatgatagacatgtataaagtttaacatttcagtaataacaacggcatgttaatcctaatcaaatttgactccttaatattgtttcaaggtggctgggtgcagtggctcacgcctgtaatcccagtactttaggaggccgaggcgggcagatcacgaggtcaagagttcgagaccagcctggccaatatggtaaaaccccgtccctactaaaaataccaaaattagctaggcctggtggcgagtgcctatagttccagctactcaggaggctgaggcagaagaatcgcttgaacccaggaggtggaggttgcagtgagctgagatcgggccactgcactccagcctgggagacagagtgagactccatctcaaaataaaataaaattatatatatagatttaaggtagtttcctaccaaaaacacaaaacctaccagattgagctcagaataacgagaacaatctgtaaactcttaaaaaataagggctttagtttcctgctatcatgttaagtgagcttgatacattaaaattaacaggcaaatggattcctttctattctgtacagaaagttgtgtgtctaaacaccaaattttttaccaccagcccatgcaacctcgaccatactcatcatagaatttattattagatcatcattatggttttttggcaataatgtaggaaaaataaataattccatctttttggtcaagagataacgtttactaccttaatttgaaattcaccaattaggttattcttactttatatgaaatagcaccatatttgtctaaaaatggttattgtggcttttttctgttatagacagttattctttaagagtacttaattaaaagaggtgtaccttagtttgaaacacaactctcaaaattatttcagaaaaattgacaaaatttttgaagttaattcgcttttaataatggatactttttgtcttcatattattgttatcgttgattcttcacttcctcttagtaaaaccaagagatatgattcaggaacctttggcctaactggtgagtttctttccctccttatacggatgggtccaagggctagttctgatgtccaaatgtgagtttgctactttctgccagcacataaacattaaagaaaagagtcgtttcagaagtacatcccctccttcatctgattaatactcctaaaagattaattctgtcaaactagtgcctgcctaatggcatgtttctaccatgaaagcaaaacttgaaacattaagctcagactctacccttgggttgggtttacttcatactcaattatgctaatattttttgaaaagttcaagttgttggctaaaaatttaggagcacttatttcaagagagtcagcatagtttcatttcctcaggttaaaaattccccggtgtatcccacactattacaaaatgcctctgtaccaggtttgtccaaagatgagttatgagtttaatgactgccatattacagagaatacagtcatttggttggtgtgtgctgattatgcagtggtccaatcattcatgttaatgactatgataaaattccttagtttgactttagggcatagagagagagactttgaaatgttgatcattgcttcagttttcaccagtcacggttttttaggtattgaatgacgtttccctgcattttttggctatgtgaagtgaaatgtatctggtcttcctgcttttgccactggccagtttccatttggatatttatttagacttgagttcaggaggagaataaaatgattccccttgtctctttaaccacatagtaaacttcccagtggtgacagaagatcatgtaactcttcctccctggcccctcgggcacgtttccgagacctgcttcactccatgtgataaacatgaacacatcttgtggaacactgcaagccccagagtggaccaccaccttctttctcctgttcatgcctggtcagagtggtatctaggcaactggttaaactgcttgacagtgtagctctctgtgcaatggaaaagatgatagcaaccagcatgttctctgagatgtgctgaggcttatcagatcatcctggtacaagggttcgacattcattcaacaaatgttcacagagtgcctcttctatgatcctctaggtaccgaggacgcagtgaaaaagatccttgagaatctccaacatcatagagcttacattctagggaagggagaaagacaaaaagcaaatacctaagtagtacataagatggtgaatgaaatagaacagggaaggggttaggaagtgccaggaattgagaggtggtgttgccaattggttggttaaacctatttgagcagagacttgaagaaggtaacagagtcagccacggggaaatgtgggactcaagcattccctgcaaaggaaaaatgctcagatgcaaaggcaggagtctgcccagaatgtgaggaatggccagaaggctaatatggctgaatcgtagtgtcattctttcagtttcctgtgtctcttgtatgtatttgcatatctttagtagttcttcatgggggattccaagacagtcctcaattcctctgttcaaatccccagagaattctgacatgtaggaacttcgtaagaaggtgcacaccagtgcctgccaatgaaggttataggtgacaggagagagggggcagagcactgcagacgcccatctcatcaccctgacacagtcaagcttcataagcagccctgaagagttgataattttgttatttttatttttttaccgatattgaggcagttttacaaatgagtattatggtgttttataataagagaagttaggagcaattttaatattaaagatagtattaaaaggggggatttaaggatacaggctaataggacacagcacttccaataacaatgcatactttttgttagaaaatggtgcacaattccaaactttattatagaatctccatatattctttgagtataaaaatccttcctgttttttgagacatgatcctgcttccacttgttcatgacaactgcatagacccctaatggctgtagacctgactttataccacactaaccaagtttgttgaaaagtcactttgccttggcaatacaaaaataatggactccacttaggatcctgatgctaggcaaactctcttgctgttcttttaattctcaggaactgaaatcagtcacactgaacctcccagtgttccatatctatggtcctacatataacaatgattacttgtatatggtacatttcattggttgttcttaatgttttttattatgtgtcataagacactaataccatttaagaaaatgaagggaagctgtaaagaacataaatgagtgacttaggttcacataacaaagaatgctagagattaaataagaactcagaattttggagtttgctttctgtttcttgattgagatactcctagcaaatacattaagtatgtgcatgttattatattataaaagtagatgttactagaaattggctaaaagactaacaatgacaattaaacatactgcatagacgatgagacattgactcatttttgaaggggaaaaggaaagggttctgccagggacagaagtccatcacctttccttggtcattgaatgttatttccatgtagatgtctctctccagttgtcaaaaatcactattctttttgcgtgttttttttttttttttttttttttttaccctccgtgatcactgtatctgtcttgatgaatttttttcaaactgaatggctttaagttatgactttatcagagatctatctcttgttgcttttacctaatttgatatgcaggtttcactgcaacatctagattactggtctttccgacaataacagtttctaaaaatatctgattttatatttttcttttttattctctgaatgtttgccactgtcatcagaaagagctccctgttgttactctcctttgttccctttctggattacattaggtttactgaacttgttcaaacatctctgaagattttaattttttcaactttactcacacttgacaggaaatcatagtgtgtctggtgatacagatacgctatttacttacgctcacagccatgaagatttttccagacactcatacgttgagagagtattttcttctccaataaattaataagcatatagatatattttttttaatagataactctatgtctagggaaacctgagagatcacaccaggtggcttcagtgaatatgaatattcactagccagccataaagcattaggaagtatgtgtttgtatacagcctgccactaccgattatatttaatattcaaatgtgtaccttttaaaaatcaaagttcaaacttacagggtacttagagatttaaaagggaacaagtcatcagttcctatctcaaaactggcccatttacccttctttcctctttctcatttctgatcctggaaacaaaattattttctcatacaacatcgagagcattgcagacaatgtattatagtgagaaagtatgtgcggtagaggcagattctgagtttaaatcctgattctgctagtagttgttgactttggacaaattattaaccactaaggtttccgtcattcatctgtaaaatgaggataataacacttttcctgtaggagtattttttaaaacaacatgtaaaaagtatgtattgtagtgccagcgcataaaagtaatttgttaaaatcgtttcctccttttgtctgccctttcttttccaatcctactgctataacatgaattcggggatttatcgtcttgtatctactagacaccatggcagccttcataccaattgctaacttcccttctccattccattccaagcacttctattcaatatgtttcctttaatccagattttcatcagttttgaagcacatcataatcctttaaaaattcctcaggccaggcacaatggcagatttctataatcccagcactttgggaggccaaggtaggggatcacttgagcccaggagtttaagaacagcctgggcaacacagcaagaccctgcctctacaaaaacatttagaagaatttttttttaatagccgggtgtggtggctgtatgcctgtagttccagctactcaggaggctgaggaagaaggattgcttgagcccagaagttggaggctgtagtgagctatgatcatgacactgcattccggcctggatgacagagtgagaccatgtctttaaaaaaagaaaagtttctcaccatccatagataattaaacatttccaggccgactgaattcctccacggagaagacaggagagggattcagaaccaacctgagcccagggctgctccactccctgctctctaccttcttccccttgggtttgagcccagattttaggtgagatgagctttcagctggtggaacatctctcttccgttttgctgtgataacaactctagttcttatgtggagggagggattaaagtgcattggagtgcactatccctccacagaagtgcttcaccctgcagcgcaaatgtgcttcctcctgggttgggcatctagcccaggtatttctgagtctgacgatcatggagtgaaggccgaagaatgtggataaagaaagggaaggagaatcaaataatgccccccaagttactaagtgtcttgctgaacttttgctttttctatgtgggtgaaggtaaaaagagataactcgagacagtgcaggaaaaatatcatttaaaacctaaccttgaggctgggcgtactggctcacgcctgtaatcctagcactttggaaggctgagattggtggatcacctgaggtcaggagttcaagaccagcctggccaatgtggcaaaaccccatctctactaaaaataccaaaattagctgggcatggtggtgggcgcctgtaactccagccactcgggaggctgaggcaggagaatcacctgaatccggtggggcggaggttgcagtgagccgagattacgccatttcactccagcctgggcgaaagagcgaaactctgtctcaaaaaaaaaaaaacctaaccttgagatcactatatccagactaaacaatgaagagaatgtacagtgtgaaatttctaggagaaaatgttgatctatgtcatagatcattttaaatgccacaggtgaggccgtaagggcccaggaatgggagaaccagttgtgaatcattccctaaaatcaagaggtgatacaatgtgcaatgtgttaccaactcatagccagttccaagagatctgggtctatatccggtttggggattttgtctccactactccagccttagtgcaggctggctgtgagttgcagccctggtggacattagatgtcttgaccagcaggtcaccggacctttcagagaaaacatgccaccttcttgtagttcaactgcactgtgagaggggcagatggataatccctcatttaaaggtaagaggtaaagcagaggtaataagaatggcgggtttcttccactctgcaaaaactgctgtatgggctgtgtgggcacacctttgagctcttagatggagacgagctcagggatagtgcctttggagaaaaggttggagagattgcactgtgagaggcttcaaatcaagttaccaagtaaataatgagtgcagcacaccaacatggcacatgtatacacatgtaacaaacctgcacgttgtgcacatgtaccctaaaacttaaagtatactaaaaaaaaaaaaataaaaaataaaagaaaaaataaaaagaaaaaaataaaataaaaaaagaaaaaaaaagttaccaagtaaatattaacccttttgcaagaattcattaaaactaggagcaccagaagtcgcatataatgcctcttgcccacaattcttaatagttctctttctttctcagaagtgttctggattggacaatacatggcatgctcactctaattgtcataacagagtacgggtggatgatcatggtgggaaggagtaggaagaagtagggcctgggaaagtgtgagttttcccaaggaaaagctccactgtggttactcagaaattcagtggagaaggggagcgggagcgtggctgcacctctggcctactctggctttaggcatcagttttgtgactttggatatactaattagtctctttgaaggtcactttcccagcctgggcaacatggtgaaaccccatctccacaaaaaatacaaaaattagccaggcatggtggcatatacctttactcccagcttctcaggaggctgaggtgggaggatcaattgagcctgggaggttgaggctgcagtaagcagtgatcgcaccactgcactccagactgggtgacagagtcagaccctgtctcaaaaaataaaaataaaaaaaaactttcttcacctgcaaaatggagatcattataactcatgttgctgatggttgtgagaatgaatcataagaatgcaaagaatatgtatattgatgataagagatgtcacgagaaagagcagctgggattatgctggaccatgctacttaaaatcacctctgatgccaatctagatttcttagtctggccttcaggaacatctatagtcagtctcaatctaaatttccgaccctgttctccaccactttcataggtagagcctctacccagtgaatgcatgttgcatttctttttttttttttattttgagacggagtttcactcttcttccccaggctggagtgcaatggcactatctcggctcactgcaacctccacctcccgggttcaagtgattgtcctgtctcaacctcccaagtagctgggattataggcgtgcatcaccatgcctggctaatttttgtatttttagtagagatgaggtttcactctattggtcaggctggtctcaaactcctgacctcaggtgatctgcccacctcggcctcccaaactgctgggattataggcgtgagccaccacgcccagcggtgttgtgtattaatatctctgtatgtctgttgctgtgccttgggtaacaagttgactcctacactcctgaaatttcattgctgctacttctactaagccaagataaaaagtaagtcttatcagcaaaagtgatgtgaaataaagagatcattggaaatactatcaccttgtctaaaatacatttgtgtttatgttactaaaactaacagaacctattacagcaatgacaacgtatttcaaaactctaggtgtttgttatgccttttggcaattaacacctttaaaaaatgcaatctgacgggtgaatcacgaggtcaggagttcaagaccagcctggccaggatagtgaaaccccatctctactaaaaatacaaaaattagccgtgcatggtggtgggcacctgtaatcccagctactcgggaggctgaggtatgagaattgcttgaacccgggaggcagagattgcagtgaactgagatcgtgccactgcactccagcctgggtaacagagcgagattccatctcaaaaaaataaaaataaaaagcgcaatccaaatcaacaatgatgcattgacttctgggaaaaaaagtaacagaatattcagagtactctggggaaaaaagaaagataggatttcctaaggactagtgtcagttcccaagaaaatgagtgaggaaagaacgctattttaacttgcatgttacccaaaagtgaaagtgagatggagactctcaaggtagagagaaaaccaccactccttttcaaaaaggggactcgtgttcggaagtgcaaacgtagcagtgttcctggcaccacagaagtttggtgattttaatcctgacaccatttgctgtttctgaacttttacatttatcgttgttattaacttcccaagtcaaaccaggggagtgacgtgagctgactttgcgctctctgatagcacgaaggaaagccccaacaggtgaatgacatggttctggcatcttttctgccttgataaacaagctccacagtaatcccagcactttaggaggctgaggtgggaagattgcttgaggccaggagtttgaaaccagcctgggccacatagcaagaccccgctctacaaaaaaacacaaaaattagcgggacatggtggcacatgcctgcagtcccagctactcaggaggctgaggtgggaggatcatttgagcccaggagtttgaggctgcagtgaggtatgattatgacactgcactccagcctgggtaacagagcgagatcctgtcgcaaaaacaaacgaaacaagctgttcaggtaaatccactaagcctttctctcttttttttttttttccttttttgagatggagtcttgctctgtcacccaggctggagtgcagtggcacaatctcagctcactgcaacctccgccttctgggttccaatgattctcctgcctcagcctcccgagtagctgggattacaggcatctgccaccacgcacagctaatttttgtatttttagtagagacggggtttcaccatgttggccaggctggtctcgatctcctgacctcgtgatcctcccaccttggccccccagggtgctgggattacaggcatgagccaccgcgcccagccgcctgtttctaatacataggaaggagatgaatatgtcacacttcctggaacccaagaaaataacccaaattatgcattctataaaagtaaacatagccttaagaaagactaggaggaaaagtcttaccaagcagaatgaagaaatagcatagtaattgatttatcaaaattgcccacatcaggcctcccaacttgacgtaaagaaatcaaaatgaaatcactcatttagcagtcaaagttgtagaacagactttgagatattgtcccagtgatgcccagaacctgaatagcagcagtccagggaagtttgatggggtcaggggtgggtcggggggcgctttgttgctgtagcagtcttccaagctgcttgcagatctgcagcatagcagcagcagaagcgatagcgcctgtatttaaatgtgaatgacattatacaaaatatacttgcatgcacgtttatagcagcagaattcgcaattgcaaaaatgtggaaccaacccaaatgcccatcaataaacgagtggatagagaaactgtgcgatatgtacgcaatggaatactactcagacataaaaaggaatgaattaatggcatttacagcaacctggatgggattggatactgttatcctaagggaagtaactcagggatgggaaaccaaacattatattcatatgttctcaaccgtaagtggcagctaagctatgaggatgcaaaggcataagaatggcataatggactttgaggactcagggggaaagggtgggaagggggtgagggataaaagactacaagttgggttcagtgtatactgctcaggtgatgcgtgcaccaaaatctcacacatcaccactaaagaaacttactcatgtaaccgaacaccacctgttccctaaaacctatggaaataaaaaataaaaaataaaactaaaatgcaaatgacaggtgtgcagtagacttttctagacttgcaggcatattgcagttttgtgtaatctgtgctgaacagagatcgcatctctcttcataaagctcttttatagtttcacacctgtaatcagctgtcctttaaactctgaagcttcacgggggtctccttagactcgttagtctcatggtggcactcacagtggaggatgtccttgttggctactggtgtcacctttggagttgaaggaatagacagtttattcttgtttttgcttttctctcatggctgtgcgggagtgctggcaaaaagataaggatgtgagaaatgtttaagaaagggagaaggccaggcatggtgactcatccctgtaatcccagcacttcgggaggccaaggtgcgaggatcacttgagctgaggagttcaagaacagcctggccagcatagtaagacgtcatctctgcaaataataattaaaagttagtcaagtatggtggtgcacgcctttgttcccagccgctcagggggctgagatagaaggctcgcttgagcccaggttgggaaggctgcagtgagccatgatcacgccactgcaatccagcctgcgtgatagagcaaggccccatctcaaaccaaaagaaaattaaaaaaaagggagaaaaaagaaacacaatccagggccacgtgtctcagatgtcacttacttctcttcataagagccagtactgaattcttagaagctgtgcaacccgtatgaaggcaacccatatgaaggttttcattttctgctactttttcagttatcctggaaaaaatactgagaggcaacacctgttaaggcaggctgtccttgggggtgcgtgtccagcgctgcccttgactagttgtggcactagttacttatcttcatgaagtctgttttccagtccgttcagtgggggagcgttaaacctgtcctacccacctcagacaatgaattgcaaagaaaatgatgtctgtgtaagagttttgacattatgcaacattatatgagattaaaatttattcaagatctagaaaaaccgccagtgtttttattttttattagtattgcttgttgagacagagtcttgctctgtcatccaggctggagtgcagtagcacagtcacagctcgctgcagcctcaaacttccaggctccatcgatcctcctacctcaccctcctgagtagctagaactacaagcttgcacccccacatccttctaatgttttaatcttttgtagagatagggttgcattatgttgcccaggctggtctcaaactcttgggttcaagcgagcctcctgactcagcctcccaaagtgctaggattataggtgtgagccacttcacccggcctaatcagtgttttcatacgtagaattgcaagtcatggtggcagtggacaagtttatttctcaatacacaatgggcaagtatattatctcaaatgaggaaatgaactatgtttataccacctaagagttgtggagcttaaaaaaagtattcagcacatttaagaaaggtattaaatacattttgtttcaaatattgcattgaaaacattgtttgtttccccaaatttccaggtgaaggataagcctgtgctctttttcactccatttttttttcccaatgtaacctaaacctgttaatatctatattcagcaaagctgccctggttgcctggcaaccaggcttcgtgggctagggaaacaccaaggcaaggaaccaaaggcagcgaacacaaccttgactttgcctgccgctgcacaggcgatcatcctctctgtattctgtataaagctctatttccaaaacataagtaaatcttgcaagaatgttagctcgatgctattaggagtttaaaacttacggtttgtgggataacatttcaacataattaaataagcatgaagaaatctctctctctgctcttccttaattaaaacaggggcggtccctttcctcacaggtcatgctgtacatttcaatcccactttttatttcctctgcagaaagatgtgtgcattattcttggaataagatgtaatggaaattgaaatgtcaactttgagaaatagaagtttaggactcattactgccaaacatatatttttgtgtcttatacaaggaagtaaaaagaagaatgaatgaaaatgatttttcttattccaattcttccatgtttccacctttatctcattccctttcttatattctcccctgtgggaacttcatcactttaaaaattaagaacaaggaaagcctttgggttacaggaaataaatgtcgtctacttcatggacagtaaatgctatgaggctgagacagaatttggaatttaaagcttacattatctattgttttattatgtcacttgtttcataaggcagcttttattggttaagttcaatattcagaggaaaagtaaactgaaggaccctgaagcagatcctttttgaaataagattggagaataatataaggtaaaacatgtaactggggctgttgaagtggagatttggctaagtatgacaaaaatgagaacagaatacagagaaaattaactcaataatatctcagcacaaatcctcgaaatctgcaatgaacgtatcttttgattcctaagtcatgaaagaagacagtctttcattattactttgccatgtaatagccatttatatcaatttcacattctactttcttctatccttattccatagctggtgtgagttagttttcaagacaaactggaagtcccaattttaagtaacacctcctaatttgtaagtgttggcttcagtaaaaattaacaacctcactctgtaggtcaaacagaacccatctggaagccaggttatgctcatggttgacatttgtgaccccaggtatagggggagaagaagggtaactgaggaattctcacgtgttaagaggctgcatataaaaatgataagtgttgggaggccgaggtgggaggatcgcttgagcccaggagttggaggctgcagtgagctatgattgtgccactgtactccagcctggacagcagaccgagaccccatctctaaaaaaaggaaaagtaaagtgataagttgtcaaggaggtcagacaagaaacagggtcctgcttcacactttgataagtaagggtgcagaacatttcaggaggaagagaagagacagccagggggccaaaacagaattcagcaagcaggcatttaattgtgatcttgggagaggagtttcaagaggatggtggaagtcaggcacagatgcagtgagttataaggagcgtgtgggtgatgaaagtagaaacaagcaaatatagcctccttctagaaggaggaagtatggccacaatcacttgaggagaagtgagttgagggaacgtgtaggtatatttgtagacacagaacaaatttctggagaaagtagaagataggacaaatacagaggtctagggtttgaaagaattaagaattagagggtagcggaacacatagataaatatgtaaagggtttcctgtggttaatgacaaaagattttgagtagattccataatggttcccatcagccttgttgcagtagaaatgaggtccttggaaaatgaagaaggcaatgtgagagaggcagaagaaggagaaagaagagtctattgtaaaataatcataagcattacggtggggtcagggtgaaactggataaagtgttatgtatggacattctccagcaatttgcagtaaccccagagaaaatgtctaacatgcttttcagggttagtagctaggagccaaagatagttaaggagtgagggcttctttgttgccaaagactgagctgttgaagttctagtccttgggaagtcagccagggagaaaagcaggtgattccgggaggttaatggactgaagacactgcagagggttagagatcatgggaaaagctaagtgtaggtttattttaaaagaagcagcagatagggtgaaaatataaaaggttgtgatctgagaaaagtgtctagatttgaggtccttgggttaaaataatatgggttaaaggcaagaggcggtaaggatgatgtctgtcagttcctggttaggaagtgaaagttcctctagaagaggaaagacaaggtccaagggtaaaggcaggattttgtatttcacatcctgattatggcagagaaaatggtggagaaaaaaaaaataagctaggtgaaatcgtgtttaaaaaaccagaggaatacctcaaaagttggtaaataaatgccattcttttagggccggtcacgtggctcccgcttgtaattccagcactttgggaggccatggcgggcagatcacgaggcctgaagtttgagaccagcctagtcaacttagtgaaaccctgtctctactaaaaataccaacattagccaggcgtggtggcacacgcctgtagtcccagctactcgggaggctgaggcaggagaatcacttgaacctgaaaggtggaggttgtggcgagccgagattgcaccactgcactccaacctgggcaacagagcaggactctgtctcacataaataaatataaatgcgatgctttttccttcatggcatttattatatgtaacaattgtttgttttttaatccccacttccctactaaattgaaggcagactatattttatctattttgttcataccaagttcccagcacagtgatggcttataaaggagacatgtccaataaatatttgttgcatgaattaaaagacagaaccaaggatgggaaagtgaacatataatttgatgccacagacttaaaaagatgtgaggtcactgaataaaataaataggaaatgttctggcaatggaacaaaggagcttatctcttaataaaaatagaaaaacataaaaatgttcaaatcaatgataatgaaagaaatataattaattcaaacatttgcttaccctgcagaaggcaagaaagaagaaggtgctttcatttttctgcgagtagcatgtgtgtattacactgcttcagtcagagaaattaaaaggtaggataacttaagtctaaaataatatatgccaactttttttttttttttttttttttttttgaggtagagtcttgctccgtcaccctgggctggagtacagtggtgtgatcttggctcactgcaacctccacctcccaggttcaagcgattctcctatctcagcctcctgagcagctacgattacaggcacccgccaccatgccaggctaatttttgtatttttggtagagtccgggtttcgccatgttggccaggctagtctcgaactcctggcctgaagtgatccgcctgccttggcctcccaaattgctgggattataggcgtgaaccaccacgcccaagctttaccaacattttctttttaaaaatgttcacgttcaggggtacatgtgcaggtttgctgtatagggaaggattgctatcacagggattagatgtacagattatttccgtcatccacgtaataagcatagtgccctctaggcgatttttcaatcctcactctcctcccgccctccgctctccaggggaccctggtgtctgtgttcccattgtagtgtcctacagcaaaattttctattcttcacatttcttgaaagatcattgtaaaatggcaagtatattttaaaatggcaatgctgtaaaagcactcacagtgatttcttgggttaccactcagcttccccacaaggtcactttcatgagatctggctcttggggtcagaatgaattgtaggttggatacgcatcagcctgccaaaaacaaccccaagtgtgccaagtatgggagccagcaacgttacagaaggcatacggtatgcctgacacctttggctcttggcaaaatgagccaagggtatgacttgacaacttttttgggtgaacaagttgtcccttttgtatcaaatgtcatcagctcactgatgtgtatttgctgatgtcagccagaaaatgaagcacttgcaaaaaatgcaattttaaagcagtcatatttgaatactaacttccactgattctcatttgggtttggaagcaatgcacaattgcccttaaaatagaaaaaaaaaacttattcctcggaagtgatgctgtccttctcccctcgtcgttaccaattttttcactaaaatgaatattgtcaacaatgaagtaaaagtgaagctgtcatttgatatgtttctgaaattttaaaatattgaatggttattttcagactaaatatgttatcttattttttatatgtttaaaggtagcaggaaaagtgactcttgtatttatgacgggagaaagaggggacaattcagaaacagagagggagaccaatagagtcaaaaatgtctccaacagttacataagcaccagactgccaagaatttttacactgaagccggagcttgactgggaagtagaggtacacatcacatgagaacacaggtggttgggtcggggctgcatggtgcagttcaggtcttcaacagggtagactcttcagaaaatgtggatttttcttttttcctttttttagtttagtggagcctcgctctgtcgccaggctggagtgcaatggtgcgatctcggctcactgcaacctctgcctcccgggttcaagcgattctcctgactcagcctcccaagtagctgggattacagtcccgcgccaccatgcccagctaatttttgtatttttagtagagacagcgtttcaccatgttggccaggctggtctcaaatctcctgaccttatgatccacccgcctcagcctcccaaagtgctgggattacaggtgtgagccacctcgcccagcccagaaaatgtgggttttatttgatctggtgtatttctgtttgtttcagaatagatgtccggataaacagtcacctgagaatgaggaaggtgtgtgttttcaaacctgcacataataaaaagactattgataagattattagaatggagatagaaaactaattttaaaattaacattattttgccatttagaaatgaataaagttatttctgataccagttatttgaagaaatatcatcagaggacttaatttatatatccaactaaaaatgatggcagtgctgctgtttctaagctgtgtgtaaatactcagttacagtttcttaatttggtctcaaatagattttttttttcaacttgcgtgctacaggtttatttttctgttgtattttcagcaatgttttaaaactcattctttgaaattctaaaatttgtcaattaagattgggtttcgtagttcttaacatcttttatcctctctaaaattaagtctactttgatggtaataattaggtttactgtgttgataaactaaggaaagcatacaatttaaaaaagtgattttttaggctgggcgtggtggctcacgcccgtaatcccaacactttgggaggctgaggtgggcgggtcacctgaggttgggagttcgagaccagcctgaccaacatggagaaaccccatctccactaaaaatacaaaattagctgggcgtggtggtggatgcctgtaatcccagctactcaggaggctgaggcaggagaatcagttgaacccaggaggcggagtttgtggtgagccaagatcatgccattgcactccagcctgggcaataatagcaaaactccatctcaaaaaaaaaaaaaaaaaaaaaaagtaaaaaaaaaaagaaaattataaagaaaagaaacccacccactgggttcgagcaattctcctgcctcagcctccctagtagctgggattacaggcatgcgccaccatgcctggctaattttttttgtatttttagtatagatggggtttcaccacattggccagggtggtctcgaactcctgacctcaagtcatccacccaccttgtcctcccaaagtgctggtattacagacctgagccactgtgcccggactgttttctttcattttctgttttggtttacaaacctccactttagtcttcaaatacattcattttattaattatgctgaccattgaatttttttatgctggcaagtatattttaatttccaaggacatttcattgcctcatcagtactttttcatagctttttgttcttgttttataaatgcaataatctcttgactctctctgaagataccaatttggattttctgcttgtttaagtttgcttaagttccttgtatttttgtttccctgaaattggtttatctgcttattttggaccttttaggctcttctttctttttattttccaaatatctgcttttacttatttgtccatccatatttgtgaatgattgactactttggttcattataggcaggtggcatgggttcctctggaatcttttagtcttgttttcttagtagtcttctcatctctaaatgagagggcagctgcggctccatgtagataggtaggagtatagacaaaccttgagcaatgtggcggttaggggcgttgacccattgcacagttggaaatccatatacaacttttgactccccaaagccttactactaatagcctactgttgaccagaagctttaccaagaacatcaacagtcagttaacacatgtgttgtgttgtatgtactatgtactgtattcttacaaaaaagtaaactagagaaaagatgttaaaaaaattataagtaaaaaaatatatacttactattcatgaagaagaagtagatcatcataaagttcttcatcctcatcgtcttcccactgagtgggctaaggaagaggaggggttggtcttgctgtcttgggtggcagaagatgaaggaaatcttcatacataagtggacccacatggttcaaatctgtgttgttcaagggtcaacggtagatggcacttagacttccctataaggtgtgtagtcagggaaccgcctggtagggacccctacagtcacctgacttaggaagtgtgttactcttggggatggagcacttcatttcttttactcctgggcagagctgacttttcttctccaatgatagtccccttctatacttctgggtatgtcagtatttactttaaactactctattcctctttcaatcccacaccttttgaaatgcatttatatatttgatgcttcttatcttttttaagcctgtaagttgtctgactaacagaaatttcccaagtaggtaaatcttaggaaacaaattaaaatgataaatatggtgaaatttaagaccttctaaatgattaataaagtatataaaattcataagtttgcaacttaaaatctcaaatctaaaccaactactcagtcacacattttaaattggaattaaatgactgatctgtttctattgagccgaactctcttaaacactaaaaatatgtaaaatgtgaaatatgcacaagctcctttacataaaaaaatattatttatatttgtttagtcattgaaatagctctgcttttaattataaatttttctggacttgcccacaaaggaataatttatatcatcctagctcagccagttaagattatataacagccagaaatattggcccagatgctgaataaatccttgtcgatgactataaggagatacacagagctctgttaaggtcactgtatcagtgtcctttaagtgtgtgtgtttgaaggtgtggggtggcaggatgcagggaggaagagctgtgatagcccaggtcattcagatccctaatctgctcttttctgtcttcatacactgaattagatttggcctttctttagcttttaagatttatgtgtgccttttccatctaactctaaatacctttgataagtcctgtctcctttgcctgtattttttaacacttaggactacagaactcttgggggcgggggcattcaaatggcatccagagttttagtgcgttctcctgacattgacttttttagccacatttcaaggtcatgctactgacgattacggaccaagagaagagcaagtgactgctgacctctagaggatactcaatgcaataaatgattgtttttctgtgctaataatagcactgacatcatatggttgtaataaatttgaacaggatgattgaagcaaatgtacagcgcctagcatgcactaagaatttggtgactgtgatcattttttatagttgcatttagataaagaactgtccctaaaaattattcatcgttagatgagaaagaaacctttaagcagatatttagataaggggtgttttcttttatatctccagtatattcccactagcactgagcaatattttatgaatctagtatcgcaaaaacagtttagatttatagcaggttctcagcctcagcaccgtggccatttggggctggatatctcgttgccgtggagccgtcgcgtgcatggtaggatggttagcagcgtccctggcccctacgtactagacgccagaaacactcctctccaactgtgacaaccaaaaatgtctccagaacctgccagatgtctcctgggaaaggcaaaattaccaccattttataaccatgccaattgctgtgtatttttttaaatctgttttcctatttgcttctctgaactcagttcctatctttggagctttctatcttttgacctaaaagtggcatggaatatctcaacacttccttttcctccccagctcggggtctaaagaggagaatgtaattaagattaaatccaaagctttatttaaataaataatcaatctattaaggggaaaatatgctccactaaagccataaagccatcggctatcactccttcttgtgagcctgacttgctttttcggtttgtcgctggttaagagaattgcagatgtattccattgaggaaagcggtatgttcccacactagcgaaaaacattgtattcttctagttaatcattttcaaagagctgtttctatttctggttactacaaaaataatggcctgcaggtcatctatttatgatcaagtaaattccgcttcattgaaatgttgtagactttagaagaaagaaagaaaacacactaaaggcttctggacagtcaaatattttaacttggagtgtgaaacactaaattaatcacacagtaacttcaggctgttattagccttttatggtcaatgaatattgattgttgagtgaatcaatgattggacacacgtatacatggattttatcacttggaaactctataattatcatactaaattcccgatattgtggttaatagctttctagaaaaaagagttgttataaaaccataatgtattactgttaaaagttgggattcggggaaaagtaagagctgtataattaatccacctatcaaaaaataatcctaattaatatttttattgttagtgaatttgaatgttagttgaattgttcattttggataaggagattacaaagatgtttgactctgttcacaacatggggaaaatgattgggctatctgagactgagttatcaatagagtatactttttgtttgttacatcagtaaatatcagggttttttttttctgtttttcctccttcttcaagtctgaaaaattatttgcctagaaggggaaacatattcagacaattgaaattccacagttcatcttcccacatttgtgagaaaaaaaaaacgtgagccaccataaagtaactaaaacagctaaatcagtctattactgttgccctcagttaccattcaaaaactgtctgccatacagcaaaacattttttcatacacatgaaccctacagtacccactgtaacaaatacagcaaaaatattacagaataaaaacgtctccaaggtccaataaaagatgtttgtttgatacagtagcaataccagtgcacctgaagagtattacttcatcctgaaaacctcttaaaatctgcaccaaaagattaaaaaacacttacactaaaaacttactaactcagaaaaactcatgggaaggacaattggaattctagtggtgtttcatttctttttttaaaaaatacttgcccttagaaattcacatactaactctaacctagtaagttagatagacatgtacaaagtactttctaattcagagataaaaacagtgggaccaggcgccatggctcatgcctgtaatctcagcactttgggaggccaacgccggccgatgacctgaggtcaggagttcgagaccagcctggccaacacagtgaaaccccatctctactttaaaaatacaaaaattagcagggtgtggtggcacacatctgtaatcccagctacttgggaggctgaaacaggagaattgctcaaacttgggaggtggaggttgcagtgagccaagatcacaccactgcactccagcctgggcaacagagcgagactctgtcaaaaacaaaacaaaacaaaacaaaacaaaacaaaaacaaaaacagtgggccagtcactgtagctcacgcctgtaatcccagtgctttgggaggacaaggcaggaggattgcttgagcccaggagtttgagatcagcctgggcagcaaaaagagaccttgtctctatttaaaaaaaaaaaaaaaaaaaaaaaaaaaaactttttttttttttaattagccagatgcagtggtgcctgcctgtggtcccagttgctctggagcctgaggtgggagggtaacttgagcacagaggttcaaggctgcagtcagctatgatggtgccactgcactccaacctgtgtgctagagtaggatcctgtcccaaagaaacaaaacaaaatgaaactaaaaagagtggtgtgttggtaaatgtttaatattccactatccaaaaaataaagaagaaaataagttctgatgtgtagcgctttccaatttccatggtataaatactcccaccatggacaacttcaagctacaacatcgcctcactgaatgcagagctgaaagtcatgctgctgacaccattctgcagtttccatcatagacgtaatgaacttcggagtacagacagtagcaaaatcattaggaagttatgagttttgagtattgtctttgtttttagcataatttatttagtcacaggttttagtaacttctagtaatggctgtatttgacaactgactctccaaattcccaaaattttaacagtcaggcaggccagctccaggagcacacctctgagatacattatatatgtgtgtgtgtaatttacatttacatttacatttacatatatatgtaaattctctaaaggttaataggtacttgaaacatctatttcccaggtgttttaaagtaattttttgcagtattagcatctacttattcaattccctagttctagtatctaaaacaggagctggtataaattaagttctcaataatgttgggtagctgcctagtcctaacaatgtgaaataggcctgataaatcaaaggaaagttcagttagcctgtattatctcaaattatctctgaattaaaaatctgtattgataactagaaaaggtctttctttttttcttcccccctctctttttttttttttaagacagagtctcgcactgtcacccaggctagactgcagtggtgtggccatagctcattacagcctccaacttccaggctcaggcaatcttcccacctcagcttcctgagtagctaggactacagatacatggcactatgcctggttaaattttgtattcgttgtagtgccaatttcaccatgttgcctcagctggtcttggacccctgggctaaagcaatccacccacctcagcttcccagggtgctggaattacaggcatgagccaccagacctggtccctaggaaagatcttaacctactcaataagcctataagaataaataagtggcttcctccaggttctctgtcctttttgtattaggatcctgcaaatcttagcactgtcttagccccagcagaccttgccaacttacttcatccttgggtattctttttataattaccctcaaggaagccatgcttcttaggagagtggagaagagaaaaggtaagctcctattacaagaagaaactttgctttttacctctaccaccttcacaatccagcaagaattgaaaggaaacacattcttacctcccatgcactcataaacttacagctgtctccccattccccacaccaccccctgccccccacacagaaaacctactttacaaaaactgtcctctcaaaggtctccagaaaccttctccttgcttaatctaatgacttccttttggccttcatcctaccaaacttttccctagctttttttttttaaatcttttttaaaagtttagatttgggggttacagatgcagatttgttacatgggtatactgtatgacgctgaggtttgggcttctaaagatcccattgcccaagtagtgaacaaagaacccaatagatggtttttcaccctttcctacctctccccttttgggactccagtgttcattgttctcttctttgtgtccaggtgtacccaatgtttagctcccactcgtgagaacatgtagaatttgattttctgttactgtattaatttgcctaggttcttggcctctagctgcatccatgtggctgcaaaggacatgattttattcttttttatggctgcatagtatcctgtgggtgtatatgtatcacattttctttatccagtgcaccagcaacaggtgcctgggttgattcctcatcttggctattgtgaacagtgctgcgatgaacatatgagtgcaggtgtcttttggtagaatgatatgaccctaaggaacatccattctttcttgaaaatttctgacatttatttattcatttattccatacatatttattgagtgctcctctgttccagccattgctctggacattgggaaatcagctatgaataaagaacatgaggtctttatgctctaaaagaatctattttaacctaggaatacagcttacaagggacctgaagtacctcttcaaggagaactacgaaccactgctcaagaaaataataggacacaaacaaatgggaaaacattctatgctcatggataggaagattcaatatcgtgaaaatggccaaactgcccaaagtaatttatagattcaatactgttcccatcaaactaccattgactttcttcacagaattagaaaaagctattttaaatttcatatggaaccaaaaaagagcctgtatagtcaaaacagtcctaggcaaaaataacaaagctggaggcataatgttacctgacttcaagctacactacaaggctgcagtaaccaaaacagcatggtactggtaccaaaacagacatatagaccaatggaatagaatagagacctcagaaataacgctgcatgtctacaaccatctgatcttcaacaaacgtgacaaaaacaagcaatggggaaaggattccctatttaataattggtgctgggaaaactagctaaccatatgcagaaaactgaaacaggatcccttccttacaccttatacaaaaattaactcaaggtggattaaagacttaaatgtaaaacctaaaatcataaaaatcctacaagaaaacctatgtatgggcaaagactttatgatgaaaacaccaaaagcaattagaacaaaagccaaaactgacaaatgggatctaattaaactaaagagcttctgtacagcaaaataaactatcatcatggtgaacaggtaacctacagaataggagaaaatgtttgcaatctacctatctgacaaaggtctaatatccagaatctacaaggaacttgaacaaatttacaagaaaaaaacaaccccatcaaaaagtgggccaaggatataaacagacagttctcaaaagaagacatttatgaggccaacaaacatatttaaaaagctcatcatcacagattatcaaacaaatgcaaatcaaaacaatgagataccatctcacatcagtcagaatggtgattattaaaaagtcaggaaacaatagatgctggtgaggctgtggagaaataggaatgcttttacactgttggcgggaatgtaaattagttcaaccattgtggaagacgatgtgggaatttctcaaggatctacaaccagaaataccatttgacccagcaatcccattactgggtatgtacccaaaggaatataaatcattctactgtaaagacacatgcacacgtacatttattgtggcactgttcacaatagcaaagacttggagccaacccaaatacctattaatgacagactggataaagaaaatgtggtatatatacactgtggaatactatgcagccataaaaaggaatgagatcatgtccttttcagggacatggatggagccggaagccatcatcctcagcaaactaacacaggaacagaaaaccagacactgcatgttctcactcataagtgggagttgaaaaatgagaacacatggacacagggaggggaccaacccacaccagggcctctcagggggtggggggcaaggggaaggatggcattaggacaaatgcctaatgcatgtggggcttaaaacctaggtgatgggttgataggtgcaacaagtcaccatggcacatgcatacctatgtaacaaacgtgtacattctgcacatgtatcctggagcttaatattttaaaaaataatataaataattaaaaaataaaaaggcacaacaaagggaaggaatttaatttttgaaaaagaatattttgtaactgagaaagatagtaaataaacaaaccaaataaactgacaaattaaggggaagtgtgagcgttttgcagtagagtgaaggactctctaatgaggtgacctttgagctgagacctgtatgacaaggaaatgccacagggtgagctaaggtggagagagttctggacagaggcaagtgcaaaggccctgaggaagagtgagtctggtgggacccaagaacagagaggccagggcagctggagtggaggccagtggtgaggatagcagcacgtgagtccagacagaccgggagggacagattcactgtcttcctcctatagctttgctctttggctccttctgaaggcatcattccaccgagtatcaccttcccctccaatcactccccgatccactttcatgccgaccccgccaccccaaggacctgtcagctcctccataaactgatatctcaccagttcgaattaatttccccctctttgattcacacgtcaaactctgttgacccttttatacccaatcctcatgtactctccaatttttctaccagattggaagctgtttgagcacagggagcttttgtcttactcatcttcagtgagggcaaagtcttcgtagttgcattgttatgtttgtttcatttgctttgctttgctttggttttgtggtctatgacatagttaagtacgaaacaaattttttttcgtttggtgaaatgagtgaacatatatttaatgaatgttgttctggcaaaaattttgaaaaactagtgcttaaaacatagcttagaattaagtctttgcatgaaaaaagacacgattattagaggcagtagaatgtgatgtttgagagcacaaagtctgaatttagactgcggggacataatcccagccctgccacttactaactgtgatcttgggccagttacttaacttcccatgccattgtcatctcatctgtagaatggggatagttgtatgtaacccacagggttgttttttaggttgaatgaataaatgcatggaaagaactagaaaagaacatagttagaactgcgtaactattggctattatttacttattgatgggctgaaaaagaatatacttgattttcacttcctgtccagcaacatttgtctgatttttttgcacattttggatgctctcaatagtcatttcattacaagtagaataaccatatccaagaaaccaaggatttgaaaaagaaataattgtcttacttaactaacttgatttgcaggtagaactactgatgataacatgcaaggggacagaaagctcatatttttccttctaaggcaactattagtaaatcctttatttcacacaccacaaactgaagtatttctgaagtgcagtccaggaagaaaatgtgtctcttagaaacagagaattgagaaagcagaaatagaccttctaggtgaagctgaggacttctggtgcatccctgcaggccatgagacattttctcagataagtgggaagttgatattgagcctctgattactctgaacaccttccctccacctccaactgatggcatttattgattagatcaacttggggtataagtgcagtgatgtaactagactttgagagattgtcttaggttatgttttgactatgcatgtatttgagaataccacagtacttagaaaatttaatttatttcaccagctaccagaagtatgacaaattagtgattgacaaggcaattgctagtgggaaaaaaaaatgaataagacctactgtttgacagcacaatagggtgactatagtcaataataacttagttgtacatttttaaatcacttgaagagtataaatggactgtttgtaactcacaggacaaatgcttgggggcatggacaccccatgctccgtgatgtgcttatttcatattgcatgcctgtatcaaaacatctcatgtaccccacaaataaatacacatactgtgtactcacaaactttttttttaaaggagagaaggcagttggtgtttggtattttaatcacctcactagtgtggatatgtgacaatcataggagccattacctcatattaggtcctggcctgttgatgcatcttttgccctctgcccctctttttgaattgtttttgggattcatgggttgttggtagggagaaacctttctaagccaggggtggtggctcacacctataatcccagcattttgtgaggccaaggtgggaggatcacaagaggccaagagttcaagaccagcctgaacaacatagcaagactctgtctctacaaaaaattattaaaaaattagccaggcatggtggcgcatgcctgtggtcctagctactaaagtggctgaggcaggaggatctcttgagcccaggagttggaggctgtggtgagctatgatcgtaccactccactccagcctgggcaagagagcaagaccctgtccccacaaaagagagaaacctttctaggatgttaaaatccctcaaacagaaatcttagaaatcagagagtattaactctgatttccaaattaacatcttggaaatcagagaatacagctaatgacaagaataattaaaatgagctgaataacactcaaaaaagaatgcaaatcaactttcatggatgaaatcgcatgatttgtaaaaagcaggcagtgagcagatattttgtggttaatgtttgttgattaaggttctttgctgttcaccaacacaatcagtaatttgtttttgttgtttttatatgtaacaagtttgttgtcctacaaaacatcccacatttccataattttacaaaattaccctgaatgagatggaataagccgattagaaacaaagatctgagagcaatgtgatatctctaattatatgattttatttccttttaggaaaatggagtagcttttaatgttctattaatctctgatttcaaagtgaatatgaaagaaataatgactatatttgtgaaactaaggtagatgattgtcaaaacatgacattaaaggaataaattcttaaagtatcttatttttgcgttagagaccacagctggctaagtcatttacattaatagacttgtagtgcttttacatgtgcagtagtgatagtgtattaaatttaaaggtcttacttcctgcctaaaaacatcaagaaatatttttaatttttttttttttggaaatgagatgcctatagaaaattgcaagaaaaatgatagccactaccttaacttttatggtgatattctttttttttttttttttttttgagacagggtcttgctctgtcacccagactggagtacagtggcatgatcatggcccattgctggcttctcctcctgggttcaagcagtctccagcctcagtttcctgagtagctgggactacaggcacatgccaccacacccagctaatttttttttttgtagtgatggggtatcactgtgttgcccaggctggtcttgaactcctgggctcatgcaatcctctcgcctcagcctcccaaggtgctgtgattacaggcgtgagccactgctcctggcctctccttgtttttctttattatttttccatatctttacacatccctaagcaaagtggagtgattttgcctatttttgtattttgtatgtaaatgcaatcatattctaagtatatattttttgagggcttggtttttttttactgaatattacatttctgcatttggtctgtgatatttgtataatattccattttagaacctatatcacaatttatccactaaatgttggtgaacatttagtctgttttttaattttggaacactcatcgaatcatagtatagtaatgttcataagtatgaatctgaataatcaaaaaaagattcacttggattccatatttccagtgtaagattgtatggaattagagattattctccccagaatggatctcaatgtgatatttttgagcagttaagagtgagtctcaatactggaaaattcacttacttggaatgtcctaatgaaaagagataatcacattcaataactacactgaacagaaagcaaaaagttggaaagctttatgttgttaatagattttcctattttctccatccagaaaataagtagtgagcttctttcaggcatgttttaaactgttacaatatgattacacttctttgaacacattgaaatgagacaacataaattcagtcatctccatcttaaagtcatttgtagaaaatggcatgttatattccatgaatagcctgctgatgtacaacagataaaacattacacaaaatgataggggaaaataccattttaaacatctaactgatcatacgaatgagtgtaatggctaggaaggcaaatgaatctttgatgatacacttgcaaggaatttaaaaaatcattcattcactcatctgtcaactattaattaggtaccatctatgtgtttctgttcatgaggagcttcggcattacagggaggagaattatatattagataagtatttgcatacatggggtggctggtgctattataaacaatatgcaatggataatgaagagaagctttctctctagtaaggtcagggaaggcatctgaaaggaaggaaagtttccattgaatttaaaatatggattggagtttgccaggaagacaaagagggaggccatttcagaatgcagaagttttggtagccttgccagtcgcaaatacttacagaatgaatggatgatattggtaaaggaatgtgcaaagagacataaataagccaattgggaagtccataatatggaatgcaaagtaacagaaataatatgttttaaacagttaatgtttattcaaaacttacctgtggggttgggtgcagtggctcacgcctgtaatcccaacactttgggaggccgaagtgggtggatctcttcttaaagtccagagtttgagaccagcctggccaacatggcgaaacctcgtctctactgaaaatacaaaaattaactgggtgtggtggcatgcgtctgtattcccatctactcaggaggctgaggcaggagaattgcttgaacccaggaggcagaggttgcagtgagctaagagtgtgccattgcaccccagcctggacatcagagcaacagagcgtgactccatgtcaaaacaacaacaacaaaaaccttacatgtgccagacactatacttagcactttacatatgttacttattcctcactcttacgccatgaaagatgtgctattagtattagcttcatgagcatgtcgcctgtgctgagaagggctccacacttggattactgctctgctattattctgctgtgatccttcataatttggaacaagggacaccacattttcagtgtgaactgggtcccccagtcatgtagccagagctagtccagagcatccccgttttttagttgcagaaactgacctacaaagcaaagtcatttgcctcaaacctagttggtttttgtctttttagggacaggatcccactttgtctcccaggctagagtacagtggctcagtcatagctcactataaccttgtcctcctgggctcaagggatccttgtgcctcagcctctcaggtagctgggactacaggcatgcaccaccatgcccagctaattttttttttaaattttttgtagagatagtgtcttgctacgttgccaaggctggtcttgaactcctggtctcaggcaatcctcctgccttggcctcccaaagttgctggtgttacaggcttgagccaccacacccagatgaaacctagtctgtctgtctttctttctctttctttcttccttcttttcttttccttttcttttctttctttcctttccttctttttctttctctctttctctgtcttttttctttctttcctttctctttctttccttcttttcctttctttccttctctctctctctttctttctctttccctccctccctcccttccttccttccttccttccttccttctctctctttccctttccccttcccctcccctttcttccctttcctttctttcatctggctctatcacacagcctggagtatagtggcataatctcagctcactgcagcctccacctcccagactcaagccaacctctcacctcagcctcctgagtagctgggaccagaggcgcacaccaccatgctcagctcatttttgtactttttgtagagatgtaattcctccatattgcccaggctggtcttgaactcctgggctcaaactcctgggctcccaaagctgctgagattataggcatgagccactgtgcctagctgaaacctattttttcttcatgttgattcctacggtgttagtcctatgctaacctgactctgttgtcttctattttcaagataaatcattaacagaagatatgagctactacagttattcagagttagtgtacagaaacagaaaaaaataaagcagttttaaaaaggaaaaaaatggactgaatgattaggaataaataaaacatgcaaatattaccttgagtcaaaattggaattccaaaatgaataattagtagatgtaaggcattcctccagtgtacttcatggcttgaattcaaaatcatgttccaaggtaaataaatctgctccatcttgtttatccaaagggcagtttggtgttgacttagttctgctcttttttggtaacttattcaagaaaagcaaagagcagaaaattcgtggtgttttaatccagggagaaggagcgggtggaagtaaacagagttcctccttcatcagacttcgtcagaactgctatgccctctgactgcattagattaaatactgcaaataaattggatcccatttggtacttaataagcacagctcacttggaagaagttttacttcaagatatcttcacttttctttggaatatgacagtttacccctctgaccacatgaacctcttcaaaattttatttatgctccttcatgttaattcagaaagtagaaagtaataatttttttgagacagggtctcactctgttgcccaagttggagtacagtggtgtgatcagggctcactgcagacttgaccttctgggctcaagcaatcctcccgcttcagccctccgagtagctgggactacaggcatgtgccaccatgcccagcaattttttgtatttttggtagagacgggtttttttgccatgttgcccttgctggtcttgaactcctggactcaagtgatccgcccacctcaacctcccaaagtgctgggattacaggcgtgagtcactgcacctagtgaaagtaatgatttttttttaagcattcccataggccacccttccttgaagactgataagtcaaatttccatgatattaaagaatggtatcctagaacattccagattggttttcattctgtttgacttaaagatttgaaatatgttctgatgttattccagagcacctgtggatttgagggtccaagaaaagtgaccacaaaagagcatacctattaattatataaagaacatgttttttgtaagtatatccattatattttcataataaaaataacatgattttatttctatttatttcttcagcctccaaaaatatcagatatacctaaatgctcttttgtagaaatatgcacatctggaaatcctaagttgcccggtcatttttgtttgtttgtttgtttttatttgttttgagacggagtctccctctgccacctaggctggagggcagtggagtgatctcggctcactgcaacctccacctgctggactcaagcgagtctcctgcctcagcctcctgagtaggtgggattacaggcgcatgctaccgtgcccagctaatttttgtatttttagtagagacggagtttctccacgaaaccaggctggtctcaaactcctgacctcaaacagtctgcccacctcggcctcccaaagtgctgggattacaggtgaggcatgagcctccacgcccagccccagtcatgttttcaatgaccacatttataccctgtattctgctgaagacagaaatttaaggcagtatccgactaacctcttcttacagatgagcagggtttggcacactagagcctctggagctaggactgagggttggggggtgtcctggcagggctagttcaagacttcagggcaaggggaagttttgtcaaatgcctgaggaaaggcagagtggaagttgaagacatatcagaagtgtcaaattcttgaagcagataggatatgagaagatgggctgccttaggggtaagtggtgagcttttgtagccagttctggaaagaggacctgaaaagatccaacctctatgcagtgctctaagaatcttagaagtcatcaaatgctgggtttcgtggtagaaattcaagagctgccagaattcaagggtcaagactgaacaatgatgaaccatgcagagaaaagaggagaatttacatggccctaaaacaataatttgctaccttggccacacattagaatcatctggggaactttaaaaaatccacatgctcaaccaagttgcatcccagaccaattaagttggaatctcatagggtgggattcaatagttggtataacttaaagctccctgtgattccactttgcagcaaggctgagaaagactggtttaaagcaagaaggaatgcttacctgggtacttttggcctggtttatccacttaggtatcatactcattatattcatagttagaataattcactgttctataagtataaccactattatacttaagtataaatatacttaaattgcacttacactgtttgtctacacaggcacttaaagggtcctgcttactagggttcaattcacatcatcaaagactgaaacttctataaagttttagtccccctaatttaacaaaccagtgtagaatagcaagacattcatcctaaagagacttgtacattgaagtcgatgtagatttgggactcaattcaatgaactgctctttcatcaggggttggttaagcaagcttcagggattctgagctatttgtgtgaaccaaacgtaaccctaggtcagagatttgtagaactgtatatgatttcactggatatgtagagaataaggaaacacaaaacctccacatctcccaaagactgtatttatgttgggggtatatccagtttttcatttgatactcagagaatagttttgactttgcagacctcctgattgctctcagggctctcagactacacttggagaacccctcacaagaggcatatgcatagtgaaaggagtgagggctgcaagttcatggatgcattattttctcgttttcgtttgtagggaaatacatgctctgtcattgacttgcaaggattttctttttattcttaattgcctccctaatcctttctccactcagctgtggtactcaatgcactcagattaaatgtgtgtgttcttctgggccaggaaggaatagatagcattgatgtggaccctcaactgtattacagaatagggtggtaaacactcaggagaaacattctccctggtaaagtgctaagcaattgttaaacagcattttaaagcatgaatgaacgtcttgcttgtacattccaaagttccacaaacaaaagaaaagttcttattctaaaggagcaggagatgaatcctgccgataatgttttttataatgtggctgtgaatattttttcccagagttggtaatcctaaatcacctcttacaagtaaaaaaagaaaaaaaaaaaaaaaaaagcaggataagaagaaagatataagcttaaataatgggccattgtagtcaaaatcagggagtagccaattatttttgcgatttgcactaagtgtgcgtttagaaagttggattaatctcactacttcactgcagaaattaatgagatgagatcacatggtagaaaccagtgctttgtacctcatgatctcatttttagcaatcttgtatgtcctcgttttatagtacttttatcccaaattcattgtttccaataaaatattttatgtttattttatgctattatatttatagatttatgttttcttgttgttgtttgtttggttttcttttttgagatggagtctcgctctgtgtcccaggctggagtgcagtggtgcgatctcggctaactgcaacctcctccacttcctggtttcaagcgattcttctgcctcagcctaccaaatagctgggattacaggcacgcaccaccctgcccggctaatttttatatttttagtagagactaggttttgccatgttggccaggctggtcttgaactcctgacctcaagtgatccacccttctcggcctcccaaagtgctgagattacagttgtcagccactgcacccagccagatttatgttttaaaaattcagatatttataaagataacacaaagaagtcctaaaaatcgcattcattatttaatactcaaaatatttgacagacttcatatacgtaattacacattagtcacatatcatgcatatgcttatgtaatctagtgtgaatacaattatcgggtctattccttccaaaactcatgacatcaacaagctttagtttaaataaaagttagatggccaggtgaagcagttcatgactgtaattccagcactttgggaggctaaggtgggaggaacactcgagcctaggagttcaagaccatcctgagcatagcaagactctgtctctacaaaacattgaaagattagccaggtgtagtggtgtgttcctgtgatcccagttacttgggaggctgaggtgggaggatcatttgagcccaagaggttgaagctacagtgagatgtgattgtgccacttccctgggtgacagagcaagaccctgtctccaaaataactaaaggttaaaattaaaactaaaacttttttttttttgagatggagtcttgctctgttgcccaggctggagtgcagtggcatgatctcgactcactgcaacctctgcctcctgggttcaagcaattctcctgcctcagcctcctaagtagctgagattacaggcccccgccaccacgcctggctgatttttgtatttttagtggtgatggggtttcatcatgttgcccaggctggtctcgaactcctggcctcataatctgcccacctcggcctcccaatgtgctgggattacaggtgtgagccaccgtgcccggcctttttatcttctgcaccatgcccggccttttttttttggaaaccgagtctcactctgttgccaggctggagtgcaatggcgcgatcttggcccactgcaacttccgcctcctgggttcaggtgattctcccgcctcagcctcctgagtagctgggactacaggcgtgcgccaccatgcccagctaatttttgtatttttagtagagacggggtttcaccatgtcggtcaggatggtcttgatctcttgaccttgtgatctgcccttctaagcctcccaaagtgctggaattacaggcatgagccaccgtgcctggccataaattttttttgattagatgatgctgggcacaatggcacacacccattgtcctagatacttgggaggctgaggcaggaggatcacttgagcctaggggtttgaggctgcagtgagctatgtttgcgtcattgcagtctagcctggagaacatagctagatggcatctcatttaaaaaaaaaaaaaaaggatgggggggtgaaaattgcacaatttcttctgacttttttttaacttaaattaactgagaagccctagagattataactgttacctctaactgcttgagattcttgcataaagtcttgttcctccaacatgttactagaataacagctccagaactgttggtttgaagactaagtcactagcctccctctaggtgatgagttgaacatcctctcataacagcagaagactcagagtctcaggcctatcaagcaacttagccagttagttaatggcaacagagccgggcctagctcagatctccaaatctaaatctggtgtactcttcactgtactgaatgaacttcaaggtttccctggattgtgggccaaatcatatcactctaaaagtaccaagtatgttcatggtggcagccatgcaggagttgattaggggcgcagggtgggggcagtgaggggaaagcactctaagcagatggaagagaaagtgcggaggccccaacacaggaatgctcttggctcagtccgaggacagcaggacaccaatgtggctgcagtgtggggatgaaggggcagagagaggggagaggacgtctgagatgtgagtggaagccatatctccccaggccctgcaggccacagttatctcagctgcagcaagacatgagtagaggactttaattttaagcagcagggtgatacaagctgtctgtgccttataaagacctctttggctgctctatggagattggacagcgtccaagagatgagctggggatattgctaaagggagtggtggtgagaggtggcaagggttggatttgcgaaatactttggagttagcatggacaggacttggtaagtgattagctgggaggataggggagcatgtgggtgctgtttgctgtagtatgaggaattagtagctctttcggggacacagaaagatcaagaagtctattggatatccatgcagagtcatcaaattggcgttaaatgcaacaatctggaactcaaagaccttaaatatttaggaaaatccaacctcgcagaaacaaagagtattccaggactacagaataagtattctttcagcataggtgagaagtgaacatttcaggaggaaatctcttcagatggcaggtcagagaaaggctgggagaagaggattaggaaacagggtgagagggggtatctaaaaaacacagtgggacaaaaatagcactttatgtaacctccctagtccctagcacaacttgtattagtctgtggaaattgtattaaggagaaatattgaaacattatacataatacattgaattagttagattcatttaactactatagaacataatcagcagttcatttacagttaactctgaaaagatgtttaattcattttaatggtatgaaaaagagactttaccatgttaaatgcaggttacaagtaccaaaaaattgcaagctatgattttcagtgtcaaatttacaatacaacagatctatggggttggggagtaaaggggccaaaaaagccaccaaaataccctttcctcccattatttctagaattgcttgaagtggcagctttcatgaagataaaattgctatgcctcttcattaataacagtaggttctcattttcaagtgtatctcattcagcgatagggatggggggatggggaaaagtccttttcagtttttgcagttagtcgtaatatgcttgaattcaacgcgctttctcaaaaaaggctcatttatttgagtggctctgatttgaataaagtctcaccttatctgaagctgctgaattgcaggcgggattgatcatggcttcttagagggataaactctgaggaagggatttccacagtacaactacttgccttaaatagtacagctttgggacaaaagcactttgctcttctcagtcaatagcaatagctcagttggaaattttgttaatgttaaaaaaaaaaaacctgttagagacaacatagattgctatgttgaaagaaaattctattatgtctgtgactatttccatcttgtttttttactatggcatgtgaaattgtttcctacttttattttttgagaaaagcatgtgttggctgttatttaccaaaaacacatgtgagccttcgtgtgtacacacacactagagttttgttttgctgttatgattcactgtctggctaacacgtaccataattatccatatttgtacacatagcatggtcttgtataatcaaagatgacactgttgaggcataaactctaaattggggtgtgatcaagggaattttttcacaatcctctatggttggataaatagactggactttgaagtctggacggaccacttgaagtatgtgacctccaaaattctgcctttttttttgtcgtctcctggcaacgtaacatatttatactttggccactacctctccttccagaaaggtctgctgctgttttaaagtttaaaacaacaaatgagaaagttgtcccgattgaaagttcagaattcctgaggttctcctctctgctttctgtttatgtcgacagataatagcaatgcagactacaaataaatcaacagaaagaacccttctcttttcagattagtgagcatgcatctagttataatgtcattttcattaagcccttttcactgtttagcaaagacaacttgggggcaagtgacgggagcaggggatggaaggaagttggaaacaagctaaggacaaatgttccacggtgtgaatacgagctgggactgcagaaacctcaggtccttccatctgcaatctgacacccagctactccagtggcgtctgtgcgcttctcccagaatcacagaataactgggcacttaactgagatcccaggagctgcttttgagacccacgggggtctggtttttctcctcctgcattttgcctctccagtcttctgtcctactttcaagcaatctgaacaagatggagaaagaatttgaatttcacattctgggatcttaggttatacttgaaagcacttcacattgacagctttgacataaagggcaccttcatttctggccagtttctcattctcagcactatggacatattgtgcaggattgttctttgtgatgagaagctcccctgtgcattgtaggatgctgagcaggaaccctggcctctgcccactagattccagtaaactcctcacccctccccatcgtggcaagcaacaatggctccagaaattgcccaatgtcccctgaggggtcaaaatcacccccattcgagaaccactgagttacagcaaaggaaatcaacatttatttggcaattctggtgtgccagatgtgtactagatgttttatgtcattctggcaattatcttttgaagtcttatcctctttttatagattagaaacctgggagatgacaaggagaagcattgttttgtttcgtgctttcctttcactgattttctggtactcaacaatgaaaatataaccagaaaaattatttcataactaggaaaaaaaccgtgaaaacatgctattttaatatatttatcccataatatgactatacatttcagacattcgttacctaagttacagacatctaatgtgaaaatttgtcagaagtatgaaaagtaaaaaaaaaaaaaataccgttggatatggacttaaccacttaaattaagatagcctttctttttctattctcttaacactggcaagtgaccaaattgtcttggatttcttatttcttctggtgtcaggcatgacaaattatctatcatctaaaccatcactttcacagggtgtgatggctcacacctgtaatcccagcgctttgggacgccaaggtgggcagatcacttgaggccaggagttcaagaccagcctggcctacatgttgaaaccccatctttagtaaaaacaagcagacaacaacaacaaaaataattagccaggcatggcggagcatgcctttaatcccagctacctcaggaggctgaggcatgaggattgcttgaacccaggaggcagaggttgcattgagccaagacgctctccagcctgggcaacagagcgagactctgtctcaaaaaaatatatacatattaagtccatcacttcctgtcttacatgaacctcaattattcttttttctgggtttcaatcttaggtctgtttctcactgatgcatacattttttccttagtttttcctcattagtttttctctatatgttcttaccaaggacctcaacaaaatatctctcagtcttgtttgacagcaagaaaacacacacacacacacacacacacacacacacacacacacatacacacacagttatttagtagtagaaaatttacagaagcttggaaaggcattgaaattcctatatgttccatttagaatttccatcctcatccttctcttcaaacctcagttgctttggttacccaaaatcattattagttaacatttttctattgtaaatatgttttggtggcattataaattaaagtgggctgggtttggaaagctgatactcaaatatgccattgtcagaagagagaggaactatggcttcaaatttaaaactggcatctaaatataatgtttccaaactttcagaacatgtctttcaaacaaatatagattgaatacaggccaaattttgtttttaattcattaaaggagccagcatggttaagccagtttgaaagattatgggaaaggtttaagtatttatagtcattgaaagaaagaaccctgagctatgaattgttcaattagatacaagaactggttaatactccccagaacaataaaatgacgacttagggtgggccagacatggcagctgatgctgtaatcccacactttgggaggccaaggtgggtggatcacctgaggtcaggagttcaagaccagcctggccaatatggcaaaacctcatctctactaaaagtacaaaaattagccaggtgtaatggcgagtgcctgtaattccagctactcgagaggctgaggcataaaaattgcttgaacctgggaggcggaggctgcaatgagccaagatcatgccactgcactccagcctgggtaacagagagagagactccatctcaaaaaaagaaaaaaaaaaagatgacttaggggataatctttcctacaagacagcaatcatttgcatttctcctagaccaatttatttatattggacgaattcatttgcatgtctgtcagcttttgacaagttaaagtctatcctcacagagataaaaaatatcctaacccataataaatgctgagttaaacaaagggttctaatttccctagaaaattagataatccttggttgcgtgttagacacttaaactttatttgaggttgaaaagtaataccaacccattgtagaaagtttgaaaagtactaaattttttaaaaggaaagaaaaaataaataccctcaaaccactacttagtaacccacagccactgttaatataattcatatgcttccttacaagtttcttctaaatatttttaacagtggaatctttactgtaaaaacaaattggtagtccacttttttcttttgctttttgcttttcttttctcttctttcttcttcttttttttcttctttctttgtagacagggtctcactcttgttgcccagactggtgtgtagtagcgtaatcttggctcactgccccctcgacttcctggagtcaagcaatcctcccatctcagcctcctgagtagctgggactacggacatgcaccactatgcctgaggtctttctttattgcccaggctggtcttgaactcttgagctcaagtgatccgtccatctcagcctcccaaagtgctggcattacaggcgtgagccaccatgcccggcctacttttttcttttatttactcttacccattgtagcatttgttatgtaatggaagtgtctcataagcattttaatggccacagtggtctagcactttttgtatcaaaaatttttaacagtttttcctaactttagacatttatttattataaattatttcagaatacaaagaagcatagaaaatattataatgaccaatgatgtaggtgtgatctagttttgaaaacatattactgataaagttgccccttcccctcactaacgcttccaaatatactcctctccagacataaccaccatcctggatttggcattcattattttcatatttatttttttacatgttttaccacctgcataaaatatatagtatttctgcatattttcaactttgctgcaaatcataccataggttctttttaaaaaagtctctatatattaaggtgtacaacatgatgttttgatattcatacacacagtgaaatgaaactggatcgttatcttataccatgaacaaaatcaactcaaagtggattaaagacctgaaaccataaaattcctagaagaaaacattgtggaaaagctgctgaatactggccttggtaataatttttttaaaacatcacaccaaaagctcaggcaacaaaaacaaaaataaacaagtgagattacaccaaaccaaaaagctttctcatagcagaggaaatagttatccaaatgaaaaggcagcctgtgggttgggaaaaaatattttcaaattacatacctgatacggggttaataccccaaatatataaagaactcacagaacggaaaaaagacataacctgattttaaaatgtatgaaggacctgaatggacatttctccaaagaagacataaaactctggccaacaaatatatgtaaaggtgtcaacatcactaatcatcagggaaatgcaagtcaaaatcacaatgaaatactagtttactcttgttaggatggctgtgatcaaaaggacaagagataacaagtgttgttgagggtgtggagaaaagggaacccttgtacacataggttctcaaggtaccttaaagttccaaaacttgatttttctatcaacattgtgtttgtagggatttactcaagtaggtaacttccagacccttcactttcactactgaatagtatccaaaattttatccacttttctgttgatatgcatctaggttttttctttccttctttcccttccttccttctttctttctctctctttttctttttttctctctccttccttccttccttccttccttcctgacttcctgccttcctgccttctttccttctttccttttttttttttttttttttgaaagagggtcttggctccacccaggctgcagtgcagtggtatgatcatagctcattgcagcctctacctctcaggttcaaatgatcctcccaactcagcctcccaagtagctgggaccacaggcacatgccaccatgcctagctaatttttaaatttttttgcagagacggggtcttcctttgttgcccaggctggtttcaaactcctgggctcaaatgatcctcccacctcggcttcccaaagtgctggaattataggcgtgagctaccatgcccagcctgtttcccgttttttactacagcccctcggtgtagctagggacatttcattcatgcacctccctgtgtactcatgtgagggtatccctgggtatgtactgaggggtgggatgccaagcctgagtacttgtgcatcaacagtttcattatatcctgctaaatatctaatgtgactgtaccagtttatactcccaccaacaggctgggcacagtggctcatgcatgtaatcccagcactttgggaggccaaggcaggcagatcgcttgaggtcaggagttcgagactagcctggccaatatgctgaaaccccgtaactactaaaaatacaaaaattagccagctgtgatggcactggcctataatcccagctactcaggaggctgaggcaggagaatggcttgaacctgagaggcagaggttgcagtgagccgagatcgcgccactgcactacagcccgggcaacacagcaagactccatctctaaataaataactaagatattctcccaccaacagtatgtgaaagtctagttgctctgcatcacaggcttacaaaccttttctgtaaagggccacgtaggacatatttaaggctttgtgagttacatggtctctgttgcaatgactgctcttgtaaagagcacaaaagcagccatggagcatacgtaaatgaacaagcccgtatgttccaataaacatttatttaagaacattgatttgaatttcaggtaattgtcatgtgccacaaaataccattctgttttttattttttccccagtaatttaaaaatgtaaaacacattcttagtttgtaggttatacaaaacaggtggctgactgagcttgactgtgggccatagcttgccatccccttcttgacattttcaccaagatctgagattttcagattttttaaaaatatttccaccatgatggatgcaaaatggtaaactgtgatttcagtttgtatttcctgattagaaaggaagtcctgtgtattgaccactagaattttatctcctatgatttatctattcacgtcttgttttccatgttcttttagttgtgggtcttttggttgtgagccttttgatttataggagttctatttcctggatagtaatacctatatatatacatatatgtgtgtgttgcaagcatgctctcagaatattgtgtttattatttcaatgtttaatgctgtcttttaatataaagaagtttttaatttacaaaaggtaaatgtctccaagtgatactcatttgactgtgaaaaaaattagattttccatacacactgagaacttgaaaggcaacgaaaaaagaaagatatcactttcttgtgtgcaaaagagaaaatatttcttcagtgggtgggagtagaaaaatatttttacttttattgcagactttcaagacagtagtttctttgaatgctaacagcttatccagttatgcaacctgttgttctgttctgaagaaaggattctcgagcagggctggagtcctggctgcctggagggacctgtcgcatctgatactaatgaagtgttactgtactttgacaagtttgcaggcgtctgtcttccaagccagctgacgtaattcagaggagaataagaccctcccacttgcgtttgttaattgactttgatgagctcctctgctctgcctaagtggttctggaacagagagctgttgtgatccgacgaactttagaaagtcacactaactaagactacacaccccaagccagcaagaaaaaggaaagcagttgctatgctgttcagcaaagcaagacttggctgccttttagctagtcctgaattcttgctcctgtgaagaaaattcctgctggagtgctgggcgcacttggaattggtctagcatgcttgacagacgccttatagctcctcaaactaaatacattattcctggggtaagcatacgggagagaagccggccagatgcacggtgcggtttaaagaaaacaggaatgcatagaactgttgccgagcttgagctaaaatcatactagttacttaactttttagactttcttatcttgccagaaatgttgccattcacagtgttattactttaatgctgtggtgatttaagcaagtgaaactgtaactctggttttaaactgtatgttactgagcttcatttagtagcttagggagagagtcccggtgcagacaaatttagtggaaaatgaaaatgctttttccagctatagaccagcacttgtcttgagtatcactctgacagcctagccactgacttcttgtgtgtctgagacctatctgtgtaaatcaggatggtctgacttgctgtgttgctgcaaattaagattcttttactattcatcaactttagaaattttgaatttaataaaatacaaacatgacagtctaaagtttaaaatacttaaacataaagctttgccacacgaggactgactgtttgggtcttcggatttggtttagaacttttaaagaaaagactttattattatttattggtgcctttttaggaaaggatgaaaacatgcacaaaaaaaaccctgaacctaaaactaaaccagagcccgtaaaaataaaagtcataaagttacaaatatctgtgctaataggacatgaaaataccattttaaaattaatagtttgtctaaaaattattttaagtacttcttttgtttctaattgttccaacctatactaaatttagtataatagagaaaaaaatgcttgctaggaaatatctttgtggtcatttcttctatgttgtatcatataaaactggaaactgagatactttttatgtgattttgatgattcttttattagattttactttaagttttctaaagatacagaattttacttgctgagttggccctcattaagtattgtacgtgacaattctatttctttaggttctgacatggctggcaatgtatacactaattatcaacggtttctgggcattagatatgtcacgcccacctatcaaatgctactcatgtccaatttagaaattattctgtacctgtttgagtacatctggaatcatttcctgtaaacttgcttgctttttaagaatattatcaaacatgaaataactgctatattttttcctgcagcggaattctgtgaattacgaaaacatgtataacctaaaatgcaaattgccaaatacattccattggccattttgaatattttcagcaacaaaactggtcacaattatgtcacagttatttaataagaatgacaatctatatgatattaaatagtcacgaggccaggtatggtggctcacacctgtaatcccaaaagtttgggaggccaaggtgggaggatcgcttgaggccagaagctagagaccagcctgggcagcatagcaagatctgtgtctacagaaataatagttatcacatgaataatttatcctacaattaattttagtcctatctttaagtatcatggggaatctgcacagggatgtttagtcttttaaattacttctttcctaaaaatagactttttgtttcctatggcctggctacctctcattttaactaataagtatgcttgaatagggcttataaacacatggatttttggatttttgaatggttaaagtttaaaacaactctttttaaagtctttataaccattcaacactttaaattcagtctttctcaaagttctccaataatgacagaaattctttcaagtttggacaagaatataaatggagataattttttaaattatacatatgtatatttatatatgtatatttatatgtgcctgtatatgtattatgggatagttgtttagaatgctgaataaactgtgtggtctttatttttgttctaatcgcaagtatgatttcagtttttatatcagtttcagtttatttcagtaccttctaaagtcattccaaacctcaaatgcaggaaacacatttagaaattacccatttaattctcattgtgcattaaaatgaaatcaataaaccaatgcaatttggtgtaattactttctaccgccaaaggcaaatatatatagatcagtctaactagttttaagtgcataatttatttatgaatcctggtatcattgcattgtaaatttcttgaacatggtatctttaataactgcaattgagtgccattattcttagacccagatggtcacttcctctctatcctttcttcccttcctccaaataacaatgatctctctgatttgggcaggtttttttttattattattgttacccgtaatttttgttttttctgactgtggttaagagaaagtatttggatccagtcagacttgacgttgaatactaaaccgtcccctaaataatggtgtgatttggcagattttatcttctctgagcctcagtttcatcatctgtaaaattaggaataataataactgtgtttcaagatacttgtgagaattttttaaaacgatcagagtacatgcatagaatataattatatggatggcttagcatagttcctagagttattcagggaaggtgtatgccttcctatattttctgcaatagctaggaatgaaagaacttagctctgaaatcccaaactgtgatacttctgataggcagcaaaggaaagtgatgagttgagtttttatttgcatattggaggacagggagagagattaaatgtcccccttgtgaagtgtgacttctaattggagacctgtgggtcagctatcagcgggctgggaggggaaagcaaatacaaacgctctaaaactgtgtgcaaatatttcagtctctgcatatgtgaacattttctagcttctgccaattatcaaagtggtcctcaacttctaaatggtaataaataaataaatctgagtgggcgtaaacctgagacaacaaataagatgatgatgatgaagtattctaagaaggctagtaattttgggtcgattattttttcttcctctttaattttatattgctcaagcatttatcaaaaaaaaaaaaaaaaagaaagttagcatgtgactgtgtattcctgtatgttataagacaaataatgatctaaggctgcaggcttctacatcactcttcagatataatttgtatttaaatgtaagtataatgtccataaggcctggtggctaatgtatgtacatggagatgctggcttcagcatcaagaggagccatcctgtttgattttactttgccccataaaacgatcagtttgtggaaagagtcattttgtgcagtcgcaatagagatttgcagttattttcattattaaaattgacaaaacttttttttttttttttaaacagagtctcactctgtcacccaggctggagggcagtgacatgatcttggctcactgaaacctccaccttttggttaaagtgtttctcctgcctcagcctcccaagtagctaggattacaggcgtcctccaccaaccccagctaattttttttgtatttttagtagagacggggtttcaccatgttggtcaggctggtctcgaactcctgacctcaggtgatccacccacctcggcctcccaaagtgctggaattacaggtgtgaaaagagctctatccttcaaagtaattaaagtttttaccactaaaaatagaagaaattggctgggggcagtggctcatgcctgaacgacaccagcctgggcaacaactccgtctcaaaataaaataataaaataaaataaaacagaagaaatattaaaggaatgtgggtgtaggaataccccacaagctcaccatgctgtggtcagatatttttatgctggcatattgtactgcagttcttttctacaagcatacatatttttatagttgtaactgcagtgttcagacagttgtgggttctgccttttttccttcaaccttattttgagatcactgtttaatcagatcactgtttaatcagcataatataacatcgtgacgatctgccattgattgtccaataaaatggtcatttatttttggactttttaattgattttataattttgttttcatagataaatctataacaaatttgaacatatggttttcagctccattaaataacttatttgagataaattatcagatgtggaattatttgcacagtgagtgggtttgaatgttcttataagtccctggctatgcttttgatatctttttttccaaattctaccagtggacaatgccagtattattcatatactaattttatcacaatgtatgcagtattatgtattaatgattgcttttcatgtaaatagttatacagcattgttttaatttctgtttagtggattactactgaaggtgaatatttatatactctctgtatttctgtgcgaattgtttcattaggcttcctgcatttagattaataagttactttttatttgttggatattaacaggctttccctctctcaccttggaactcccatccgtctgtctctgtatgggggagcttcttccttctttctttcctattaaacacactccgctccctaaaacaaaacaaaaacaatccttacagaattaactgtggaatagtttttcccctatccaatactatgctatcaaaatactgtctttcatataaatttatcttaaatttatattctaataccctactggtatctctagaggttggcttgaagaaatagagtattcgcataattagaaatcaacagatagactagtcacaggattaaacctcagtttcggaatgtggagcaaaaagcttttgactttattcagatatctcacttatttttgacagggagctaataaccattacggagaataaggaaaaggtcacatctgaccgaagcacgcttagtatgaaaagtgcattctgtctcacctttctgttcatagattttacattgtcaggggcagcacaagccaacatatcatcacatttctgttgtttcagggctggcagggcctggcagagaccctgtgcctttgtagcttcctgcagggctccccctccagtggccattcagagatcttccactctcctcttaagaggtggagaactggaactttcttttatttgtttgaggtggagtctcactctgtttcccaggctggagtgcagtggcgcgatctcagctcactgcaacgtctgcctcccgggttcaaacgattctcctgcctcagcctcttgagtagctgggattacaggtgcccgccaccacgcctggctaatttttgtatgtttagtagagacgggctttcaccatgttggccaggctggtctcaaactcctgacctcgagttccactcgcctcggcctcccaaagtgctgggattacgggcgtgagccactgcacccggccagaactggaactttctatatggttttctggtaagggatctgctagtattttgatcttaatgtaatatcatgtcatttgttaattcacaaatagtcatcacttttccttcaacctttgttcagttacctagctttgttaatgttagtggcttttttgggggaggaggggagctcggggggcacagggtctcactctgtcgcccaggctggagtgcagcgatatgatctcagcttactgcaacctccgcctcccaggctcaagccatcatcccatctcagcctcccgagtagctgggactacaggcatgtgccaccgcgcctggctaatttttgtgtttttcgtagagacaaggtttcactttgttacccaggctggtctgaaactcctgagctcaagtgatccaccctccttggcctcccaaagtgctgggattacaggtgtgagccactgcacctggcctgttagtggctttttggacatcagagaagagaaaaacctgacccgtgaaatcacatctaagatccttaattgtgctgccaacacacaaaatagacctgctgctgtcagtcagaaggggccatactcattgataaaagtgcaccttttagaaagtctgtttcatactgttctgtgccgcctagtcttcttaatagaagaaaaaggctttgatttgaaaacatgataggatggacatatctgactgcactgaaaggacaagaacaagattttattttattttattttatttttgagacggagtttctctctgttacccaggctggcaggctggagtgcagtggtgagatcttggctcaatgcaacctccgcctcccagatgtaagcaattctcctgcctcagcctcctgagtagctgggactacaggcgcatgccgccatgcccgtctaatttttttttttttttttttttttttttttgtattttagtagagaccaagttgcccaggcttgtcacgaactcctgagctcaggcaatccgcccaccttggcctctcaaagtgctgggattacaggcttgagccaccatgcccagccaagattttattcttaattctagcactggctccttagtttttgagcaagttgattaacatctctaggcttttttttttccccctatacaatgaaggcaataatttttatctctctactgctctgtctggaaggctataaaagcctatacaggtaatgcagtatccttaaagcatctgagaatagctgtccctagttttgtctttactttgaagcctgagtaattacttaaggaatgtaccttgaatcttgagaccatgtttctaacaacacaggtatttctgcaacctgaaatctgatgagcctgagatcctttctgttggacccaggttgaggactattttcgtgacttcgcttaatgagatttaatgttcaatataaacacttgaaaggaatttttcaaggctaaattctacatcagaaggttttgagcgtcgtgcacagctcaacttccaagtcttttacagtgggctgtgaataattaatgctgatttgatatctgggcattcttttaaaaaacgtgtatatccacccaaatataacaatatagaaaaaagaagagcctcatgatattgcccaaaattttaatgactcacatgtgatatgctgagtactatctaggtgaagttaaatgtggcctctgttgacgaaattgccacttacttggataacataacaagataaaaacacgtttgcaacgatgtacattttgagaaatcatgaatttctgcattgtagacataaatatttaaagaactctccgggtaaaagatcagttgaaaatttggaaattgtggaattcagttcaatttagaatacttactgaatgacaacaattagagaataattttgtcaaatgtctctttaaaatgatttaattaagatacatatgtttggcactgtagctggaatacagaggcccaaggtggttatatgggctaaatttgaactcagaaaaaggatggatggacggacggatggacagatggatggacagacagacagacagatagatggatggataggtggatagatagattgtttgagacagagtcttgctctgtcacccaggctggagtgcagtggcctgatctcggctcactgcaacctccacctcctgattctcctgcctcagcctcccgagtatctgggactacaggtgtgcaccaccatgcccggctatttttgtatttttagtagagatggtgtttcaccagtttggccaggctggtctggaactcctgacctcaggtgatccacccgccttggcctctcaaaatgctgagattacaggtttgagccactgtgcccagatacaaagtttatattttaaagagacctcagaactaggccaggcaagatggctgatgcctgtaatcctagcactttaggaggccaaggtgggaagatcgtttgagctcaggagtttgagaccagcctgggcaacatagggagaccctgtctctacaaatatattttaaaaatcagccacatgtggtggtgtgtgcctgtgatcccagctccttgggaggctgaggtgagagatcacttgactcccggaagttgaggctgcagtgagctgtgatcgtgcttctgcactccagcccgagtgacagaatgagtcccaccaaacagaacaaagggacctcagcctttcttcacttctttgttcttcatatgaagggtgggcattcacaggacattgcaggaggtgtgataagattcagagttccccatacagcctccacttgaccgcttctatttgaaggatgtgatgctgtggctggaacaactggttggtgaaaatgttgttgaaagtcgtttgtttaaagagacctaaaaagaaccgttttcccggagctccggcatactacaatgacctaagttaatagaccacagcgagtgtgaagaataatgggtccaattgttgatgcagtatctgcttttaggctgagaaaatatatattggtttaatttccacaactgagtttgcctgacttctctgggaccattttccattccagcagcataaacctggctcaaaatgccattaaaattgatgacaatctgctaggtgagatgagccagacacaaggagacaaatacagaatgaccccacttatataagggacctagaatagactcacagagtctagaatggtggtttccaggggctgggagaagaggggagtggagagttagtgtctaatggggacaaactttcagttggagatgatttaaaaaaaaaaaaagatcctggagacagaagatggtgatggctacccaataatgtgaatgtattcaatgccattgaactgtatgcttaaaattggctcaaatggtaaatcctatgttatgcatattttgtcacaatgcttaaaatacaatttaataaaaacccacctgtattgcgcacgtatgttgcatgaggccaaatgctttatatctattattattatttttaattccgtaacagctgggtgcggtggctcatgcctgtaatcccagcacttttggaggacgaggtgggtggatcacctgaggtcaggagtttgagaccagcctggccaacatggtgaaaccctgtctctactaaaaatacaaaaaattagccaggcatggtggcgagtgcctgtaatcccagctactcaggagggtgaggcaggagaatcgcttgaacccaggagatggaggttgcagtgagccgagattgtgccattgcactccagcctgggcaacaagagcaaaactcagtctcaaaaaaatttttttaaaataataaaaataataataataattctcataacaacccagtgaagtagacacatgatcatctctagttggcagataaagcatctcagcacagtcaagtttgtcactagcgtggggtcccacaggtgtccgtggaaaaagcaggaattggaagcaaaagggcagcctcttccatgcacgcagcccacacagcactgcctgtgcctccttgttgtttttgtttgttttgcctctggtgactgcactttctaatggccccagctgctagagcagccgacgttccctcaggagtagcgctttaggttcccttaatcttcacccaggggtacctccttgaccttgaaccctgcaggtcctgtagcaggaggtgagattgcccatcagccctccaggagtccaccagacctggcaggccttcatgcagcagaacaaaaggccagctgtttatttcctaggcagagttcatgaaaatcaccccatgggtgtgataccaagatcatcttaaaattaacttgtgttttaaaaaccattttctgtttggttttttagtggtggtggttgtttttgagacagggtctcgttctgccgtccatgctggagtgcagtggcacaatcatagttcactgtggccttgtactcctgagctcaagccgtcatctatcacagttaaaaaccatttttaatcttctctaaacaagtaacttttcttaacatagttttcaatcttctagaatgatcaactagaatttttttaaatgagctgcttttttcttattatatgccagctactttttggaaaaacaatagcatagagtcattctcacaggagaatgtatataaaaacaaagtaaatatatttttataaagatcacatgtacaccctttcttttctttttttttttttcttttttgctaaaatgtgtatttataaccagatttctcatcaggctttcttgggatctttaaaatatgtttcttttgcaaatataggcttaggactaaatatattctgtatcccgtcatcatgttgtattacagatgagaagacaattaattctgtgataaagtatcataaggcaagaaagaaggtgcttggggaaattggactgtgctagagatcttttctgattctgcaatatactacgtattcagtgatctgctatatacaatgattactgtctctttacattcttctacctatattttttaattgggtgagatgatgaactggaaaatgatttgctacatccagaaatttcaaagcattcttaaggattttgttgaaaacacatgttattctattgttaccgttttctgcctttttcactctaccatggaaaaccagatggtctgtacaagccgagagaaataatttccaacccagtgtatttgcataatttcctctctgcccttaatctggaacaaaaggaaacaaaatgaattgagttcagcataataaactagattggttcttaattacagaattaggaaagtttttcacataatttaagattctttggttgtattgctttcaaagttagagaaagtctcttttaaagtgtgatttctattagaggctttttttcctgatgaattcattgattcaacaagtcaaaatgggtgacagtttttgcaaaccaaaggaagagagtgatgacatttaaaacacatatatagacatagagaatttcaaatgttctacactcctgctgctctctcaaggcgtgttcagagtctcctaaaaaggatgtttgacctgtttgcagagctctgacagatgatattttgacaggtctatttcttctgcgtgttcaatgcaatgcccaagatgaataggcattcaacctaaaagtacaacttaaaagtacatttttgcatccaagccagcctctgcgtacttcattcttatccttatataagggtaagatatttgatattctgataatcctgttacctttctgatcgcatgagttgagtggacttccacgcatcacgtcccatgacagggctcctctgtgaagcagggaaaaagcatggcatctgatctccttaattcttacaacaccaacagaacataattactttatcatacagggctatgaagatagcacatgtcaccactgtatgaaagctcttaggttgtggaatttagtctaatgttatcatggaagagtactgaaatagggaacagtagggttgataaatagagaaagaaaagagaaaccaggaataatcagtgaatgataagcaagtaacatggtttaaaagcattccaggagttccatttttaagcactcttgtttacttagttttgctacccacttgttgctttggaagagtttctattaattagatgtcatttttcaaaagtgcgtacttaattgttatatgaattacaagggactgcataggtttcgttgcaaaaatgtttttcaaggaacacttagaggaaacatgcttcgtagcatttcatagtatatgacatttttaagggagaatgctttacatgtaatatgtagcacaatttggaattattagtatattggattttctcatgttctgggcaaatgaaggaacatatatgtttgtatcaataaaagctgtgaacagaatatgtgagcatattttgaatccatcaaatgtattacatcacctctagtaaagctataaattatagaatactttaataaagttatttttcttattcatgaaatattatgtctggtagcaggaaaatgtgatctgttcagaaaaaggataatgaaagaaatcttttattagagaaatatgattgctatacaataatgtggcctacatttaattctacatgttttaaaattagaattgggctttaaaaatttatggttctatgccaggtgcggtggctcatgcctgtaatcccagcactttgggaggccgaggcaggtggatcacaaggtcaggagttcgagaccaccctggccaagatggtgaaaccccatatctactaaaaatacaaaaattagccgggcacagtggtgggcacctgtaatcccagctactctggaggctgaggcaggagaatcgcttgaacctgggaggcagagtttgcagtgagctgagattgtgctgctgcactctagcctgggcaacagagcaagactctgtctccaaaaaaaaaaaaaattatgattctatatgaaacgtacgtttgtatggacttggaaaagtcttagttaaggacataggccttctcaactctttttaactctgtaactttatgatataaacaaaatatgtaagcatttcttcacagttcgccgatctacgttgattcagtataaggtacacatcaaagtaaaattaaccaaagactctaatttgagggaataataaggcacatggttgataagaaagaatacaatattccaggggttatgaactattagcatttctgattcatggcaatccaatttgagagtataaatttggattaccagcttagttctgaaaaactttctttatactgctctatggcagctgagggcttccggttcatcacatgtatctgtttagtctgctaactctgacaaaagccattatctattttttttgcccaaaggcattataaggaaatagtatgagcaaagttttctttctagtataaacaataaatcttactagccattgggcaaactcatattctggtgaatatttgaaaaagcttggcactcattaataccagcaagtgtccagtagcttgatgagtactttatagtatttaaatggaatgtatagtctgtcaaaaaactatagtaggccttaattagctgggtgacattggacaaattatccagagtcaaatccctgagagtcaatttgcttatcttttcatttggagtaataatgatgtatgacccctatagacctcaaggctcaaatataatttgaaaatcttaaaaatagcaaagcactgtatgataatgaggtattaatcatttaacaaacacttgttaagtgttagctcctttttttcctcctgacttgggcccttaaactgcttgcctgtcttgggaagagtctccttggtgaggtcctatgagaactttccactgtgcctggtcccaaccaccacccaactctccacccttccaccaacttgtgctggccttgaaaaggtcagaaggctgttggaagagtcctggggagagaaacatggcagccgagcgcaagacagttatggtggggcctagagaggagccagatgtcatggtgtggttgattgtgttggatgaagctgaggtcacagaagatgaaggctgaaaggaaagctagggttattttgtggtgtttttgttgttgttgttgctgtttttgcttgtatgtttgtttctcaattacaactatagggatgggggaactatctttagaggagtctcaggacccagcaggcccaacaacagaggagtggggacttctgagaagtctggcagagcaggtgatgggcagtagcttttccggttctgaaaatatctgcataatctacacaggggtcagcagggttcagagaattaacctaaagcacaaccataaaaccatgtgtggtttctttcttcaaagtcacatctgaagctcaatattacaggttgagcattccaaatccaaaaatccgaaatccaaaactttttgagtacttacgtaggctagagacacctttgcttcctgatggttcaacgtacacaaactttgtttcatgcacaaaattatttaaaatatcatgtaaattaccttgaggctatatgtataaagtgtacatgaaacattaatgaatgttgtatttagacttgagttccatccccaatgtagctcattacatacatgcaaatattccgaaatccaaataaaatttgaaatctgaaacacttctgtcccaggcatttcaggtaagggatactctgcatgtacactctaagtgtttcagggtgcttaacatagtacttctatcatttcttgttatttgagctttctagattttggagttctggatgagaagcttatcttttacaaacattacttgtagttattcttttccaggtataaacctaggtagaaaaaagttgttataatgaaaagaaaaatgtatcgtcgtttttttaaaaatgggacttctatatgtaactaacgatttggtgttagtgtgagctatgatttgttctcaggatcatgaatgatatcacacaaatgattacgacacttgaataaatgtggcctttatttaattttttgatgctattgcagagctgctgctaacattcagtcctagttataatcacaaaagtatctgccataagcccagctgattaggctctgcaagtttgatctgatttttctcttttttttttttttttatttttttgagacagagtcttgctctgtcgcccagggtggagtacagtggcgcgatctcggctcgctgcaacatttgcctcctgggttcaagcaattctctgcctcagcctcccgagtagctgggattacaggtgcctgccaccacgcctgcctcatttttttgtatttttagtggagacaggatttcaccatcttgaccagactggtcttgaactcctggcctcatgatccacccgcctctgcctcccaaaacactgggattacaggcgtgagccaccatgcccggcctctgattttttattctcctctgtaatgtccgagtcaactaacatgcacataaaatatgcaaaaaaccccacaactttctggaaggtttctgtaaggattgctccacggagactctggcaccccaaggctgcaggcccctggaggtcccaggagacctggatctctgcccactgccccatgcattgacacagccctcccttcccaccttccccgctgtaatattgcttacccatcttgattccttcaaggatgaagctgccataggctgggcctctgctcctgcttttttctgatgcttcattcatgcaactatcccaactgcccagcacccactttgcatcacgctagctctgggcaccatcaggaagcccactgtctataccctgtgctctgtctcactccacctcatcatcactgcttattttcctcactttctccagcaagccaacttctttccacctttctggtcttgctggattattattattgttgttgttattattttaaacctggaatattcctccctgccctttactttgatcctaaacatctctgtggttctgcagaaaagcttttcctgactacattgcacaaaggagcttctcccattattcacatcacccagtttgcttcgtataaatgtaattatttgaccagcagtttacattttgatcctctctcctctcgtctctttttctccttcatttttttttttaacagagtcttactctattgcccaagctagagtgcactgacatgattgcagctcactgcagccttgacctcgagggctcaagcaatcctcccatctcagcctccaagtagctggaaccacaggcacatgccaccatgcctggctaatttttttatattttgtaggggtgaggtttccccatgttgcccaggctggtctcgaactcctgggctcaaacgatcctcctgcctcagcttcccaaagtgctgggattacaggcttgagccactgtgcctggcccagactcaatttcttttttttttttttttttttgagacggagtttcgctctgtcgcccaggctggagtgcagtggcgcgatctcgactcactgcaagctccgcctcccgggttcacgccattctcctgcctcagcctcccgtgtagctgggactacaggcgcgcaccaccatgcccggctaatttttgtatttttagtagagacggggtttcaccgtgttagccaggatggtctcgatctcctgacctcgtgatccgcccgtctcggcctcccaaagtgctgggattacaggcgtgagccaccgcgcccggctgactcaatttcttttacctgtatttcagcactcgtcctttatcatcctgaagtgaaatgtatagttaatgcaaacaaccaacacacaaatttttaaaaaccatttgggtcaaaatactgacccaatgaataaaaagattaatttattctctggtaatgtgtatttcaatgggttattatgctggcataaccacactagaaaatgtgaggaagcagttccatggatagggccactgcatggacggattagcggtgatgtacacctacaggtgtgcggctattaaagacaatagttaacaatttggtaaagttccaaacaaagtacaatctttcattgattgtcacagtactttcatttctggaaaattcagtatattttacaactatgcgaaaagacttgtactcatatccaaaaaaagatttagattctaggttcagataattttatatttttcgcccacatgaattccagcaggatagtcaaagatcgtgagaggaggtgcacatccatcttataatcacataggattgctgtgtaaaatgcaaacaggtgtattcctagccactgtgtacaagcatcctgtaatgcttctcagtcattgaaacaaccaaaaatccagcagtacctttctggaacactccttttggggacccattagtttagacgataaactccttaagctcctcctgcatggcgggcaggaatcatatttgcctcatctactatacaagcctcaacatccagcacatcattgtcgcagtgcatggcaaatatttaaagaaggaataaacgaatgagtgaatggaaaggaatacgcagaaacaggaaaacacattcatccattcaattgattgattaactggagacagagtctcactctgtcacccaagctagagggcagtggcacgatctcagctcactgcaatgtctgtttcccaggttcaagtgattctcctgcctcaggctcctgaggagctggtaccacagacacgcgctaccacgcctggctatttttttgtgtttttagtagagatgggttttcaccatgttggccaggctgttctcaaactcctggcctcaagtgatccacccacctcagactcccagagtcctgggattacaggtgtgagccaccatgcctggcccatctattcaatgtataaatgtttactgagcaactagtatatgctacctgctgttctagaacctaggaatacagcaatgaatgagggaaattccttttctaatgagcacgctctctctctctctctctctctctctctctctctctctctctctctctctctctcgctctctctctctctctctggaactgctttgtgattgcagtatgacatctggttttcctatacaggtacaaggtggctgtgcttgagacatgccaagttttttttaactcagaatacttaccatataaatagagcaatagagtatgatagacaaagctggctaggaaataaaaagcagtggaaggaattcagtttgatgacaaagaagtgtgaattgcccttaagaaacaaacaatagaataaaatgagagcctgaaaataaataacttggttatttatagatttcttgtgtctgtcaatacagcatcacagaccaaaacatttaaattcaggggttttgttgttgctgctgttcttttcataaatatggccatattagaaaaactttacatggcgtttttctcttatgcaatcttttttatgtagcagtttcctgggaaatgttatgtcagctttaatacaggcctgaatttaactggcaaatagtgacacaaattgtcatgatggaaaagtaacatgttgggggttttaataaccactgaaatactgatagccattttcttttttttttaacttctacgttatttagggacctattttgcagacataaccttaaactaaaatatcccgtgtccattgagaagcctacccccacaaaaataaataaatagatgtgggaatgatatttggagtttgtgagtaatgtttgttttgttttttgtttgtttgtttgttttgacacagggtctccttctgtcacccaggctagagtgcagtggcgccatctcggctcactgcaacctctgcctcccaggttcaagtgattctcccacctcagcctccagagtagctgggactacaggtgtgtgccaccatgcccggctaatttttttttatttttagcagggatgagattttatcatgttggccaggctcgtcttgaattcctgacctaaagtgatccacccaccttggcctcccaaagtgttaggattaccagcatgaaccaccacacccagcctgaagcttataagtaacattctgttttgtttttttttttctttttcatactttaagttctggggtacacgtgcagaacatgcaggtttgttgcataggtatacatatgccatggtggcttgctgcacccatcaacctgtgatctacattaggtatttctcctaatgctgtccctcctctagccccccaccccccagcagtccccagtgtgagatgttcttaaactggcatgtttcttggccacatctcttgaattttaattattgtactttgaattattttgatgttaagattaacttttatgcttatgcttattgctgtcgtgagtggtactaaagagtcctgggttgtaaattgagccacgagtgcaaagaggaaattaaactattctatattcaaattaagccataaacataggaactggactctatactggggagggcgggtaagaacagtacaggagcatagggtgatccagcgtcacacagagcaggtgctcaggaaagacatcaataaactgccgatgaatcaacattgtaagaacaggggaatgaactttgaagtttctttgacatcagttattccaacaacctcagaaataggtgctgcctcctctcctatataaaggaggaaactgaggcacaaagagttcagtttaggtttattttaagagacagagtctcactctgttgcctaggctggagtgcagtagagcaataattacagcttactgcagcctcaaactcctgggctcaagcgatcctcttgcctcagcctcctgagtagctgggactacatgtgtgcaccactatacctggctaattttgttttttgtagggatggaatctcactttgttgcccgggctgatcttaaatcctggcttcaagggatcctcaggcctcagcctcacaaagtgctgggattacaggcatgcaccactgcacccagccttattttgttgttaaggcaatatttatgctgtgtttctaataattcacttatcactcacaagagtcctgtgaggcagacctattgtttttatttcacagagaagaaaactgaggcacagaactttaagtggcagctttgatcacggggctaagatatggtggccacacatagtcatgagtgaggagagcaggctccataacttgtcctcttagacgacttgctggctgtatattcccctgcatctggggtgtcagattatgcacctgctgaatacacagccagcaaggagcagaacaggactgtctgatttcaaaatctatgtcctttcccctatccttagctgcaaaaccagtgatattccctactcactgtgggaagaagcatgaatgccttcctaatcatcaaagccaagaggttttgtccacaattcaaattcctgctgacctttcttttctgttcattgttcatccctccttcatctcattgtggtttttttcctgcctcctacttctctgagcatgacctctcattcttctctgacttttcccccatctactaaatgtgtgtgttcccttaagttttatcttaaactctctttattcttttatctgcttggagcatctgtgtcttagcattctcctctacttcccgggctcatccattacctttatgtagccatcctaaagtagacttttcaaaaattccacctgtaatcccagcaactggggaggctgaggtggaaggatcgcttgagcccaggagtccaagaccagctggcaacttaatgaagccctgtctctacaaaaaattaaaaaaaaaaaaaaaatagctgtgcatgatggtgcatgcttgaagtcccagcaacttgggaggctgaggctggagaatcgcttgaatccaggaggtggaggttgcagtgagccaagatcgcaccactgcactccagcctgggcaacaaagcaagactctatctcaaaaaaaaaaaaaagaaagaaagaaaaaacaattccagtcatataagtccaattgcttatcatacatttctccacggttgttatattactgttatcctgtctaaggtaaaattctttttttttttttttttcgaaacatagtcttgctctattgctccggctggagtgcaagtggcatgatctcagctcactgaaacttccaccttccgggtcaagtgattctcccatctcagcctcctgaatagcggggattacaggtgcatgccatcatgcctggcaaatttttgtatttttagtagagatggggtttcactacctaggccaggctggtcttgaactcctgacctcaagcaatctgcccgcctctacctcccaaagtgctgggattacaggcgtgagccaccacacccagcctaaggtagcattcttaattgctgtttcccaaaaccaacccctgtttctaacttccatattattactgctacacatttttttatattttttatattttgtagggatgaggttttcccatgtcgcccaggctgatctcaagctcctgggctcaagcaatcctcctgcctcagcttcccaatgggtagcagatataagacaatttgtttaacaattaacactcagtttatctagcagtggttcacctaatgattgaagcctctttcgagtgtttttgtatacatgcatacatcctattcttttcagccatattgtttttcttgttaaggacttcttaaacatgcttattaaaacattttcaacttaatttgtatttctaaaaagtcatgatgaattttgtttcagttatagctattaagggttttctaaagatcctctcttcaaaatgttttgttaggagcaatagatatttgtaaaatttatgaaaatttgactagttttttctaattctttacattgtgtgattactgtttcctccttgtttttttcccccaagtgattatattagtattctatttttgtcattttagagaatggacacagaagtcaccataggtgaattgacttaaaatcttttaagtataagaaaaatagcaaaaatgataacctgcgaagtgggtgatcaattttttaagtccataacgtgttaaaagtccataacaaatattgccatagaaaatgcatgtagaggctgggcgccgtggctcacgcctgtaattccagcacttcgggaggtcaggaatttgagaccagcctggccaacatggtgaaaacccgtctctaccaaaaatgtacaaaaatggtggcacatgcctgtagtcccagctacttgggaggctgaggagagagaatcacttgaacccggcaggtggaggttgcagtgagctgagatcgctgacactgcactccagcgtgggcgacagagtgaaactctgtttaaaaaaaaacagaaaaacaaaagaaggaaaaggaaatgcaagtagaatgttagaccaggtcttcattaagtgacttcattaactctgggctaattggctctacctgtgagcaaaagctgattgtctgtgttgaagacagtttatccacctgtctctcctctctgtcatagtcacatgttgcctctcccccatcttctctgctcacacatctcagaagctcctaaccagcttttcttcccatgaacagtaaaataggtttcctaaataaagattttgacatcccagccccttgtgttaaaatctgggatggctcattatttacaagatcaatttcaaaagtattagcctggcgttccaggctctcaacaggatggatggctcaggcttggcttttcagacataacacctatggtttctgtacaagcaccaagcagcacgtctactcacttgaggatgtcttgtacccagtcacccccgctttcttcctggttgaaatcctgtcgccccatggggccttctctgttccccatggaagcttcatcctctgatcctcagtgccatatggtatttgttgtgctggttatttcttgacatgtctgtcttatgctttcaaagagtgtgcactctctgaaggttcagcatgaaactaccagtaccttccattcccttcagtcttctattctagtaagctcaaagctagcagttcaaagctagtatttaatagcatgtttaaaatatgtatatgactagacaatgtggccaaaggaagtgtctgagccagagggtctgaattcaggtctttgtctaacatactcattatagctgtgtgacacttggtatggcacctaacctctctggaaatcagttcttttttttttttctttaaatagtaaggatagttataccaatcaaataggtttggtttaaaaacagatcattttggataagtgcattctatatcataaactgctttaaaaatgttaatactggcaatatttttattaatgctgttgcgaatagtagggtcttgaaggcagtttaattttttttttttttttttagatgatgttttgctcgttgcctaggctggagtacaatggcacaatctaagctcactgaaacctccgcctcccgggttcaagtgattctccagccttgcctcctgagtagttgggattacaggcgcctgctaccacacccagttgattttgtattttcagtggagatggggttttgccactttggccaggctggtcttgaactcctgacctcaggtgatcaggtgatccacccacctcagcctctcaaagtgctgggattacaggcatgagccgcggtgcctgccttctacatgcgttttctatagcaatatttgttatggatttttaactaattttttttttttttctgggagatagagtcttgctctgtcacccaggctggagtgcagtggcaagatctcggctcattgtaacttccgtcttccgggttctagcaattctccagcctcagcctcctgagtagctgggattacaggcacgcaacaccacgcctggctaatttttgtggtttcaatagagatgggttttaccatgttagccaggctggtctcgaactcctgacctcaagtgatccacccaccttggcctcccaaagtgctgagattacaggcatgagccacttcgcccagccaaggcagtttaatttttttcttctggtcttgtcttctctttctttctacatttctcaccctcttctttcatctcctgcctgttctacatctgttacctctgacgtgcatttgttgccaccgtttcttttgtgtgtatcaatttactttcctctccttgctttagatatctttcatcttcattcccaatcttcctctttctgccaaaatgtcattttccatgcgatatttcttccttcattattctttagcttactttcttgttagtatgtataatagggtttaaaagtgatcggagattaaagaattatcataaaatccagaagtccatacaatttctcttgcacttaggatagcatttttttcaagtgctgttttatttgtaggcacagaattttggaatgttagtagtagaaagaggtgtataaattaatctaatccaatctacttgggttaaggatgaaagcagatgtctagagaagttaaggcacttgtcttggacctcagagttaattactgactgagttgatagttaagaccatttcctgagttcaacttactcttgtctcattttttgctaaccactgtattgtgtttcctgcccctgagtttggttaagggcaccatctgggagttagtttgttttcagcatgcaatcaagctgattggctttgaacgagttatttacccctctggccttgacattctcatcagaatatgagaggacaatatagagattctttaaggcctctttttaattttcaacctttcttcatccatatttgacagttatttggtgacggccaattatttacaaataaaagcgatttggactcttacattcagtttgccttcatgttttattccaaatgccacccaagtttgggcttcttttgggcattactgtattttaatctatacaacctcataagcttctccaggatttgtttaaattatttctaattaaaacatgatggctttctgggcagaaatcctgtccttgtactacaaggatgtttggcaaggttattgttattttttaagaggctgaaggaaaattaaatattttgctgaaatattttctctggattataacgttgggacagaatagtgcaacatgcttagtgtatactacctgaatgttgaaaaagagagcctccattattccttatttggagaacagtatagtattaaccattcattgatttcagtgaatactttctcacacaaattattcacaatgtgaaggaaactcagatcaagaaagaaaagaaatgtatagaactatctttgttgaggatgtaagaatctgtcaatttggcctgtggagggtaggaattccaggaagtttctgagccctctcacttctcacaaacactcacattcccttcaaattcatagaaaaccattctacccatttaaataaacaagaaataagtcttgcttatttcattctggttcattagggttcttttcccatctacctggctcactggaatgttggctggttctacctttcaaatgtaggagcctttccacatctaggtctgggtcatgtaaataaacagaaacttgaatgaaattctcgctgagggcggtggctcacgcctgtaatcccagcactttgggaggccgaggcgggcggatcacgaggtcaggaattcgagaccatcctggctaacacggtgaaaccccgtctctactaaaaatacaaaaaattagccgggcgtggtggcgggcacctgtaatcctagctcctcaggaggctgaggcaggagaatggtacgaacccgggaggcggagcttgcagtaagccaagatcgcgccactgcactccagcctgggcgacagagtgagactccgtctcaaaaaaaaaaaaaaaaaaattatcctggcccagcactttctttggtttattttgcttttaataatcaattaatatagtccatcgaagactgattttgggctgggcagagtggctcacgcctgtaatcccagcactttgggaggctgaggtgggtgaatcacttaaggtcaggagttcaagaccagcctggccaacatggtgaaaccccgtctctaaaaatataaaaattagccggaaatcacttgaactcgggaggcagaggttgcagcgagcggacattgtgccaccgcacactccagcctgggcaacaaagcgagactccgtctcaaaaaaaaaaagctgattttggctgtttatggaattttcagtcagtttgccagagcatcatttcctgaagtgcttacaaatagtcattttttgtcttttggtgtctgagagcctattttaagagcattgccaagcgtgggaaactagtatcactatattccagctgtggaaactgtatcactgtcataatgcacttgaacttcctatgaaaggatttcttagcggacatgctgagaatttacttcgaggtgtgtacgaaacatgtactacgatgacgatgagccttctgaagtggtaagaaacatatacccattgacatctgacatttttcatcatttttttaaccatttccaagtttgtttttaaactttccactaaagtgcttgttgtcactaacagtaatataaaacaaatagtattttttttttttcccttagggactagcacaaatgttgaaatactttgggacaaagtttgaaatgaacacattttataattatattattttgttatatgcggaattattttttgtgcttgaacttggattttaaatagttttcaatatcttcacacgtcttctgaaaaggtatttttaaaaggttttataagtgtaactatagacagtttacattcttttttaaaaaacttgatttcctagtgaaattatatctgttaaatatagttaaaagtaattgaattgagaattgtatatgttataaaactttggatgatttgtaaatacttagtaaactgttagtgaaacctcactgtaagaaatgtttctcttaaatgtttaaaaaagtatttaaattaagagtatataactaattaggattctgtattgttctcaagacataaaattatgtaaaaattcacatttatcaatacacatagcaaaacagacagtaaatgtagtcacctgttccttgtatgcaaataaaagatgaagctaaactttaagagttagggatacatttttgaaattgtagaaagctatattaaaccatatacttctttgaaatagtatataattcaattcaaatttaataattatgtttctgcttccttaatatcttattgaattgtgatgtaatttaatttgattttagaaagacttaagaattctaagtttgactgttaagaaacgaacctatgttaaagaatatattttggccgtctggtcatattctactgaaaacgaaattccctttttaggtgcgtttgggggtacagtagaatgagattatttcactttttgtcatatggccaggaggaaagaaatttcttgaaaagcaactgagctctctcctgtaaacacagcaagttgaaatcgcacagctcctaatttggtgtctttatttcaatctttggagtaagattatgaacaatagctataattccattctgagagttaaaagttttcattgtaaatttcaaaatggtcatttctactaatatgggcattatttttccaaagacccacttctgtctcttgtttttcgccctcgggtcactggcaatatggaaaaaaactttcaaaagagtaggatatgactccattccagtgttcccaggaactgaaagtgattgcaaaattataagctttcagaataacacagagaaaacttctacgaaacaagtaatgcagaaatgcatccaatatttaggccttgctctctatttttattgcctgcatcacatgtggctcatacagaattttcaaactatttaagagttgcatttaagcatatgctaccaaaaaggaaaaaagtattttgaggaatggtgttaacattttagggaaagcattcctgaaaatgagttccaggttttgttatttttttaataaaagaatgtaaatgtatacagaaattatttcctagaatgtacttgaaggagtattttaggaatacaaacattcattaattaaccctcatgtgtttaaaatatacacctgttatatatgattatgcacaaaagccagtttttcatgaataatttgtgtcttttttacataatttcagaaaccatatgctctataatgaagaaaaaatatttaaagtatgtaatcatgttaaacagttacagcatgagtcactctatttaaaaaaaaagagagagaaccagtctgcacgtgacaacaagaacttaaaggatctggtgttcatttgaaatgtactggtaatttaacatcactgtaaattcattaacttaggtcattctggttattgagatcaaatttgaaatttttcttttgttaagtattcaaatgtttaaaagccctgtaaaccagatcagagtattaggacataaatttgagtgtgtttattccttaaaatgaggtctacataactgttttaaaaattgcctctggtaattcttctaagtcttacagtaaaatttgccagaggcgtactatttaaattacaattaagctatcaaatttaaaaattactttttcatttcttttagttctgtttttctccccgtgaatcaaatattgtttgtgctactaataattttttgtggatttgtcattatttttgaatatttaaaatatcctgtactttgctgtagtataggtggcagtagtctaaaccttgatctttttaatgcattcacatcaggatttttatttttgtgggaaggtaaaaatcattattttcccctaaggtcagtgatgtggtcttatttttaagaagaaacatgcatcaataagaaacataaaaataggctgcctttgaaaggactactttatttaagaagatatatttccttattgtgtcttgttagagggtggaactgggccattagtggacaaaagggataagagggtcgagcatggggtttcacacctgtaatcccagcactttgggaggcccaggcaggcagatcacctgagatcaggagttcaagaccagcctggccaacatgatgaaaccctgtctctactaaaaatacaaaaattagccaggcgtggtggcacatacctgtagtcccagctactcaggaggctgaggcaggagaatcacttgaacctgggaggcagaggttgcagagagccgagatcatgccattgcactccacccttggcaacagagcaagactctgtctcaaaaaatcaaaataaaaagggacaagatatatctcttttctgttcagaaaataataagtgagcccactgataaatgacctgccaacctcccagttctggaagtcttttgtcctgcttttggcatgcactagtcaacactgtccaatagaagtttctctgataatggcaatgtttatatctgcactgtccaatatggttgccactagccctgcctggttattgagcacttgaaatgtggcaactaaacaattgaatattgagttacatttaaatagccacacttgtggcttctactagactcctttctgtacaaaatgtgctccctgcaccaggagtgccggcattaccgtggagcttgttaggaatgcagtctcagaaaccacatcttttttcatttgtttttttgaggtagagtcttgctctgtcacccaggctagagtacaggggcactatctgggtaggctcactgcagcttccgcctcctggattcaagtggttctcttgcctcagcctccccagtagctggaaccacagacatgcaccaccatgcccggctaattgttttgtatttttagtagagacagggtttcgccatgttggccaggctggtctcgaactcctagacttaagtgatcctcccaccttggcctttcaaagtgctgggattactggcatgagccattgcacctggccagaacccacatcttaacaagaaccccaggtgaattaataaactcattaccatttagaagtcctcatagggctggggagcagccttgtagagctcatgcttacttaaaatttccatcattctttaggcattaaaaaagtaatccaagcttacatatcataatttttaaagtactctttataattaaactttctcccattgttgggcatttaggttgttttacacatacacgcaggcacatatttgtatagatacacacatatgtgtatatatttcaacatctatatctcgatatgtaaatatagataggtacacatgtatatgtcacatggtgaacattctcttacctaaatattttacgtgcatctttttctttcacaaagattccagaaaaagataattactgagtatttacttttaaaagagtaatatgtattcatacactgcttttcagaaaggttatactaaatttagacttccaacagccagcaatgtttgagttccactgtattactattatttaaaaatagttatttgatagacaaaaatattatctcattcttaaacatgtgcatatttctgattactgttaagtttactgtttttattttgttttttttaattatactttaagttttagggtacatgtacacaacgtgcaggtttgttacatatgtatacatgtgccatgttggtgtgctgcacccattaacttgtcatttaacattaggtatatctcctaatgctatccctcccccctttccccgaccccacaacgggccccggtgtgtgatgttccccttcctgtgtccatgtgttctcattgttcaattcccacctatgagtgagaacatgtggtgtttggtttttttgtccttgcgatagtttgctgagaatgatggtttccagcttcatccatgtccctacaaaggacatgaacttttttatggctgcatagtattctatggtgtatatgtgccacattttcttaatccagtctatcattgttggacatttgggttggttccaagtctttgctattgtgaatagtgccacaataaacatacatgtgcatgtgtctttatagcagcatgatttataatcctttgggtatatacccagtaatgggatggctgggtcaaatggtatttctagttctagatccctgaggaatcaccacgctgacttccataatggttgaactagtttacagtcccaccaacagtgtaaaagtgttcctatttctccacatcctctccagcacttgttgtttcctgactttttaatgatcctcattctaactggtgtgagatggtatctcattgtggttttgatttgcatttctctgatggccagtgatgatgagcattttttcatgtgtcttttgcctgcataaatgtcttcttttgagaagtgtctgttcatatccttcgcccacttgttgatggggttgtttgtttttttcttgtaaatttgtttgagttctttgtagattctggatattagacctttgtcagatgagtagattgcaaaaattttctcccattctgtaggttgcctgttcactctgatggtagtttcttttgctgtgcagaaggtctttagttgaactggatcccatttgtcaattttggcttttgttgccattgcttttggtgttttagacatgaagtccttgcccatgcctatgtcctgaatggtattgcctaggttttcttctagggtttttatggttttaggtctaacatgtaagtttttaatccatcttgaattagtttttgtataaggtataaggaaggggtccagtttcatttttacttttattttgagatggagtttcactgttgtcacccaggctagagtgcaacggagtatctcggctcactgcaacctctgcctcccaggttcaagtgattctcctgcttcagcctaccaagtaactgggattacagatgtccgccactatgcctggctaatttttgtatttttagtagagacagggtttcaccatgttgaccaggctggccttgaacttctgacctcaggtcatccacccgccttcgcctcccaaagtgctgggattacagatatgagccactgtgcctagcgctgttttcatatttttaagccatatttccttcttcctcatttatgtgtccttggataagttatttaaactatctgcactttactgtcttcatcttaagttgctttgtaaggtcgctgaagaccaaatgagttagtatatttcacatactgggaacagcaggtgctgaataaattcttagctactattactcttagtccttggtatgacttttgtccactttctcagttgagtagctgagactacaagtgtgagtcaccacacccagcttattttttttattttattttttgtaggaatggagtctcactatgttgcccaggcaggtctgaaactcgtggcctcaagcgattctcccaccatggcctcccacagtgctaggattacaggtgtgagccacagcacccagccccatatttccctaaagactagcagaactcacctcaggctgcactgtcaggaggttgtaaagaagcctctttttgagggttcctattatctgtgttagaggcagaaacttacccctctcctttcattcattcactcagcagggatttattaaacctttatgaaatccaggcactgctttctgctgctctgaactcaatgctgatttgttattgattctactgctatattttggtctcccaaacaaggtaggacagctttccttaagggccttcaacccaccatgatgatagcagctattatttattgaatatttatggtaaggcattatattaagtgatgtacatatattattccaaacaatgtttttatatgcaaaatttacagatgaggaattcgaggcttaatgagtttgaaaaatgtgcccaagatcacatagttcataagaggtagaaccagaattcaagcttgggccagccaactgcaaaatccaagcctcttcattgctttactctgttcctcccatgaagtcaccctcacaatttctcatttgttctctcaagcctttgaggttagcctagatgttccttcagatttttcattagtatttttttgatttatatttagttaatgcataagatgttagaattattaatgcagttgctatgtgatttgctttgggggaagtatttatccagtagatctctactgaagacattggtgcttgtaccggttctctctccaagacaatactgatttccacacttccaaaacaaagttaagatgtaaaaacagagaatacagtgtgggaggaaatcttgaagacttgtgtagaggaatagaagcaaatgtaaacaaaataaataaattagcctccctctttcacactcccatattgcattgtaacactgtactgatttagagaaaaaatattataattaacagcatatcagggatagatagaatggtagaggaagaagaagctatacagtgattaaagacataaagtactgttttgattgaggtggaaaagcctgcagagatgattcacaaagctataaccagagcactggatgagcaagaaaagatttgaacatgaggtgttgcctctgaagtttccagaacagggaaggcttaggagaaagtcagtggatgaagagatgccaagtagaccagagggaaaaatggaatcacaagatcacctttcaaaggccgaagagagagggattgatcctgaattaataagaaagagaggtgtcccctgtgatgagtataaaggggaacaggtgacctgagagctgaaccagaggcaatatcaaattagtcaaggcaaggccgggtacagtggctcatgcctataatcccagcactttgggaggctgaggcaggaggatagcttgagcccagaagtttaagaccagactgggcagtatagtgagaccctgtctttattttttaaaaaatagaaaatttaaaagaaattagtcaaggctaaggtggtgtaatctgaataatcttttgaagtcctttgtcacctagataggctttttgtattctccacagtagttcaacactctgcatgatgtatgtagcatttcatgtcctgtgcaacagcagaatcacaatgtagcactaaatgccactttccttatgcacacccactgtccttaatgtgttacttagcatcagctctatgcatagggtacagcctccttcccagttttcagataaagaaactcagccttagaactgtaatgtaatttgtccagtagcccctagactctcagatttagtatttgtcagactaccccctaaagacagggtactttagtaaaagcaaaagcctgtgtccctaagatttagcctaaggagaaagttctactttctctgtttgttaaaacttgaaaatgcacacggcaacatggcaagaccccatctctacaaaaatttaaaaaattagccaagagtggtggcacacacctgtggtcccagctactcgggaggcaggaagattgcttgagcccaggaggttgaggctacagtgagccatgatcataccactgcactcagcctgagcaacagagcaagaccctgtctcaaaaaataaaaaataattgggaggtgaatgtgtccaagtgtcttcttctcttttattttgtcctatgacttctccctcccaatcctgcaccaatgccatagggaaaaagatacatgtatctttattaagataaagataatctcaatgtgctaatggggatgaagtctgttgttaaattcatcattttctaagtcttctgagaggtagtatttactctttggattgagctttcagacctatgcattgggaaaatgtcaggccatttaaactagaaaaagtagcttttaattgatgaagacctttgtatttattttccctgagtagcctcttgttccttaaaaccgggaaatagaaggcaatatttgtcacaaaaatacttctagcaagcaattgaaaatttaatttttctaggacccttattggggttgtgcaggagcccattctctgagtgacatctctgataatcgtaggcctgagcatgtttattcatacatctgaagcccagagagcaaatgcctgaacaaatggtattgcctgtgtctacagttgaaggatggttcaatgttaccagtttgttgatacgctgaaaaccaccaggaaattgcctccaaatacctttgacatagatttggacaacagaaatatttttacatcagttgaggtaactggatttaatcactggattaaaaaccacctttactaaccactatagagaacagatggaggttgctcaaaaaactaaaaataaagctaccatatgatctagcaatccaatttctggatatatacccaaaagaaagggaattagtatttgggagagatatttgcactcccatgtttattgcagcactattcacagtagccaggatttggcagcatcttaaatgtccatcagcagatgaatggataaagaaaatgtggtacatttacacagtggagtactattcagccataaaaaatcagtttctgtcctttgcagcaatatggatgaaacttgaggtcgttatgttaaatgaaataaactaggcacagaaagacaaatttctcatgttctagcttccacttatttgtgtgaagctaaaaattaaaacaattgaattcatggagatagagagtagaagcatgtaccagagactgggaaaggttgtggtaggggcaggcattgggggacaaggggatggttaatgggtaccaaaaaatagttagaatgaataacacctagtctttggtagcacaacaggatgactatagccaataattgtaagagttaatgaaagaggaaagaaacacaaaatgtggctggacagttaaagagagaattattttagataaaataaacttgagaggggcttctggccaattttggtcaggagcactttctcttacaggcttagagtggttttagggtgaggaggcttatcacaagcttagaatgtttctgtgtgagggagaagttttatggtggggttggactatctctgcctagaggggaggttatcttggggcagacatctttccagctcggaggagggttatcttaaggctggcatcttcccagagggtttatctcagggctagcatgtccccggtcagggaggagtttggaatgtttctgctgggagatgttatttggtttatagtcatgctgaccttagccattaggctgatgccctttggatttaggcagtttttgattacggtgaactttagaatgagcggcttgtccaagatggcgatgttcctgctctgtcaataataatttaattgtaaattttaaaataactaaaagagcataattgaattgtttttaacccaaaggataaatacttgaggtaagggatattccatttaccctgaagtgattattatatattgcatgcctgtatcaacatatctcatgtaccacataaatatatacacctgcaaaaagaaaaccaaaaaccacccgttctaagataccagtttaagtgtaaataattttaattagtgggtatgtgagaaggggaggagatttcttgtactacatagatggcttctaaagttaaactcctccattacgtttatagaaagaagaattggagtaaggaatgacttgataccaatattaccaatatgtgtattgacatcttgtgagctatataatattatgtctggtgtatcctgtaatacagaggttgacaaagtttttctgtcaagggccatgtagtaaatatatttggctttgaggccataagatctgtgttgcaaccactcagttctccataaaagcagccatgaacaattcgtacaagactaagtgtggccatgttccaataaaattgtatttagggacactgaaatttgaatttcatgtaattttcgcaacatgagatgttcttcttcttttgattgatttcaactacttaaaaatgtggacatcattcttagctcaagaaccatacaaagaggcagtggatcaacttaggcccatgagctatagttggctgatctctgatatagtctgtgtggttagagcggggaaggtatttttataccagcaaaaacgttatgctttctccacaagcctggtataaaaattgggaatgcgctacagatgccacttggtagaaagctgttttattaaggtttctgaaaattagacttgccaacacaaacattaaccttcgctccctttattcagatgttacatttaaatttttacccagacctgggaactgagtaaaattataattatgatagacacagggcccttgaactctttcttttggctgttttgaaaggtcgttgtcttcatgttaattaggagccaggaacattctgcttcagctgcttgttgggaaggcattatcattagggaaatgatctaatcaagagtttgcatgggaggtggggtgtgggcctggaggctaggaaacctgagaggttgaattacagggacacgcaactgataattataataaacttctccctagacctgaatgcacagcttggaacctgtcagttttcacattggaattattatactcaaccaatgacagtgtatttggtgatatgtcaacattttcattctgaatgagtgttaattgggtattttagtgcttgaaattatttgttaccaaaaacactgacacagcctgacattctctgctttttataattctgtagcacctataaaatttctttctctagatttaattgctttatacaaaatatgtacgtcaattaatcagagctgtaattattagactccacagttggccgggcatggtggttcatgcctgtaatcttagaactttgggaggctaaggcagggggatcacttgagcccagaagttggagaccagcctgaacaacatagtgagaccctgtttctacaaataattttttgaaattatacaggagtggtggtgtgcgtctgtgatcccagctactcgggaggccgaggtgggaggatcggttcagcccagaaggccaaggctggagtgagctatgatggcaccactgcactccagtctggggaaaccctgtctcaaaaaatagaaaatagactccacggtggcctgacggttaagtatgcctaaatcagccattcacaggtcagggggttctgaaaggggctcttcagaattataaacttcaattttaaaaccaaaaattacctcccttcctctttctgctcccaactccttagaacaaatttgagttgagtgcctgccagcccagggctgttctaggtgctgggggccaacagcacagaccagtgttccaaagccaggaacccgggctttcttccagcagacttttattgtaatgcatccatttgcttactagagagaatttcttctgtgtgtcagttttttattgtaaattttgaggcttactcttgagttctccacctgaaatcaaatttggctttgtcttttcttaaaaattattttattgtggcaaaacatacataatataaaatttgccattttaaccacttctatttatttttatttatttattttttgtttgttttgagacaggggtctcactgtcatccaggctggaatgcagcggtgtgatcttggctcactgcaacctctgcctcccaggttcaagcgattctcgtgcctcaggctccctagtagctaggacaacaggcgttcaccaccatgcccagctaatttttgtattttttggtagagacatggttttaccatgttgaccaggctggtctcgaactcctgaccgcaggcgatccgcctgcctcagtctcccaaagtgctgggattacaggcatgagccactgtgcctggccccattttaatcacttttaagtgtacagttctacagcactaatccatcacattgtcgtacaaccatcaccactacccatttccagaacattttcgtctttcctggctgaaactctgtgcccattaagcactaactctccattctcaccactccccagccccagcacccaccattctacatttctggacaaggggacagggtttcactctgtcacccaagcttggagtgcagtgatgcgatcatagcacactacagcctcaacctcccagtctcaaacgattatcccatctcagcctcccaagtggctgggactataggcatgcaccacctcgcctggctaatttttgtattttctgtggagacggaatttcaccatgttacacaggctggtctcagactcctgggctcaagcaatcctcctgtcttggtctcccaaggtgctgggattacagctatgagccaccacacctggcccactattctaccttctgtttctatgaatttgactacactggggatttcatatacatggaattatacagtaggttcccttttgtgactggcttatctcagtttgcataatgtcttcaagatttatcagaaactttacattcttaaaaagttttttcaatgtaaatttttagttttaattcaatcaggttaaaggtcatatctcaagaatgaacagtgttcctcattccttcttaaaatatttttaaaatgttttttgaaccaccaaatggcattttcattttgttttttcttagcaaaaaaataaaaattaaaaggtcttattggttgaaaacccttgaatattacagtctaactaggagaaccaaagtacattctttgcataggggtcaggaactattttaagaataaattcttctttactttctaaagtaaatgagaaattgctaacttgaaacatgtgtttttcttttttttttttttttttttgagatggagtctcgctctgttgcccaggctggagtgcaatggtgcaatctcggttcactgtaacctccgcctcctaggttcaagcgattctcctgcctcagcctccccagtagctgagactataggcacgtgccaccacgcccagctaatatttttatttttagtagagtcagggtttcaccatgttggccaggctggtctggaactcctgagctcaggtgatctgcccacctcagcctcccaaagtgatggggttataagaatgagccaccacgccccgccaaaacatgtatttttgaggttaggtttagagaaagatgcatcataatattcttaatttttcagcgcattaaagaaaagatgaataggaaaggagataaataacatcccaactgggggatcctacttttaaagaaaatgtgtagacttttcaccatgcgatcctcatacaatcttgatcttatattaattagcatatttcccctatgtgcggaaatctgtaatgcccttcctctgtggtgggctgccttgctttgaaaacaccaccaggagcccctctgaagaatgacagcagcaggtgttctgagagaaagtagtgagatggacagagctgtggatactaactgcagagaccaagtctccagacacagggccagctggggaaattctactgctggctgccattccttggttctgttgtcagtaatcacaggtcacaagcctcgcctctcctgcctactagatggttcattttggccgggtgcggtggctcacgcctataatcccagtgctttgggaggccaaggcctcccaaatgtatgaactctcgtacattactggtatataaattggtaaaaccatttggtaatatacctattaaggctaagcatgtgtatgccctatgatccaggtgtcaaaagacatgtataagaatgtagcagggcaccgtggctcatgcctgtaaccccaaaactttgggaggctgaggcgggtggatccggaggtcaggagtcaagaccagcctggccaatatggtgaaaccccgtctctactaaaaatacaaaaattagctgggcgtgatggcgtgcacctgtagtcccagctactggggtggctgaggcaggagaattgcttgaacctgggaggtggaggttgcagtgagccgagatcaggccactgctctccagcctgggcaacatgagtgagactccgtctcaaaaaaaaaaaaaaaaaaggttcattttaatgtaacttagttgactgtagaatttggaatgtgaagggataggattgtattaatgagtgttgtgttcgtatattacatcatgctgtacccacagaaacaggtcctaagaaatgctattctctaacaatacacattcatgatgtggctcacccagagcaccaaaaccctgctggccatagcaggtagggtccacttatccccggcatcgcctgggacatcatatggacatgttcttttacttggttcttcatgacaagcacaaaagcataacttgagaaggattgaacttacattagaatgagacttttatgtatttttataatatcgtcatcttaagcaaaattaaatgtgttataaatgatatatggtggacctctgatgttcatgtgtgtttttcacctcaccgaagaatgctaaaaattaatcttaaatatagcaaaattacagcaacaataataataaaatatacttgctcagaatggatcttgtgtcctccagcattgtctagaattttccagatttttcaggagggctgtctcgtctcataactctgtgaatgtatatcactccagaactgccttttttctctgcttagacagttgtatctttctttgtattgagtattcttcggtgagttagctcagtgcctctttttttaaaattttttattttcattttaagttcctgggtacatgtgcaggatgtgcaggtttgttatataggtaaatgtgtgccatggtggtttgctgtacctatcaacccatcacctaggtatgaagcccagcatgcattagccatttttcctaatcctctccttctcccttccccacccaccaacaggccccagtgtgcgttgttcccctccctgtgtccgtgtgttctcattgttcggctcccaattataagtgagaacatgcagtgtttggttttctgttcctgtgttagtttgctgaggatcatggcttctagctccatccatgtccctgcaaaggacatgatctcattcctttttatggatgcatagcatttcatgatgtatatgtaccaccttttctttatccagtccatcattgatggacatttgggttgattccatgtctctcctattgtgaatagtactgcaatgtacatacgagtgtgtgtgtctttgtaatagaatgatttatattcctttgggtatatacccagtaatgggattgctgggttaaatggcatttctggttctagatctttaatgaattgccacaagcttggtgtctcttctgtgttttcctagcccacaggatggcacgggtgctgtttcactcatgatggcatttcccactggtaggaaatatgcatgttatattatatgtgacaaaatccatggaacactcaccaaagccacagaagttgtatttttacctgcttaacagccggtgtcatccaaggtttgatgtgacagacacatactttattctgttagctacaaatatttattctggtacaggatgtgtttaaaggcataggcaaaggccacattatacaggtaaggagcatggattttaagtggaatagaaagaaattgaagtcttctagatagaggaatgaaacgatctgctgtatgtctgaagatgaacctggccactggaatatagaggggctagcagaagtgggtataagcagagagactaattacaaaggcaccgtaagagtctacgcagtacaggtgagtgacttgactagggttgtggtagtggagtgggaagagtgaggcttgttatgttcatagaggtgtataacagagcaatatcgtcttcatgtgccaagccctgtgctaggtcttggggattcagcagtgacagaggcaacacaaatccctactttcatgaagctttcatattagcagcgaggggtaaaccataaataaatacataagtatgtagatggtgcaccagaaggttggggagatattaagcagagaagaggaatacagagtagcgaatagagtgccattgtttttttttaaatggaatcttgctctgttgcccaggctagagcacagtggctcaatctcgactcggtacaacctccgcttcccggattcaagcgattctcccgcctcagcctccagagtagctaggattacaggcacacaccaccacgcccggctaatttttgtatttttagtagagatgggatttcactatgttggtcaagctggtctcaaactcctgacttcaggtgatctgcccacctcggcctcccaaagtgctgggattacaggcatgagccaccacgcccagccatagaatgctgtttaaaatgccacagttatttatgtaaaatctgtgatctttcacattgttaggagaaggtaaaaagtgcatccagaagcaaggttatcagggccaaagaggcaccgtgttcccaaggaacctgtagtcactggtagagtcagtactgagactcccgaagatcaataggaccagcatatggtgtcttggccatatcatcacgatctgtggtcatgttttgagggcaacttgaatatttttcatgataaaaatatagtgtacctctttttctgtaattgaaaaacaatttccaagtaatggctgtgtatattacgtgaaaaattaccacagaaatcgagagtggagaaaggtatcccaagtctttcatagaaaatgacctggaaattttccttttaaatgtctctttttaaagtagtatgaatatggttggccaggcgcagtggtttatgcctgtaatggcagcagtttgggaagccaatgggggtagatcgcttgagctcaggacttcgagactaccctgggcaacgtggtgaaaccctgtctctccaaaaaaagaaaaaaacaattagctgggcgtgatggtgcacatttgcaatcccagctacttgggaggctgaggtgggaggatcacttgagcctggaaggtggaggttgcagcgagctgagatattgccattgtactccagcctgggtgacagagtgagaccctgtctcaaaacaacaacaacaaacaaaaaacaaaaaaaacccacaaaaccaaaaataaagtaatatgaacatggtaaaaaaaaaaaaaatcaagcattacaagaggttacccagtgccaggttaagtccctcccatctctggctgctggttcctcagttttcttccccacaagcaaccacggtgaccaggttcttggtgtcactctggcattgtggttctcaaccttggctgaacagtagaatcacatgcagaactttgaaaagaacagttgccggctgggtgcggtagatcacgcctgtaatcccagcactttgggaggccgaggtgggtggatcatctgaggtcaggagttcgagaccagcctggcaaacctggtgaaaccccatctctactaaaaatacaaaaaaaattagctgggcatggtgacggacacatgtaatcccaggtactcgagaggctgaggcaggagaatcatttgaacccgggaggcagaggttgcagtgagccgagattatgccactgcactccagcctgagcaacagagagagactctaagaaggaaaaaaaaaacggttgccttatcccacctccagaggctctaattaaattgcttttgaatatgccatagagatttgtaatacccccccccctcgccccccacaggttttaaaaatgtgcagccacttaaatgttctagagctagcctacatactcataaatgtatgcattctttaaaatgcacttatcaaaaaattagctgggcgtggtggtgtgtgcctctaatcccagctactagggaggctgaggcaggagaatcgcttgaactcaggaggcagagcttgtggtgagccgagatcgtgccaagccgagatcgtgccactgcactccagcctgggtgacaagagtgcaactccatctcaaaaaaaaaaaaaaaaaatttattcaaatgacagcaaaacggtgtatttctaccaatgatagaaaaatactctctgatggttttttctttttctgatgcttttttctttttaacctgtaaaatacatcttggagattatttcacattagcatgtatcgctagagataacttatttttttatatgtccaaatgatatgccatcatatggatgcaacataattttatcagtgccctactgatagttatgttattcaaagtaatctgttatcacaaatagtgccataacaaatattcttatatatatatccttatgtacacatttgtatatatctataaaagtcccagaatcagaattagaattatggatcaaaggtaggttttcagttttgataaattctaccaaattttatccataaggggcaatgtgtgagaggaccacactaacagtgcattcgctttgcttgtaatctttgccaataaaaattaaaactagtgttgtctttgattttgccctgttttaacatcaggactaaacttaggcattttccattagcttaaaaccgtttctttttctgggaatgtctctccttcccctgcttttttggcctatttttctagtgggttgttggtgtttttcttattgattataagatgtattaatatatgaaggcatcaaacttttgtcagcatatgatgacatattctgtatatatcatcagtatatgagcaactttactgttgctcttttatttatgatttttttttttttttttttttgagacggagtctcactctgtcgcccaggctggagtgcagtggcgccatctcggctcactgcaagctccgcctcctgggtttgcaccattctcctgcctcagcctcccaagtagctgggactacaggcgcccgccaccatgccctgctaatttttttgcattttttttagtagagacagggtttcaccgtgttagccaggacggtctcgatctcctgacctcgtgatccacccatctcagcctcccaaagtcctgggattacaggcgtgagccactgcgccctgcctttatttatgatttttaatctgatatagtaaaatgtatagcttttatgttttggagtgtttcaagtatcagttggtaagagagctaggtactggaagctattggagaacagagaatatgtcatctatattcttagatcctcagtgcccagcacatggtagataattgttgacagaatagttggatgtaaatgtgatgatgatgatgaaggatcatgaaagttgatcccaggtattcatccagaagaaattaaggcagtaacagtattatcatcatttaattcccttcataattaaacgctccagcgtataatcacggtgtataatacttctggtataaactgaaagtactgagtttcagaaggcagatctagctgagtcgtctcagagccgtcatcttggtcactaagctcttgctccttagaaactcgaagatcctccaccccttcccattggtctttctgcctcggaatgttgttcccttgcctgtatctatgactgtttcctgccagctgcaaaacacagcctaaatatctatttccctttagaagcttcttctgagtcccatcttcatctccctgccatcttccctcatagtgtcccatggctttcctttatagtagttatcagaactgtcataaaataatgttttgtgttacagcctctgtgatgtgtctccctcactcgactgggaaccccaatcacttcttcttccctcatgtccactgggagtgctctgggattggggaacagaggtaaacaaaaaaagctccctgccctcctttgagtattacattctactgtatatatgtgttgggaaaaggagataataataatactgagttgtgcatcatttccaatgattgtcatttaaatgaagcagaaaagccagtaggtgcatttttggcttggagtatctgagtctggtttgtgtcttaatagtagaaggatctagcacataacatatgcatacactaccaggctgtgagactgtggtcaccctcgtgcaagtcaacagacagctgtcagcatagtcaccgagccatttctttctctctttttttttttttagcgacaggctctcattctgtcactcaggctggggtgcagtggtacaatcaaggcttactgcagccttcacctcccagactcaagtgatcctcccacctcagcctcccaagtagctgggactacaggtgtgtgctaccatgcccagctcgttttaaaattttttgtacagatggggtctcgttatgttgtccacattggtctcaaactgccgagctcaagcaatcctcctgcctcggcctcccaatatgctgggattataggagtgagccactgcacctggcccaagccatttctcatccttaccaaaatgtattcttaccaaactgtcaggccatttttgccctgcttgatggaagttttgctatcattaaagtccattacaccttcaaatgcaaaatagagcagatattttcatgcaacaaaagatgctttttcatttgcaagacaagaaataggatataaactacttttgaccaatggtatatgtccagtattttattaaacgttctgaatatagtctagattttctaatattaatattatatatctgtggcacatttccagctaaataatctaaaatttacagcctttttaaaacacagaggtgaatgaaccagattgtctctagttctgaaatcacctcctgaaggtgggtttgctgcttaagggatacattaactatattaggtccctagggtactttccagtgctttatttctgagtactccacaccactggcatttttccagacaaatccctgatggtgtagcctgtttttttaatattaagtctctctgaaccaaagtcatatctttccagaaggttagacttttagaacagtatattaatattttactaccaaattactgggtcattttggcctgcttaagtacctaacctagtaccaacaaattatttaagcaatcataggagaaaaatccagtatttcaggtagacacttaaataatcatttctatacattatacacagagaaatttacttcataatcataaaattttatgtctaagtacttttcttttaattattttcttgcctgtcataattcccatagcaacctttactttgttctctgtttttcatgtgcataaagaggctttcaggagacctggtccttgcctcccttccccatatgcaaacaactacgaaggtgaatcaattacagaaaatatgtataaatcatctcttttacaacatcaaaaatattttcagggtactttgtgagaaatttcaattgcaataggaagggccttttattcacaaacataggaacattacaggaaaagaatttaactgaactcccaacattttttgagaaaatggaatccaaccttatctcttctgttactgtttttgtttttttgagatgggagtctcactctgtcacccaggctggattgcagtggcatgatcagttcactgtagccttgaactcctgagctcaggcagtcctcctgcctcagcttcccaagtagctaggactgcaggtgtgtgccaccatgcctggctcatttttaaaatgtttttgtagagacagggtctccctatgttgcaaaggcaggtcttgaactcctgggctcatgcagtcctcccacctgggcctcccaaagtgctgggattacaggcatgagtcactgtgccttgcctctgttatttgttttacatacgtgaatgtatgtatatatagaaatgattcagttttgtttttgttgttgttttctggttttattaaatacagtcatcataaacatttgcctgtaatcatctttagtctttgtaactattttcaaggttatctaatagtctactaagcatgtgaaccataattttaaaattttcttaaactagttcctagaagtgaaattaatagcctaggtacatctaaatgcatgtctagttacacatagaaagtaaattgtcttcccaaagggttgcgtgaaagccaaaaactatcaacaaggtgtgaaagtatcaatttaagtgtgtccccctgacattgtgaattgggactttgcaaagagcattggtttaatgatggaaaatggtattgtgtttaatttaatgaggttgaacatcttttccagatgcttatggctaattgattttttcgtgaattttctattaatatcctttatttatatcaattcatttcttactgttttacttatcaattagtgtgccttttatatatgcaaagaaaatgttaaacagtaaaatatttaaggactgaagccatatcccttttcacaagtgtgtagttccctggagaacacagaagttagctgttcattcatgcctgtagattaattgttcattgccacccgggagaactcatcttggaaggaaagagcccagattcatttgtttgattgtttcgctgctcaagaaaaggcctggcacttggatgtaccatcttttgacatggcctttcttttcttgagacggagtctcactccttcgcccaggctggagtgcagtggcatgatcttggctcactgcaacctccacctcccgagttcaagtgattcttctgcctcagcctcccgagtacctgggactacaggcacccgccaccatgcctggctaatttttgtatttttagtagcgatgggggtttcaccatattggccaggctggtctcgaacacctgaccttgtgatctgcccaccttggcctcccaaagtgctgggattacaggcatgagccacggggcccagccaacatggtctttctttggtagtagagagtctattaagatattctagagttttatatttatttgtccagttattcagttgcattcctttatattacccaacattgcttgaagaaatatcttctccctgtattggcttgatttttgaaacattctgaattattataagttatatgtatagtcatattttctgctgtaaatttgaactccatctctataggaatgtcaggggtagtgcataagaagtaaatcaacagtcactcacacaatatgttatatttacaatatattcgcaaccatctgtaagaaaatttgcaagtgcattctttctagtagcttcaatttagtatactcattttacaaatgagagaattagccagagaattatttacatgccttgcctttggctatgcaatgagtcactggtacttttaggattggaactttaagttcctggaatgaagaagcagaattaatgggaaaagaagcttcacaaaaaataagttgtaatcatattttcaaaatataaagtctctcttagattcactggaaaaaggatgctaaacaaatttcaagtacaatgactgtttttggagtggcttgcttgttatgaaacatggttatttaatcaactggcctatagttgacatttgcaccaagttaattaagttggcatttgtggaggtttgtgataaaacactggggatagcttcaagctgaagcctttgttttattctttattcattataaatatttatcatccgttcatcatggaaagtcacatttctgtttgtgttttttaattaagaaagagacactagcacatttaggaatgtttaagaatgtttaggaatgcgaaaatggatcgggagagctttcttgtaaattgggagagctttaaactataggatgtaagagagaagaggttttctctctttcagtccttattcattcattccacaaatgtttgttgagcatgcattccatgcctggcactattccaggcacttgggatataggagtaagtgaaacatttaaaaaaatccatcctcgtgggtgttatatcctaatcaagggagacatatactaaacaatatcgtaagtaaattatatgttagaaggtaaaaacactaataggctgggcgtggtggctcacacctgtaatcccagcactttgggaggccgaggcacatggatctcttgaatccaggagttcgagaccagcctgggcagcatggtgaaactccatctctacagaaaatacgaaaaattagttgggcatggtggtgcgcacctatagtcccagctactcaggaggctgaagtgggtggatcccttgagctcaggagacagaggttgcagtgagccaagattgtgccactgcactccagcctgagtgacagagtaagaccctgtcaaaaaaaaaaaaaaaaaaaagaaggtaaaagcactatttttaaaaaagtagaacagggtaagtgagattggaaataccgctgcaatcaatgggggttacaatttgaaataggatggttgcagaagacctcattgagaaagattttgagcaaagacttagaggaggtgatagagttagaagggtagaaatctaggggaggagagtgtctggtacctctgaggaatatcaaggggcccaacaaggttagagccgaaagaagggagagcgaggtggcagggagagggtgtagagatcagcggaagaggacgttactaacaaaggagacttagaaggaacagccaatgggaaaagagaaagaccaagagggagtggtttcttggaagtcaagttgagaaaatgaagagaggacaggggatgatcagtgatgttaaaggctgctgattgctggagtaagatgagcactgagaatcagccatcgatgtagccttagagacatcattgatgaccttgatgaacagttttagtggagtggtaggaggaataggaggaagtatatttaagagagaacaggaagagaagagttagagggagcagagccaactttttctatgcattattttttctgcaaaggagaggggaaaactggacaagagctggcagagaaaatggagtcaaggaaaggttttcttaggaagagagaaataatcacgtgagtttgctgattcaaatgattcaatagaaaaaccctaagtgtagtgacatccatgcagtttctggagtacctgtaaccagcatgaatttctagaccaaaaattccctacatacaatttattcactccttttctcccatttcattgaattttctgcagctatgtattgagacagttcaactctcccaagccactatttttctgctccctgcctacttgttttcaatttcataactgataagatagtttgtatataaaaaattatattagcatgaaaaaattcttgtcattggctggatgcggtggctcacacctgtaatcccagcactttgggaggccgaggcaggtagatcctctgggttcaggagttcaagaccagcctgaccaacatgatgaaaccccatctctactaaaaatacaaaaattagctgggcatggtggtgggcacctgtaatcccaactactcaggaagctgaggcaggagaatcgcttgaacccgggaagcggagattgcagtgagccgggatcgccccattgtactccagcctggatgactccatgtcaaaaaaaaaaaaatcatgtcatctgtcatcatcagtagatatatattaaaggcctagaaaattttcccaaaacacacatacacatacataatgttctaatttttttaaattacttagcctatgactgaaatccaaaactcaaaataatatcaaaattgcccctctaattttaactttttcaaaatggttcctttggacaatgtcaaattttgcaaatattgagcagaggctcttctataaactgtaaatagccatcataccctcatgttaaggaataatttggtggtaacagcattttgatatgttcgttttttaaaaaaatgaaagtcacatgtctgaacttcttgcctactatttgtactttataataacttcagcttcagtactgaaaaccagcaactgttccttttgcactgaaagaagacacttgaatcctagccactttcaggcaggatgagctgccgaccagtctactgaaggccagcttgccaaagttctattcattttcagcaaagagagaaaaacttaaatagccggtgtcttggcttctattgttttccgattctaatctactttcccttgtagataagtaatgaaaagaatgcttggtgatgctgagatactctgaagtgaggaaaatttcagaggagcagccaagtctttccacaaaacagcattctattaatgaatgtaaaatgagccctcggtgtactttcgttgtgcctttttggaaagataaaatttgaaatttttgtttttccaagtaggagtctcactctgttgccaggctgaagttcagtggcacaatctttggcttactgcaacctctgcctcccaggttcaggcaattcttctgcctcagcctcccgagtagctgagattacaagcgcccaccaccatgcctggctaatttttgtatttttagtacagacagggtttcaccatattggccaggctggtctcttggccaggctggtctcgaattcctgacctggtgatctgcctgcctcggcctcccaaagtgctgggatttcaccgtgagccactgcgcctggcccaaattcgaaaatttatagatgtgtgtgagagagagcaagcgagcgtgcctaaagcttagcaaagacatagctaagcattacaaaactatcacgatgcctttatgatcgttagaaatggctatacctatgaccaacaaacagaaaaaacatatgcttttgattaacaaaaacatcagatgcatgtaggaatttgtcctagcttttctttttatgagcagacacatgcatggcacttgaaatttgactgctaaaggtttactcctaactctgtggatccaatttgttatatactcattttacaaagggaggaattagccagggagttatttatatgacttgcatttggctatgcaatgagtcccctgcttcgtggccttgctcaggtagcttctctatgtctcagttttctcatcagtaaaaatgaagataatcgaaattacattaggtaatacttgtgaatcagcacagtacctgacacagtgtaagcatttatgaaatatttgcaattattatcattaataagatgtattattatgtgcatagcctgatcttaattgattatcctcattatgagtataatataaaacaatcttcaaaacgcactcttttagcctctaagtaattgtgctggactgagaaggaagaaaatacaagaactctgtttatattctccggagacatcatgtttccagtaacgtggagttcactaacaacaacttaaatgtaactccgaattaaggaactcacacaggctgaaggagtttttctgggaggtaatcccatgttgatggagtctcacatgtgtattccaggagtgcctgagtatatatcacatgcagagtgagagaaaaagagaagggagagagagagagagactgaacaagtttaaataaatcttactaaaaattaatgttagcatgttagatacactgacctcttttcaattcctcagacatgcaagcatttcttgtacacaaggcctttgcatatgatgttctttctgcccagacatccctcttctcaatgcgttgcagggctgagttttttctttcatcgtttagatttcagcttagtgtcattgcagactgtcatctcattactctaactaaaataccatccctcccaccatcattttattatctcagctttttttcttgtctctcatagccgttatttttctggtgccttttaaaaaaaaatcagtttccttcactgagatattaagtttcatgacagaaagctttaatcttttttacagccctgttttcagtatttagctcacagttacagcacagagtttcaaagtaataagtactcaataattgcatgtagtttggggagttgttaaataaaatttaatctcttcattagtacatcctatagctatatgtttataaattttcatattgtcttgagaaaattgaaactgacattttggcttttacaggatcataaaagtatcacacagggatgaccctgcagcgatgtattgctatcacctctgttactattttgacactcagctaaatgataggtcaatcacatttgagattttcatcatcgtatgaatttgaataataattacacgacagtttgcaaactaaggtatacaatgtttatgcaactgtcccgcatcttggcacgctatgtcatttttcagtgtttagagtcaggatctctcatcagtacatagttgatgattttattgttattattttgagacagggtctccctctgtcacccaagctggagtacagtgttgtattctctgctcactgcagcctctgcctcctaggttcaagcgattctcctgcctcagcctcccgagtagctgggaccacaggcacctgccaccacgcctggctaatttttgtatttttagtagagatggggtttcaccatgttgccccggctggtcttgaactcctggcctcaagtgatctgcctgcctctgcctcccaaagtgctgggattacaggcatgagccagcatgcagcccatagtttatgattttatttatgaagaaaccagtaaagcagagaatagcaattcagatttcttgcatctacattgcaccagagaacagaaggtaattctaaactgtgaaaagagatgacaacaccatgaaaaatgaaagaattatctcccttcccccacagacaatacaagatagaaccctttccccttggtcctggcccgctgaagtctatcccattttgattgatgattgattgagacggagtctcgctctgttgccaggctggagtgcagtggcacagtctcagctcactgcaacctccacctccagggttcaagcgattctcctgcctcagcctcccgagtagctgggattatatgcatgtgccaccacacctggctaatttttgtatttttagtagagacagggtttcaccatgttggtcaggctggtctcgaactcctgaccacaggtgatccacccacctcggcttcccaaagtgctgggattacagttgtgagctattgtgcctggccccattttgctttattttaaaatatgtgggcctgaccagcaagcaatgagtttgccattgggtcagcatcgtcctatgcatgaggaggtggtctaaaatcttgaggattttgatgagttatagctttgtctagaatcagactggcctttggattcataaaaagttgattttgctcaagaacatggctttaagacttcatataaagatttcctacagaaagagaagaacacaatttgggatccaagatgccgctatgaaataggcttacaactcttatcttttgggctttaaaagagaaaaatacaagaatgctccaaaatactgatgctgaaaatatagatgactgtgaaacagcagagtacagcatcaaaacagcaaagtatataaattttttaaagcattaaagaaaaagggtggccaggtgtagtggctcaagccagtaatcccagcactttgggaggccgaggtgggcagatcacctgaggtcaggagttcaagaccagaccggtcaacatggcaaaaccgtctctactgaaaatacaaaaattagccgggcctggtggcgcatgcctgtaatttcagctactctggaggctgaggcaggagaatcacgtgaacctaggagacagaggttacagtgaggcaagattgagccactgcactctagcctgggcaacagagtgagactatctcaaaaaagaaaaaagaaaaaagaaagggtgacgctttcttgtgtgaacgttagacataaaagtggaaaaacaatgaaaccccgtctctactaaaaatacaaaaattagccgagtgtggtggtgcacatctgtaatcccagctactcaggaggctgaggcaggagaattgcttggagccaggagatggaggttgcagtgagctgagatcatgccattgcactccagcctgggcagcagagcaaaagcgagactccgtctcaaaaaaaaaaaaaaaaaaaaaaagtggaaaaagaaattgaagagtagataaaagcataaattaatccagtgatatgcaattttcctatgagcaatgaacccacaaagtgagagctctaaggataaaaggtgatgatcctgggaggaactattagtacacagtagtacaagttacattttcagaaatgtccaaatagaaatgcaggtattaagatgtagaaaaggaaatctgggtagctgaaatgtgatgcactgacaaggacaaatactgcaaaagaccagctaatcacgttgtaagagccctagagatcaagggtacattttgtaatgaacctattccggagttatggaaacgaccgccagctgttcctgactgaagactacttgaggcacgatgacccagaaagtccatatgtttccaaagataaaagcttaattagatatatcacttctaactgaataaatccacactcccacaagaaaggagattaactgtaaggcatatgtcaggagggtgactttcaaacatgcaacagcttcagatactgaaacatgctactatttaactgtggctgtctttggatgggagactttcaggggatcgttatttgtgtgtctttcaatgctgggtgcatataacttctataacgaaaaatattttgaggctgggtgaggtggctcacacctgtaaacccaacactttgggaggctgaggcaggaggattgcttgagcccaggagtttgagaccagccagcctgggcaacatagtgagacccatctctacaaaaaataatttaaaaattagctaggaatgggagcacatgcttgtattcccagctgcttgggaggctgaagccggaggatcactttcgcccaggaggtcaaggctgcagtaagccatgattgcatcactgcagtctatcaagcctgggtgacagtgagactgtcacacacacacacacacacacacatacacacacacacacacacacacaattgtttttgtgtgaaagtatatactatcagagatacaaggaatgaaggtaatccagctctttctatgcttctatgaactactctaaagatcaattggtagtcacatcctgtattataaaatagtcaagccattgccaaaagtcattgaagagatttttgtttttaactgctatttaaacctggaaacaggtctcaaagtgactatgcaatgtaaaagctccatctgaatattagcaaaggactttttatatcttattttaaaataatgaatgagaccgggaatgcgaccgcgggaatgagaccgcacaaaattatgtgtgggtgttatgcggccctctctttatgtacttcctgtcattgctgggttcttactgatagaagctttgtcttttcattgaggtgtgacttgaacctgtagcggggtgattgggtctaacatggcaagactggtgacagtggggacaggggccccttatggggtataattatgcttcctggtaattttctactgtgctgctactactataagaagccctctaggaagatcaggaatcccctaccaggtgtgtatgtgttgacacactcatttctcccttgtaaatttgcttgaacgaagagtttgcagtgcatttttatcccccatgcattttacagtcacatcataacaataggtgatctattaatttacgtcaagataccacaattgaggtacaactgatcactaactttcattctgaaacccctattctacgtattttctagtatttgggtcttgaagattatattagtgcagagtgccaggtggggagggaggaagggtagaagggaggaggagggaggaagactttttgagatagggtctcactatgttgcccaggctggtctcgaactcatgggctcaagcaatcctcccactttggcctcccagagtcctagggttacggtcgtgagccactgcagccagctgtggttcttaagtattcttaagaacacttttttttttcatttttatttgtacaaaatattctcccaccacactcaaacaaatgcagtttagactacaatgagagcattttgtttatgtcaagaaaacaaagtgtatatttcttaataagtaaacttttaaaatgtaatttcattagtacaggaaattaataactttagtgtctttccttcttcagcctcactcacctcatctacaagcagagttgggactcaattattctgtgaattttaactccaactaataaattaaccaagctttgaaatttccttgtaagtatggttataacaattcacactgctgtttatgccagtggctttatttcaaatggtagtttctcagttggagaagcagttcgaagtcattttgagctcctttaaactcaacgctttataaagcggtgattactttcgtgtcctaattaaatggccacgtcactctcttgcatcttgtttggaaagtcacaagcaataaagaactgtgctatattatgactgatgagcattatttgatttttgctatgcaatattgcatatgatatttactacctgtgaacctccttgtggtataggacacacttagtggagcaggtaatggaaagggattattaaaggaaacgatctcatgctttgtttttgagagaaggtttcatctgaaacagaaacagacacacataccacgagcccgattactatagaaccgaagagacctttccagctgtttacacttcggatgtaaaatggcaatttgacatagactaacagtgtgatgtgagcatctgcgtaaaaaggcgacatatggagcatgcccagtgtgggagtgcgtcctcctccctccgcctcccccctccccctcgagatctccaaagataaggcttgaactttgcacttgcaaatgtcactgcatacgtttttgcactagtttttttttttttttttctgcgattcttttacaactaatttcttttaacaatttgagcgcagggaagagaatgtttagggttatgagatgcattaagtttagaacgagttgatgctcggcttttgaatgcacttgtcttctttatttttaaagcaatataaagcactcgagtgtgtgttttcagcccctcctggaatgggaaaataagaatctccctggatgggagtcctctggggcagggagtgaaagccccggaggcagaaagggacggagaacaggggcttgcccagagcatggataggaaaggagctggggttctccggggctcagcgcgcactgagaacctgtgcccggggctgcagctgcggacgataaaggcgctgtctggctcatgaaggccacctggatcaggcttctgaaaagagccaagggaggaaggctgaagaattctgatatctgtgtaagcgcaagggctttcgtttgtggggagaggttattttgtctctgcttttctgttgttgcagtgagtgcaggtagagagggtggtttgatttggttaatcggatcatgattgcaggagagggaagctagggagattcctctcattttttgagctccttttcctaggttgtgattaattgccagatgagctatcccaggcaggtgttttctgtagacggctttttattaaatctaggtaaaggtattttaaaatgtgttgctggaagatggagtgaagttagctgctagtgtcttacagttttatcagagaaaatagcaggtgtataaaaaggtaaacaaggctttttcagattaaagtgggaatcatgtcatggtagtgacattttggagagttcaagtttataactcagactttctttcatgtttttgttaagcttaatgtcctcctagtttcaaatacctgctttagcatgtagattgttcttgaagctatccttgaaacccatcgttgtccttcagttctgcactgcaccatcaagctgtttaattataaaaccaacttgttctggcttccaggaaggatagttttttggaatataaagcttgggaaggaatggcaactcagtagacacaactattctattgaatgtctgcaaaccagagcatggttttctagataggttgctgcaaaatgaattattttctcctcttttcaggaaagtatagaacaatccgggaagctaactgctgtgtcgatgagacttttccaatgcaaacatcatagactgaatctactttaaaatgtacattttcctctccagggttcggcagactcctacactagccgtccatccgattccgatgtatctctggaggaggaccgggaggcagtgcgcagagaagcggagcggcaggcccaggcacagttggaaaaagcaaaggtaaaatcgtttcctccctgccaagatctttgcaagttgtgctgtgcccctgatagaccacctgtgggagtttcccctaaaggttgtttgatctattagagaatttcattgtctggttttagaaaggtacaaaaaatggagcctagtttcttcccttggtagaaaaaggaagtgtggtatgtaagactggtcttctatgttgttttataatccaagcaactcttttctgtgggtggatggcttatttggacacatacaaaaggatccttgaatttgccaagaggaaaaactgcacctaatatcaacatgttttacttcatttccacagtaaactatatctctgttaagaaaaaaaaaaaaaacagactgacttcaagctattgtttattttcttagacttgaacagtttttcccctgaattttacttcataggtgttttatgttagtatcctgtattttcaaaatggattacattatgcttttccaaaagcaacagaggattttattgatttttaaaagtttcttctcttagaacatgttcttctccattccatcttaataaagtgtgtatatatggaggggagactgcaaagcagctatgaaatagatagttacaggattcatctcaggccatgtctcatttcagtcattgcagtgatttgaattctttctcccatgctgtccttggaatagtggctatttctaaagcatagattgttcgagttgaaggtggcttggtttgtgggatactcagtcacttctcaatgaacctattttaacatggttgttgattttcctttgaaaaacttgttttgaaaaaggctaagtgccttgttgatcatgctagaaataccaggatagcatttctactgcctgcctcatctctgagatgagtaaaatctatgtgtgttgctatgggaattgtggttaggagattctggtttgaatgcatggacagcccttatgtaatacattattcatgacctctagtgcggctgccatcatagtctactgaggaactgccaggagaccttgacttctaaaaagcagtacttttgtatatcagaatgatgttcttacctcgcctggcagggaaattttctccaggactgacagtcttctctgaaaggcagttcataaatagcagatgcagggagggttttgtgatggtggaaactgataaaactggacgtggcccagttgccatcaatgaatctgctctaccaatgttagccacgtagaacattgtgaagttgaaattaaataatgaagaacattaaataatgtatgacagtctgcattgtagttaatataggttgcagctgagagtctgaattctatattctatattttgcattgtgtgtaaagaagagtacaaaaaaactacagtttgtattccgaaaataagattgttctatttgcggctaatttattcatgtaagtttcacataccaaaattgaacagtttctcgggcttatatgccatcatgatacagcccaatagactgtaggtttggttttcaattgttatgtaattggggcatttttgttcatgactctgtggctgtgtcatgagttagatgacattgctgcaaagaacttttaaagtatcttttaaccaagcatggatcgaaatgttgctcctaaatcaaaccagggtcgtgttacttgtcctacagcctaaaaagatgatagttagaaatgatgtagaggataaaagaaaatgaagagactttaaaacaaaggcaaaataattgaaaaactatttcctatgtttaaggcaagatagtttatttaatgggtgagatgggaatggttaatgggtacccaaaaaaaaaaaaaatagaaagaatgaataaaacctatttgatagcacaatagggtgactaaagtcaataataacttaattgtatatttttaaataacttaaagaatgtaattggactgttcgtagctcacaggataaatgcttgaggggatagatgccccattctccagggtatgcttatttcatattgcatgcctgtatcaaaccatcccatgtacctcataaatatacacatctatgtacccataaaattttttaaaaaatagtttatttatattttttctttaaaattaggtcaatattttaaacctttgatgtattcaaatgagacacactagggtaagtgagaatttaaatatgtctcaaaagaagatacaaagatgagcattgaattttcctttatattaaaatcatggtttggtaagtctggtttattaatcccaatatccttgaagaaataatgcaaaatagggattgtagaaggctagttccctctataaatttttattgttatctataaaaataacctcattctttgccagaatttcatcttgccttaatgaaacctacttcaaaatgaaggcttaaagtttaaaaacataacaattcatgctatttaactttaaatagttaaaaacactttgcacagccattttggaagaatcagacattttctacatttacttcgtaaccatcgaagcatctctcaaacagaaagactctacaagtcagtgcttttactcaccttacagatcacatgtaataaataagtctgtgcagatgacgttagcagtgctttcagatcctggtcctgtataaatacaaacacattatccactaattgcctaataatacctctgtgaaataacgtgattagcaagaagtgagactagagatactgtcttttaaaatttaagtgacctacaaaaggttatataacgaagtactctgtgctgtcaataaacctattactctccactaccactttgttaaggcttttcttaaccactaaactgcagtgaacagattagatgttaattttgaggccaataaataccaactgacatgacattgttttttaacgtggtgttttctggttccaaatgtgtgttttgatgttgtacagttatggcatactttgcaaatcctggtcatttcagtttgtgctatctgatattaccttaaagacaagtaatatatgaatgtaatttattcccacgttgatcttctctttgaaaacaactttattgagatataattcacccatttaaagtgtataattcagtggtttttagtatgttcagaggtgtacaaccatcactataatcagttttagagcattctcattgccccataaagaaattccaagcctgttatcagtcactctccattctccccaaccatctccctgtccccatgcgtagaaccactattcaacttttgtttctacaggtttgtctattctgtatattgcatataaatgaaatcttaccataggtgatcttttgtgattggctacttttggacatctgggttgttttcaccatttaggtattgtgcgtaatgctgttacgaacattcctgtatatatttttttgtgtgtgggcgtatgttttcatttcacatatgtatgtactttggagtgaaattgctgggtcacttgatcatctctttttaattgaaataatgattttcttcttttctcctttgatcctcaaaaacgatgccttctgccctatatacagggactctgagttgggaaatctggatgtagaaggagttgaagcagtgataagatagactcagccaggcacaatggctcatgcctgtaatcccagcaatttgggaggccgaggcgggtggatcacctgaggtcaggagtttgagaccagcttgggcaacatggtgaaacgctgtctctactaaaaatataaaaattagctgggtttggtggtgtatgcctgtaatcccagctacttgggaggctgaggcaggagaatcacttgacgctgggagggaaaggttgcagtgagctgagatctcttgctctcacgtgtgcaacagagcaagactctgtcaaaaacaaacaaacaaacaaacaaacaaaaaacgatggactcaatgtgatcttcttagccgaatagaataaccttcaatcttgagtccattgttcttttatcatcgaatatctactatattaaagaaaatgttaggcccagttggtgaataggagagactgcaaggccggagccacaaagaagaaattggcaggtcttttgcctgcaagaagcttccattgtttgttttgggagaaagttgtggtcataaaaggtggaatacaataggttgtggggaagggagggatagagaggtctgtgagcacccaggtttagactgcatcctactggcaggaagagaaaatccttcttggaggaggtagtggcttaaaagtagacctcacagcaggggttcgtattctgttaggaaccaggctacacagcaggaggtgaacagcagcagccagacaggaagcttcatctatatttacagccactccccactgctcacataaccacctgagctccgcctcctgtcagatcaatggcagcattaggttctcataggagtgcaaacccttttgtgagctatgcatgtgagcgatcgaggttgcgcactccttatgagagtctaatgcctgacgatctgtcactgtttgccatcacccctggatgggaccatctagttgtaggaaaacaagctcagggttcctactgattctacatgattgtaagttgtataattgtttcattatatactacaatgtaataataacagaaataaagtgcacaatcaatgtaatgtgcttgaatcatcccaaaaccatccccaaaccccagtccatggaacaattgttttccctggtgccaaaaaggtggaggactgctgccttagaggatggacaggtgaagtttagctcttgaagtacaaagagggaagtaaagaagagagaaatgcctcccaggccctggaatacagtgtatgcgacggtcagtgtacgtaaaggctgtgcagcaagaaaacatagaccctttcagagaaaggttagtttcttgagaaaatgtctttattctaccttcacaaattagctggttatagtattcagaatgaaaaatgtttttctgcagatttgtgaaggtttacttcatggtcttctaaagtccagacctgctgttctgtctttttttttttttttttttttttttttttttgagacagggcctccctctgtcgcccaggctggagtgcagtggtgccacctcagctcagtgcaactccacctcccgggttcaagcgattctcacacctcagccttctgagtagctggcattacaggcacgcaccaccacacccagataatttttgtatttttagtagagacagggtttctccatgttttccaggctggtctcaaattcctgtcctcaagtgatccatctgcctcggtctcccagagtgctaggcttacagatgtggcccaccatgcccggcctgttctgtctttaagtttttgatttttgtttttttaaaatctctaatattttgggaactgatcttcctttggtattttgacattttgacatgacatgccttggtgtgcacctttttgtttattgtacttggcttctcatgcattcattgtgaagggctgatcagttcagttctggaaactgcccctttttttggaataatttcttcccctatattgtcctctttttactggctctctggtttgtgcgatatttgatttgagcctctgtgtaatcatttttctcactttttctccatctttttgttgtacctgaatttttctcaacttctaacccatctgctcaaattatatttgtcaaaatgtctaatttccaagagcattcttcttttcttcatttatagcttcttgtttttattccatagccataatattttctcttatgtctctaaagatactaatttttttgaagttacctgtgctgtcactgtttattaagcttctttaatatttgatgttactttttacataatggagacttttttcaaatgtttgatttctaatgactatatttattatttcatatatttgaagtgaaaataaagtgtaagaagcagcaaaagcatgcaacttcatgaagattatgaagtggaagcacctattgtagagggttaaaactgagttatcctgtaggaagtgcaaggactacctacacaaagatcatcagaggtgaaattattgactgccttttggaatttatacatcaacaaaaagttttcaaatgaacttaaggaaacattcactatccctgactttttttttttttttttttttttttgagatggagtcttgttctgtcacccaggctggagtgcagtggtatgatctcagcccactgcagcctcttcctcccgggttcaggcaattctcctgcctcagcctcccgagtagctgggactacaggtgtgcaccactgcgcccagctgatttttgtatttttaatagagacagagtttcaccatgttggccaggctggtcttgaactcctgacctcaagtgatctgcccaccttggactcttgaagttctgggattacaagcatgagccactgtgcctggccatacccccaacttcttagctagggagtataggtgagaagacatgagaagatgttgaaaatctcttacaaacacataggtttacaaaacacaagcctaaaaccaagatgctcaggcagtgctgaaatttgctcttgggaggaaatcccagtttcatgatgtttgaaaacattctttctcttgctggatcacgtgtcatcagatagagaagggccaaaattgtagtataaaaggttctttagggatgagattatggacgcaaattttttcttcaagggaagagtattttttcttactactagttttcttcaggtttgtttattattatttttttagacaaggtctcactctgttgctgaggctggagttgcagtggcatgattactgcttactgcatcctcgagctcctgggctcaagtgatcctcccacctcagcctccagaatagctgggaccacaggcatgcgccaccatgcctcgctaacattttttaaaattttttttgtaatctcagcactttgggaggccaaggcagatggatcacctgaggtcaggagttcgaggccaggctggccaacatggtgaaacccgtttctactaaaaatacaaaaaaaatagctgggtgtggtgttgtgcatctgtaagcccagctatcccagaggctgaagcaggagaatcacttgaacccggaggcggaggttgcagtgagccgaggtcgtgccattgcactccagcctgggcaacaagagggaaactctgtctccaggaaaaaaaaaaaaaaaagtagagacaaagtctccttatgttgcccagcctggtcttgaactcctgggctcaagtaatcctcctgcctcaacctcccaaactgctgggactacagatatgaaccactgtgccctggagtttattcattcagttttgacctgtcaaacttctctacttccaacaagttcagcttatcacttatcttgactaaaagaaagcctgaaggcttgaagtttcgggaaaggccatccgctgggctgagactctgtctgactctggacaatgtttaatttttgatcatctattcataattaagaggaagacattgtaaagctgattggaagctccaaatgcagtggcaaagcttcttgacaggtcatcttgtatagggtaattggggagggactgaagaactggtaggagtgggcaccattatcttttaatctggccaatgccccagagaggactcccccagtctcctgtcttgctctattggaccgctcacaggcttttggcagttgtccaagaaaaggtggctagagtttcatcacttaggatggagatcttataattatttaatcctcctatgttcagtatgtcactcgcctttactctcagctatccttctgattgtctgaaatctcctggtcatcctctccagagaataaacctttggtcttctggaagtgaggggagagagaaagtggattctgataagtccaatgtccagtcagtgctgttttcagccccagccatacttcatccttcagaggtgcctgttacctccagttccacctccttgccagggccctgcagctgcaatcagctttctactccttagccgtcctgcccgcctcttgcaggtactcttattctaacactttctactctgctagttaattagtgcttgttcattgtgttctatattctatgtttccacatactctcatctggtttcctgttcttagtatttgtgggtttatactttttctaaaaacatattttcaggaggaagcattagttcagttgaccatgttttgttcccagtagttttcagtaaacatactacaaaaaagaaaaaatatttctcatcttgccttagttcataaatgccttacagattgagagaattcccctaactagcctttgaagaagaaagaagaaacatgaacatgtttacgtcccatcagcctgaagatagtttatttcaaaaaaatattaaacatgttttaaaaatatgtcttattgtgaacattatatgggaggtaggagagaaatatacacatatgtctataatgcgtatgttcttaaacctacaagatagactactggagaatccagagaataggtggcaggtgtgaaactagagggctacttatggggaaaaaaaaaatgtgttggctgggcgcggtggctcatgcctgtaatcccagcactttgggaggccaaggcaggtggatcacaaggtcaggagtttgagagcagcctggccagcatggtgaaaccccatctctactaaaaatacaaaaattagctaggcatggttgtgggcacctgtaatcccaactactctggagactgaggcaagagaatcactggaacccaggaggcagaggttgcagtgagctgagatcacgccactgcactccagcctgggcgacagagcaagactccatttaaaaaaaataaaaaagaaagataaaaatccagcagcgataccttatgaaaaacgcaagcacaaaatatgtcacacattcttattaaaatattttaggctgaaattattttcacaatgtacattttcatgcttcttgctttaaaaaattgtcaactctttgcttataagcatgtacctttcaagtatagttagaaaactggctgaatatgtctaatttctagccgcatgcgtttgtttattgttcaaatacgcattagcttagattgcgtttttctacctgtgataaataaaaagagtgcagaagcccgctggacctctgttaggcttctcttccctgttgacatatacttatgactgggtaggtaacaatcacacacattggtactgtcgttcttccactcacctctaatgttaattgatgataatattaataatgacaacagtaatagcacttaatgcccaatcactgctcattatagacaatttgaaagatataaaaggaaaaggcaaaatttgtgtctttgagcattttttttttttttttttttgagatggaacctcgctctgttgcccaggctggagtgtagtgccaccatcttggctcactgcagcctctgcctcctgggttcaagcaattctcctgcctcagcctccggagtagctgggattgcaggcacctgccaccatgtgggctaatttttgtattttaagtagagatggggttttaccatgttggccaggctgttctcgaactcctgacctcaagtgatctgcctgcctcggcctcccaaagtgctggaattacaggcgtgagccactgtgcccagcctctttaagcatgtagaaatatatttgagcagtcatgaccttacaatacatacagcactgatgactacactatcagcaaaatccttactctcgaagttcttgctgcaaaacaaacagatctcagcctagtggcattaagtcaccattttatttaggttacacttctctgccacacatccctggccagctttctggttagttggtgaccaggtgacctgggatggcttgtcacatgtgtctggaggctgatagctgtcagcatgtgtgtctcgttctcttccatatggttgtttatcctccaacaggctggctagggttcgcatgctggtcccagggctgcttcatgagagagcaagctccaagggggtgataatcatatctctacttatgtcatgtttgctaatgtcccattggccaaagcaagtcaccggcctaagcctggagtcaaatgggaattaccaagggtgtggattcaggtgggatatgttgcaaccactttctgcaaacaacctgccacattcatcttttttcttccttacccctttggaagaagaaatatctgcatgccttgtgaaataaacaacgctgtcctcccttctgtcctatttttttcccttctttctactgccaaccttatcaccccaggctttattctcctgcttcaatttcttccctacttactctttaacaccgtgaaactgatttctgtctccatctctttactgagggtctctagtgacttcctaatcacaaagccactgaccttttattaaacctccccttgacatctctgcaaacttcaatttgtttttcttctctgctaagtcacttttgtcttgcaggtgctggtacacacaaagtctacttctactaccactctggtggttcctgttcagtctcttctgtttcgacttttagttccctcacctgaaatgtggaagtccattcaaccaaatgctcaggccttggcctcctgatgtttgttgctttaggcatgtcattggtttccagactgagctctgtagagccccaagagatccatggattcttctggagtcactgcagaggcttagggatgcccagcaggctgtggtctgtgcgttgtacccaggattcagccagaacaatgctaccttcacatgttttattttattgtgttgtatttttattttttattttttgagatggagttttactcttattacccaggctagattgcagtggcacgatcttagctgactgcaacttctgccccccgggttcaagtcgttctcctgcctcagccttccaagtagctgggattacaggcacatgccatcacacccaggtaattttttgtatttttagtagagatggggcttcaccctgttgaccaggctggtctcgaactcctgacctcaggtgatccacccacctcaacctcccaaagtgctgggattacgggcatgagccactgtgcccagccacacatattttatgtattgggacctttatgtgcattttcctttgaatgaagggtttcacctcaggagcgagctttaaaccactgccatcttcccttctattctctcatacttctccaggcttcagccgtcacttatagttagtgtctttggtcttcgcctctctccctagtgcttggatctcaggtcctctttttggatctctgtcggttctgccacccacttaaaattgagctcccagtcttttcctttaaaccctttcttctctgcattttccatttccattctcattacctccatccttccaaatctgaaaccttcgtcgaagggtcaacaaatcttttcctgggaattatcagaagggaaatattgcaggggcaggggtcatgcattctctatgcaactgctcagaaacctggatttggattccatctctgccatggaatggctgcctgactttttgataaattacaggtgaagctaagttttgccatttgtaaaaggacactaacctctgtttgacaggattccagtgataattgaataagctgttacgtataaagcacaaggttcctggacctgtctttccctactctagcccttgtgatgggcacaggcaactggggcacacagcacctgccgtggagcagttcagggtgttgtgaggaatctgaatggaaagtaatgaaacaagtgtctttgcctcctctgtagttatgtgcggtcttacactattttacatggtcactatcagcttagttgtttgtcacttgttggtgactgctgtaaggtagatttgagatgtccagggactgcagagctgcctgggatatgactggcattgacacacttgcttgatctcacagcagttgccatggcaggtcaggttgcatccccacccatcccagtgacgaaggcatgggccttgtctcctgtactctaactttgagatgtgctttctgcctcttagtcacatgggtgcagatctctgcctgagttatcaagagcaattgaactctctcttgctcctctcacaggctcttttctgagtaacaccaagtacttgggaacaaaattacacattgctctctgtttatttatggttatatttatcttggcaatcgacctgttaagctagttttaactttcttatgggtaacagtcacatgttttaaaaggaacctgatggttccagaatccttgttactactaccttttttttttttttttttttttggagacagaatctctgtcacccaggctggagcgcagtggcacaatctcggctcactgcaacctctgactcccgagttcaagcaattctcctgcctcagcctcccaagttgctaggattacaggtgtgcaccaccacagcctgctaatttttgtatttttagcaaaaatggggtttcaccaggttggccaggctgctctcatagacttctggctattttaaaaccataaatagattaaggaaggattattataaattgcagttcaagctttttttttttatcttagagcactataactgaatgtctttgttgtatcattgtaaacacagcaataaatatgcagttcttccctccctttttctccaccagatgttaacagggaacgacatgaagacttttacgcagagcttaaaacagtcaaccctctctgttcttacaagtttttgccccatcaatggctacataaaagatgttgaaaactgtggaaaaaagtagaatgtatttaattagcaaacatttgatgagtggtatcatgctatcgagttggaatttaaggaagggaaattgaagatgtgttagatgtggtggtttcttcctcaagaagctcatggtctaatggtcatgctaaaaatgtgtatcactgagtaatgtggtagctatcagacttaaagcactgtaggcttggcatggtggctcatgcctgtaatctcagcacttcgagaggctgaggtgggagaaaagctttaggccaggagtttgagatcagcttgggcaacacagtgagatctcatctctacaaaaaataagcaaaaatagttaggtatggtggtacatgcctgcagttccagctactcagaaggctgaggcaggaggattgcttgagcctaggagttagaagccacaataagctataactgcaccaatatactccagcctgcatgacacagaaagaccttgtctcttaaaaaaaaaaaaacaaagaaaagaaaaaaaaagcattatgagccaaatggcaaatgggtggaccccaacactgctggagaaggcagtgctgatgaccagagaagggcactttaaattatataagcccccactgttagtgactgaccctctggaggcagagcctacgttaaccagcaatgtgattctctctaaggttagcaagatgattgctaactatggggtccaacaacgcctgccattttagattattttcattttaaatctcaattcgcaatttacttaatggcccaagcattttttcatcctcataaccattcgtaagtgtacaattgtatgaagtatttcacactgttgtgccacagatgcctagaatcttttcatcttgcaaatctgaaactctatatcatctgaacaattccttatcaccctgccctgcctcagccccagacaactaccatgctacaattttttttttatttgctcaaatttatggggtagctaagacattttttacaggtatataatgcataatgatcaagtcaggggactcagagtgtccgtcacccaagtacagcagttttgttgagtatagtcatcctactctgctgtcaaacactgaattgattccttccatcttactgtatgtttgtaccctttaacccacctctcttcctcctccctgcaccccccactcacccttttcagtctgttatttttccactctttatctccatgtgttcaatatttgtccctttgtgactggcttatctcagcatgatatcctcaagattcatctatgttgtcccatgtgacagaatttccttctttttcaaggctgagtaatattccattacatgtatagaccacatttctttatccatttatctgtcaatgggtatttgggctgcttccacctcttggctactgtgaataatgctataaagttttgtttgcttctttgttttttgagacaaagtctcactctgtcacccaggctggagtgcattggcacgatctcagctcactgcaacctccacctcctgggttcaaaggattctcctgcctcagcctcctgagtagctgggactacaggtgtgcgccatcatggccagctaattttttttagtagagacagggttttgccatattggccagagtggtcttgaacccctgacctcaggtgatccaccagccacagcctcccgaagttttctttaaatcttcaactttttttcaatgagcctgtcaaggtggactgtcagcaagcaggaactatagcgtatgtttcacagcggctcagtgtttaacttcccgttgtattgttttgcttggtctttaacaagtactaagtagggaagtggaagcagatatagttaccccattttatggatgagcaaactgatggtggatactgaaggatcttgcccaagctcactgagctcataaggggcagaattagggcaaggacccaggcttctgcctcatttttttttttttaatgttctttcacctcatcaaggagctgcttttagaaagacacaggcttatgaaagcagaaagtgcattaaaaaaaaaaagacaccagctgagaatgcattaatgtttcctctttgtttcatgctctagagagattaaggaaataaaagcttttttttttctctttaactataaaagcaaaaataaagcagggcagctattaagacgattttaaaagtataaacatcttcgtgcaatttttttttgctgttgagtctggatagagtttacaagcaaaaaactcaccttttgtcctgctttttaaagtttagtttattgtcattacaccattgatgtgaaacaagtcaatttttacacttcaacattatttaaacaaaaatcttgagctaaaaattctttttttttttttttttttttttttgagacgaagtttcactgttgttgctcaggctggaatgcagtggcgcgatctcggctcactgcatcctctgcctcccgggttcaagcgattctcctgcctcagcctccctagtagctgggattacgggcacacaccaccacacccggctaatttttgtatttttagtagagacaggtttcaccatgttggccaggctgctctcaaactcctgacctcaagtgatccacctgccttggcctcccgaagtggagataaaaattcttgaatttaatatgttgttagttaaaggaagaccttccaggatgtctgtgtatatccttttcatggttaaatggagatacaaatggaacgtacttaatactatttgaatatgccttttcctgtagagaaatggaaaaataatcaaatatctaggaaatagattgtatgaagaatgctgaagaaacaaaatttaaatagagcaaggaagagaaaattgaagttaaaatgaaacgatttaaaaaaagattttattaagtgttgcctattcgtaaggggaaaaaaacgaaaggaacaaactaaaaattacagcagccaaaaatataaagttagatgtaacaattgactagagaaacatgaagacgagttataaaggaagattaggagactgctgtagtgcaggagtgcagggttgtggttttttgtttgtttgtttatttgtttgtttttgagatggagtttcgctctgtcgccaggctggagtgcagtggcgccctcttggctcactgcaacctctgcctcccatgttcaggcgattctcctgcctcatcctcccgaggagttgggactacaggcgcacgccactatgctcagctaatttttgtatttttagtagcaatggggtttcacgatattagccaggatggtctcgatctcttgacctcgtgatccacccgccttactaaactccatttttaaggaaggaaaatgaatcgcacaatccgctgtcagttgtttattctgatttcctactaaaaattatttcaattgatatttgcaggattaacacatgttaaagcaaactaaatatggcctgagaaggcctccttacttctacatttgagtcctcgtggatgaactgtaatctagcttaataggcagataagattgaaaacctaacttggaagtatgtgcctgtaacagtaactgagtcttggccaatcccagcggccgtacttcaaccactcacagactgctaagtgttcaaactgtgttcaaataagacaaacgccaatatgtagccagtccagctatttctgtacctcactgccgatttctgtatgtcacttcccttttttttggtctataaatgtgttctgaccacagggcatcagggcgtcagttcttgaatatttgacaccagtatcatggtctcatcctgccctccctagactggacaggaagtgaattcaacaggaagtaggcaaaaatgtacagtctaatcttctcgtctttggctttctcgtttcattccctggatttttaaacaaccaactatccctttgtcttcttagaggaactgtaatcatccctgaatgaaatatttattggatcagttgtaagcttacatttgagtcaacctacattccttacagttgagggttaagtttcaagatcctttatgaggcaactcagtgacactcatccccaggcagaattaaaggagatctttggctgtgacaatctaaagctctttggctatgacagaacaaggaaagttaccgtggttgaactagatgggaagaactacttgcttctcctctgagcgtactgtgacttgcttaattctatgagtttaagtagcctgaggattcaataggtcacataatggatatgcaaaatggagtatagaaaccctttaataagtaaaaatctccaggtgctgtattcagcatacttgcatggatccctgacactgtggtgtatgttaggtaagacatagaaaatgcaatagtaactgtattataatgtacacaaccattctcttcaactctttactttaaaatgagagagagagaaggtgacacggagccctagtcacacagctatgattggactaaggttatgaactagtgtccattttaccacatggtccatctactgaattggagtttcaggggtggtagttgagtcaggaccctcttattcaaatgatcaaaagtccaataaaggtgtacctggaaaaggggtcttgtccagaccccaagagcgggttcttgaatgtcacatgggaaagaattcagggaaagtcacagaatatatttaaaacaatttattagcaactgctgtattacagagtagagcatcctcagaaagaaaggggaggaatgtccctatcttaaatggaatgctggcttatatgggttattaaggttaagaatagtgtactttattacaaaagcttgtgatcagctgtgacaggctattagtattgttattttcctatgttaatattgatttcagcaagaatttaggaatgcactactatctctaaagcaaaacttcttattaaactaagaatgttttttctgtttaaaatatcaggacatttctataagttctaggtttttatttagttagttagcatcattaactcgttccctcaactgtaagtatcttatgaccaggcgtgcccaaccccctgggaatgtaacccagccagtttggccttatctggcctttgttcaagatggagtcactctggttaggatgcctgtgaccaaaggacatagccaaaacttgaatgtttcatctcagcctaatacactgatgaatgtatactccagcattaatcttttgttatgaaaccaagatctattctttaagtagaagtctgtgtattagtctgggttctccagataaacagacctaataggagataaacacacatacacacacacacacacagagagagagagagagagagaagtatatggagatttattataagaaattggtgcacatgattatggaagctaagaaatcccatgatctgatctgccaactgtaactggggacccaggaaggctgatggtataattccagctccaagagcagagaaaagatcgatggatgtctcaccacaagcaggcaggcagaaagaaaaatgagtgaattcctccttcttctaccttgtattctattcaagcccccaacagattggatcaagctcatccacattggagaaggcagtcaacttactcagtccaccaattcaaatgctaatttcaccccaaacaccctcacagacatacccagaaatattgtttaaatttgcaccctgtggtgcaatcaagttgaccataaaattagccatcacagtcagctaattgaagttattactctacttatatgaccatcttcagtctagaatttagttaaacattcgagttggaccattatctgtaggaatttgggttccaggaaatacaagaagaactgaaaataattttttaaaaaaatttaaaccatagtcatgtttatgcctgaaaataatactttaaattttttcctaaatattctagaaattaaagtttaccaaacatgaaccatttgttattaatattatacttttgatgaatgacttgataaaatacaaaagaaggaaatgtattttttaggagaggaatttgaataatttttccccaaaaaattcatatgtatgtaaaatatcttcatcttagtaaaggtccattagcccttgttaactctggtccaagaaaatctatcaattcaagttagaaaaacaggtactcaataatcttagcccttgacatttttctttaaatttctctgaaatacatattttttttttttgtttccttggctgaaaaatgttcattgtaatattaccagtgtggttttttttgtttttttgtttttttttttctaagacagaatttcactcttgttgcccaggctggagtacaatggtgcaatcttggccccctgcaacctctgcctcccaatttcaagtgattctctggcctcagcctccggagtagctgggattacaggaatgcaccaccacacccggctaattttttgtattttttagtagagacagagtttctccatgttggtcaggctggtctcaaactcccgacctcaggtgatccacccacctcaacctcccaaagttctgggattacaggcctgagccaccgtgcctggcccagtatggtatttttaaaaggttttttaagtggttatttttttctggctcatgaatatctttgaatatatgatatgaatctgtgagccttctccaaaaaatagcttatatctaaacagcttggcttatatttccagggtctccacaggcctctgaaacaaacctatatatcctaagggtatacaaagtacaagaatctcttgctaataagcccagcctttttccttttagagtggctgatgcttgaagaactatggaacgttggggtgtattcctttgctctcagatacttgaggagatcaccacataaattcttagagttctgggtttagctgtagtgtttagtctagtgtcgaagcagaggttgggcaaatatacactactgtaaatactttcttgtgctatagctgttaagcatgttctagtttaaacagttgtcagtgattagcgattttgatgttccgttttaagattttgtaatggtctagacgaacatgaacaaaaccaaaagaccgtttcaagttcagcagatagtaggagctaatcttttctgtggtttggtttggtcgcctgccttaggttggtttactagtctgtgactttctgagttgctttatcttgtgctaacttctatcagatacaatctccatattgattcctgtttattcttgcctggatgatctattccatttagatagctagaacattcagtagctctcttgagggaatcccacctgtgggttgcagaagggtaacctacggatgcccgattgtcctttttccctggattaaaaagaaaccatttgccatttttctggcttcttagaaaaataaatgatatatgaaatgtttgcagcagcagaactttttcctgcccaaaggtttaagattccatggacacatctcctggtctagcatgctattgctctttctcatcaactttccatctctcctcactcgtcacctcccaccccaaataacttgtttgtgtattcctcttacagcctttttcacagcatattgggttatttgtttctcttgccaaacatgtacaatttggcgtacctgggactgaggaatggcctgttgacacttcaaaaaaaattttttttaagatggagtttcattcttgtcacccaggctgtagtatgagtgcaatggcggatctcagctcactgcaacctccacctcccacgttcaagtgattcccctgcttcagcctcccaagtagctgcgattataggcatgcgacaccacacccagctaattttgtatttttagtagagacggggtttcactatgttggtcaagctggtctcaaactcctgacctcaggtgatccacccatgttggcttcccaaattgctgtgattacaggcgtgagccactgcgcctggccaacacttaaaatttaatttctttgtagaggcataataaatatgtgtggactgaatgaatcacatgatctgagtgataggaagtgtgtgaatggaatcctaaacgtttggaggtcatcatattttgccatctttatcctttatcttacctgttttatggggttatgtcttgtctctacaattacatgtgacctcagtgaggaatcaggattgtcaattatgtctccattcccagtgtagtgagtgatatgtagaatgacttttggttgcattatgacactctttagtgaaaagtaatgattaaatagtttggggtggagataacgtgaagagctctttttagaaactttctgtttggtgcagtaggttaccaaggcatgggccggaggaagatatagtaggaggtggtctctgccaggagaaagaattccccctgtaggaagccaagttcctgactagcagttgccagggctttctgtgtcctgccataagcaacggtcccttcaagcccagttcctgcaaagctgttctgttacataaagatgaaattataaatacactggggtatctttcaagtaaaattaactctatatattaaaattcaccttatatgtattccacaagcaaatgtcctgaattcttggtccatgtgaagtttgattattgcaattttgggaataattagggaagagaatatatagtaacataaaggactcaagcataagacatacaaatgtctaatattcccccctccatgtgcagactattggattattccatttgcttttgtaatatgggaatacagctgaagaataaaatgcaatgacatgacctcatgattactggaaagagttttttctcttatttactgataaatctgctataatttgagatcaatatgtaataacatttttctgcaggtgttgactacaaatatatccctatataataaaaatttattgaaaataggatgtcatcttgtcttctcaattttttttgaaaaattaaataatatataagagtatttattatagtgggataaaaagaaaaaaaactcatgtacccacctccacaattacagatacagagtgtcactaatagctttgaaagctttcatgttatccttccccaggctaccctgattcagagcagagatgccccaaagtggagcttagcccactgagttcttggatttgcccaggaaagaattcaagggcaagccagagggagaggaaaacagctttactgaagaagtgttacagctcctctactgcccctgcagagcaaggctaccctgtaggcagagagtaacagctgaggggagttttgcagtcgtattcatacgcactttcaattgcatgcagattaaggggctattcgtgcagaaatctctaagggagaagtagtaatcattgggtcattgccacggaaaggtgtggtaacgcctgggtgttgccatggcaatggtaaattgacatggcacactggtgggcgtgtctgattgaaagctgctttcccctgggccctgttttaactagtcctcagtctggtcgggtgtccgagacccccacctcctacctcaaccccctctatcagagtttatcattatgctgaatgtggtgtttcccactcccttcctgttcattacattatgtcttaccatctatatttattttctacatgacatactggttagtttttctgtgttcaaaccattatttaagtagaataatcaaggtgttcttttgagactgcttttttggctcaacattaaatgtgtaaaattcattcttgttgatttgtatcaccataatttctttttaccaatatgtggtcttccagtaggggatgtggcacaatcaatctgttctctgtccatgggcatttaaggaattgcagataatcccagtctggaagcatttatccgtgtctcctgatgcatgtgtgcaagagtttctcttgggtatgttaattagcagtggaattgtaggttgataaagtatgtgtatctttacctttactgggcagtttttaaagtgtttgccttcatttacactcatactatcactgtaggagagttttcactccaccattactttcattgaatacttttcatatattaaccttttgttttcttctgtgaaatgacagtgcatggctttggacttctttttaattattaaattgtatttttctataaacgtacaagaggactttctatattttatatgtcattatttttgttggttatttgtattgctgaaagggtttaatttgtagctgctcttgtcacatttatatagcattcttaataccaatcaagtccgatgtatctatcttttctgtcactatttttgcttttgggctcttgtttaagaaattctttcctggccaggtgtggtggctcaatcctgtaaccccattactttgggaggccaaggcaggaggactgcttgagctgaggaatttcaaaccagcccggacaatctaacagtacttcgttactacaaataattgaaatattagctggccaatggtgacagacaccactggtcccagctacttgggaggctgagttgggggggttgcttgagcccaggaggtcaaggctgcagtgagccgacattggaccactgcactccagcctagacaacagagcaagaccatgtctcaaaacaaaacaaaacaaaaagcaaaaaaggaaattctttcctaccttagcctcataaagaattcttctatctttatttctaacagttttaaaatttcatctttcatctgtaattcctcgatctttctggaactggcttttgtataaggagtgagataggaatctgacttcatgtagaatacctgtttgttccagagctattttttgaatggcttcttatctccccttggtctgaaatgcctgctcagtcataaaccaattttccacatatgagtaggtctgtatctgagctgctattcatgtttcaatgccatactacctgaatttctgtagttttaaaataaagattgatagagtttggacatatcaacccatcatatttttcaggattgaactgactattcttggacctttctgttccatataaattttagataccatatatgaagtccaacaaaaaaagaaaaagaaaaaacacaaacataccctgctgacattttgtttggggttgcatttaagtctgtagatcaacttggaggaaaatgcctttgttataatattgagtcatcttacccataaataggaactatctctccattaatttagctgttgaatgtcttagaatattttcgataaaggtcatatattttttagatttgtttctagatatgttaattttttagttactacagtctctctcacctttctctctcaagttacagtttctgttggctaatatggagaaattcagttgattttgtctgaaaagctttgtatttatcagtctttctaaacttattaaatgcttatgaattttctgtagattcttgggttttctatcagacatagataggacagtcatagcatgtgaataacggaaattctatttctggttgagcacagtgtctcacacctgtaattctagcaattttggaggccaaggtaggaggatcacctgaggccaggagttcaagactagcctgggcaacctggcgagaatgtgtctataaaaaaattaaaaataaattaaaaaataaaattctgtttcttccactccagtccttttaacttttcaattatttttcatcttaccgtactggctagactcctcaccgcaacattaggttattcttgtcttagtggtactctttaaaagcatgtatttgatttgggttttctatagaggtactttagcatgttaaggaagttttcttctatttctagtttgctgtttttttcttaaaaattatgaattggtactgaattttatcaaatgtcccttttctacatttttttttttttttttgagactgagttttgtacttgttgcccaggtgggagtgcagtggtgcgatctcggctcacggcaacctccgcctcccgggttcaagcgattctcctgccttagcctccctagtagctgggattacaggcatgcgccaccacgcccggctaattttgtatttttagtagacacagtgtttctccatgctggtcaggctggtctcgaactcccaacctcaggtgatccacctgcgtcccttttctatatctttaaaggtggtcatatgatttttttgttgaatttcttattgcggcaaattttattaatagattttctacatggaactgtttacttggataaacaacattttcatgatgtttttaacatcacctttttttaacatgtcgctggatttgactcttgaagattttgggggagggtgggggacttactgtatgtataatcatgagggaaactggcctctaattttcctttcttatcctttcctcaagcgatttgacactgaagcttactgctgtcttaaagtttttgtttgtttctttgttttgatctctcttcttgggaagagtttgttatgttctgattatgtattccttgagtattttctataactcactgggaaaattcctaaacgtactgtgttttttgtgctttgggaagatttgactattgattcaaattctttaacagaaccctttagggttttcactctcttctcatgccagtttgggcattatagcttcctagttctttttctatctcatctagattttcagaattttaggcatgaatttataatctcattttcttactaatctctgcagtatctacagttacatcttttccttctctcaatttttactcaataaatctcactatatatttttgaataattctattttctatttcattaacttctcttctttttaaatttggttctaatttctttttcatttaagtcagttacttagctcattatttctcaaagtatcttctgttaatcacacaagctttttacatttctttttgagaacctggttttctgtatctcacaaaatttcatatgtagtatttcattattgttcagttctaagtattttctattttcattttgatttttttattgggatggtgagttatctataagtgtgctaattcccaaagatatgcaggtgatcctactgttgtcatttctgtctctgatttcaggtttgtacatttcaaatgggagagagctcttttttttatttttttagtttagtgggacaatatttatctttttaaaatgtagcatttactcgtcttactttggttgtgattacacatgtttgcacttagtttccactacaatcttattttgtcctttttgcatgctgcagtttttcttcatcaccccttatctccctatttctttctttaagaattactttctggccaggcatggtggctcacgcctgtaatcccagcactttgggaggccaaggcgggcagatcacttgaggcctggaggttgagaccagcttggccaacatggtgaaaccccttctctacaaaaatagaaaaattagccagacgtggtggcggacacctgtaatcccagctactctggaggctgaggtatgagaatcgcttgaattcaggaggcagagtttgtagtgagcccagatcacaccactgcacttcagcttgggtgacaaagcgagacactgtcaaaaaaaaaaaaaaaaaaaaaaaggaatgattttatttatttattttaatcaggtttttaccctttattagtttggaagttacacattatagttctgggcttgtttaaatggataccttagaaatttcagcatgcattcttaaaatctaaagttaaccagttaaggactttggagcatttaaggctgataactcctacttgatttatatttttgccaataatttggttttatgttttcttaaccttacacaccaaatatttttaccatttaacttttaaaagtaagtctgtatttgtttacatttattcacttaattactactgccttttctaaccatttctttcacatatcaaagattccttttgatatcactgttgttcttgaagcttgtcattgacaagtttctttcatgagaagatttttgacaatgaagtctctttatgtgtctgaaggaaacttatttatagaagatagttttgttgaaaatgattgtaggtttatactttttcctggaacttgaaagatggtatttgattgacagttggcttctgactgttgaggagtcaactctcattataaccatgtcagctctttgtatgcagtctctcttcctaaatcctttcaagtcttcttctctgtctttggtgtggtgtcatctcactgtgatccatccaggtactggtttatgtttcactttttcctgcttcggattcattgtgcctcctgaatatgaggatttgagaattttgtcaaccctggaaaaccctcaaccattagctcttaaaagttgaaaagtaaatgaagtcatccagcattgttaggtattcttcagtggaatgtttgttcaaaatgtcaagttaggccaggcatggtgactcatacctgtaatcctggcactttgggaggccaaggcgggggtatcacttgtgcccaggagttcaagaccagcttgggcaacatagcaagactccgtctctaccaaaaaaaaaaaaaaaaaccaaattaaccaagaatgatgttgtacacctgtatcccaggtactcaggaagctggggtgggaggatcacttgagcccaggagttcaagaccagcttgggcaacatagcaagactccgtctctaccgaaaaaaaaaaaaaaaaaacaaattaaccaagcatgatgttgtacacctgtatcccaggtactcaggaggctggggtgggaagatcacttgagcccaggagttcaaggctgcaatgagctgtgatcgcgccactgcactctactgtgggtgacacagaaagaccctgtctcaaaaaacaaaacaaaaaaagtcaacttagctccattgccagaattcgcagatacatgaatgaggttttaccccacattattttatctgaattttggtataatcttctatttattttacaattatttacttaagcagaaaatcaagaagatgttaaaaaaaaaaaaagggacatattacctaaaatactagggaagaagaaaccgtgttttttaagtagaataggccaaatgtcaacagacatccagggtactagaaaatattgagacgcgtctaaacacacaaacctgtcttcgaacctctagtcacacagcatgtttgcattctatatttccatgaaacttggagtgaggagggagagaaaatacatttatttttatcctctttagttaaaattgcatatcaggatttctttttttaggagttgcaggttaacttctaaagttatctcccacctgcactacatagggagaccctgtctcttaaaaaaaaaaaattaattaattaactgggtgtggtggtggaggcctatagttccaggtatgtgggaggctgaggtgggaggatccctggagcccaggaggttgaggcagcagtgagccgtgattgcgccactgcactccagcctgggcaacagagtgagaccttgtctcaatcgatcagtcaatcagtagtaaagttatctcattacagttcaatgtctcaacataggactgggtagaaggaagccttctgtcctgtgatctgtgttgctctgatacattcctaaaaagaaactattaagaggggtagatataattctaacatgcaaatgtgttgagggaaaggtgaaaagtacatattacttgattactatttattcacatggaaaccatttttgtatttgcagttagtgtcaactgaagggattaagaagataatctctatcatttatatttgggtctggtcagatgcttttgtaattatatttctatttgatgcctcctttatctgagattttatatatttttttaaatctggagacaggatctcactctgtcacccaggttggagtgcagtggcatgatcatatagtagctcactgtaatctcagcctcctgggttcaagcaatcctctcacctcagtctccagggtagctgagatacaggagtgtactactacatctggctaatttttaaatgtttttgtagcgatggggtctcggtgtgttgcacagcctcgtctcaaactcctgggcaagtgatcctcctgccatggcctcccaaagtgctgggattttaggcgtgaaccaccattcctggcctgtctgagattttataatacttaaaacaaccacacagtgttggctcatttaacttcttcatccattcacatttgcttgtgggtccagaatgaatctgcttttctactgatgcctcaagtaggtcccaacttcttttataaatatgtaaaaatctattgccttttcctgtggttactgcttgtgagagaaaacatactcgatttatacctagaatgaacttcagcaaagttagtgaaaatgtcaacataaacacaggctttacctctgaaagtctatgatatgaaacatcaagagctgatcaggctttttccctttaagagctttacatataaattacaatattttcctccttaaaaaagccaaaatgaggaagttaacggagatgaaattacagtccactcatttgataaaaaagccaagaaacaaaatggataagcatggataagccccaaagatatctttgttgacctcattgaatctcatttctttttcttttttttttgagatggagtctcgctctgttgcctaggctggagtgcagtggcgtgatctcagcttactacaacctctgcctcctgggttcaagcaatttttctgactcagcctcctgagtagctggaactgcaggcgtgtgccgctatacccagataatttttgtatttttagtgcaaatagggtttcaccatattggccaggctggtctcgaactcctgacctcgtgatccgcctgccttagtctcccaaagagctgggattacaggcatgagccaccgcacccggcccaagactattatttatgtttgtaaagaaatatcaattaattttagaaatagagatggtgcttccaagtcttagaggggaggaaaagctctgttttaattatccaaaatgtcaagctattcactaagatttttcccttgacttgtagctagcctcagtttaaacaaataccacatatattctatttgaagtaagatttaaaatgttaaatgtgacaacaaatctgtcacccaaaagcttcttcacagtctttgataatccttccctcctgccccttctgatgtcctgatctgctcataatcttggttgtggtaatggtttcacagataatcacataagttaaaacttaacacaaattgcactctgtggagggatggatgtgtgtgtctctgtgtgtgtgtgtgtgtgtgtgtgtgtgtgtccctgtccctatacctcaatactactgttaaaaacaaaaatataaaaatacattttcaaaaacattccaggctgggtgcagtgacttacacctgtattcccagcactttgggaggccagaggcaagcagattgcttgagctcaggagttccagaccagcctgggcaacatggtaaaaccttgtctctacaaaaaaaatacaaaaactagcccagcatggtggagtgtacctgtagtcccagctacttgggaggctaaggcgggaggatggcttgagccaggaggcagaggttgcaatgagccaagactgtgccattgtactctaccagggtgacagagtcagccctgtctaaaaaaacaaacaaacaaacaaacaaacaaacaaaaaactgtagtaaaaagaaattcattgatgttgtatttcaaagcaataggaaatatagccaaagaaaatattttaacacctttgagataaaagagagatagagatgactggtgtcagctatcttttatgactgcccaaatatcgcttccctttgggcttcctgtttctgtgtttacatttttttttaccttgttagaaagtaactgtttagataacactatttattcattaaaataaatatatgtatatgcgtgtattgatatatatatatatatatatttgaaatcctattaagtacaaggcagtatgccaatgccacatgcagatagatatagcaagatgatcaagatagagtatttcatgcaaggggaccggcatattcccaagagcaggagagagagcaagattggttttagaaatggcaagcagtttaatataactggatcagcgaccacaaaaaaaccagtttctcttttataaagccaggctactttacagcatttctcataattcaattttagtggagaccaggtgatggattaagcatccagttttgccctgcacagaactctgttgattgtattgctgttgttatccaagaccaagcacttaggaaaaatagctgatgtttctgcaactcagaagctttgtatgagttgccttggtttattatagagtgttaaggaggtgtaataatctgtgctggtaatagctggtcttggtaaagaaaagccctttctcatgcaaatactagatgtaatgaaatgatgggtctgtgagtgatatttaaggtttataactatatttttttcttaagctagtcaagtacagtgttgagaaggaggaaagagtggaacaaggagtccaatctgtaacttgtagctacattacaaaaataagaattatgtaaatacttatagggaacagtaaacgtgttatggcaagtttgaaactgtctatcccctaatccttttttctaccatcaaaactattgtcttaaatcagattttgttgttgttgttgttgttgttgttgttgttgttgttgttttaatagcttggaacttcttggaacacaattgtgttagaacatactgtgctacagtattcctatccattccagcaagagcttcggtagagttgtatataaagctttaccagttaattttgagctttctctgaaaagcatatggcatgttttatacagaaaaaccattttaaaacatagaacattgggaattttggccatgaactgaaagaaaatggtttgaagatatgatcttctaattcgttataggagtggggaagaggtttctcatatggtatgattttaaagatctattaaaaacaaatttatattatagagttcatatataaatcatgacctctattcatgatttagtcaggaagacagaaagcacttcaaatatttcagggataaagtgatttaacatagggaattaggaatgtacaaaatctgaaaggactgaaggaataaagtcagagaaacctgccagttctcagtgtagccagtagaatttggggaatcaggaagtttccagaattactaaaaatcattgctgataattgcagctacctaaggcattggttgggtgattttcaggacacaacctggaatagcatttcccaaatgttttagtctcgtgaccactttacattcttaaaaattaatatgatgatgattattatattttttatagagacagggtcttgctaggttgcctaggctggtctcgaacttctgggctcaaacaatccacccaccttggcctcccaaagtgctgaggttataggcatgagtcattgtgcctggccctaaaaaaattattgaacacctcagtgagcttttgcttgtatagcttatgcctaatggtgttttttgcattagaaattaaaacagaaaaaaataaattacaagaataaggaagcaggcactcccctagctatcagagtgataaagtcatcacaggtcgtgtaagtatttgaaaaattccaatctaccatcatgagagaacgagaatattagaaggcaaatgatgtcttagtgccattaagaaaatagttttgaccttgtggaatccctaaaagggtctctagagcttctaggggttcctgagccacactttgagaactgctggcctaatggaactggaaagtctctggtctgctggagcccacgtagatgccttctgctgatggtggcttctcctctgccttctgcatgtcacacaaggataatctggcttctcctctgccttctgcgtgtcacacaagtggctctcattgcaaggagtccaacctggaaccctgttggcagagaatctgaaaatatcatccgtaggaattcatgctctttgttagatgggaaagtataaggcaggcggaggcatagtgccgagctgacaataggcaatccaacatatttcgttaaaaaccgtgaaaatccacctgagttgacaataggtggcatctacatgaacagaaaaatttctgagagtagggtcttcacttttcctgaaactccctactcctttccaatgatcacttctttccctcagtctttgacagtaataagaccatgaaataactaccaaatcaatctttgactgctttcccctgcataccttttttgatatagggtctcattctgtcacccaggctgaagtgcagtggggtgaacatagctcactgcagcctcgacctcccaggctcaagcgatcctccctcctcagcctcccaagtagctgagactacaggcacacactaccatatccagataatttttgtatttttttgtagggatggggtttcgccatgttgcccaggctggtctcaaactcccaggctcaagggatccatccgccttggcctcccaaagtgctgggaatacaagcatgagccactccacctgccccccaaccaacccaaaatttttaataggtttgtttatcctgaaactttgttttatgtgtgcacctatatgtaaaatcactcatcaaaattattgagatctacacagagctcaaccaattctgatcctctttggagggcccagagcatctgtgagcccagaacacagcggttttgcataaatgagcttttgaaagtacgatgactttaagtactctaaaatgcttagatcatttttagagaattgataagtttaacaaaaggagaacttcagaatgaaaattattattccaccttctatgaggaatgttttaaaagataaaagttgttggctattaccttgaaaatctaaagctatgtgcagtaactcacaaatagtgaattaattgatttaaaatttatggtcattaatgatgagtttgccagtaagagtttttcccctctttggtggagaagtttagaaacttctgtttcatttcaactttgaacaaaatcctagaagccatttcaagtatactttgctaacccagaaattttggcaagaaagtataaacttgagccttctcggatagtctgttcatggagaacaaagcagagaatgatagcaaaaacaaaaatctaatcaaccaatcagaacaatgctacttcttttctattaatcattgccacatttctcttccctgtcctccatcaatagatcaaaattagaataggacttgtaggtaaaaattggcccttgagaaggtatgcgtggattacttttatttgacttacatgtggctttatagtcagaagtactgttgcttgcaaagcatatttgtttgtttgtttgttttttaactcaaaagcacctgaaaaaataatcagaggtttttatacctacaaaatgttactgggttcccattccatgtagatgccaaagccaaatgagcttgtacaactgaacaaaaataaatcatgtttattttttccatatgcacttagagaatatgcaaaaataaatgtccagaaataaaaatttgccaaagattgccacatatgcctgaatataagatgaggcttttttcccctcagaattattcttcagaaaagagagagtcaccttatatttgaaatctcacaagatctcccatggtgcaagaagtacattttccattactttattttgaacaacaatgtgctgcttgctggagatacatgggcctgcatgatgtcaatcaatcttattttggtgtgtttatataagtcacctgatacatttgacttaaatgtttaaatagagatttaacatttacttctagagacatgacgtcacacttgtaaatattggatgctatggtaaactcaaacattcaaaacaaatactgtttccaattagttgaaaggaagttcccattagaaaggggttaggtgacccagtatctctcctgatatccacaagacagatgagaagttttcagaggattttttaaaaattaaatatggataaggatgtggagagagggatacttctaagttagtgcagttggccattgaacaatgagaggttatgggcatggaccccctacaaagccaaaatccatgtgtaacttttgactcctaaaaaaaccaaatagcgtatcgttgacccaaagctttaccaatatcataaaaggttggttaacacatattttgtgtgttatatactgcataccgtctccacagaagagagaaaacatgagaagatcacaaaggtccttttgttgccaggctggaaaatggcaggcatcattctccacgcatttcactggccaaaattcaatcacgtgggccaatctaactgcaaggaaggctagaaatttagttgtctgtattctgaggaagaaaatggagttagtaagcatcttggatctctgccacagtatctgactatctttgacagcactgagagtcagccacaaggtatttattctttgttaaatgtgacatcaccttatatttggaatctccttctatttgggcatatatagcagttgcctcaaaacttcgaagtcatagaaaattatttatggctagatcttttaaagagtttttgtaatcgaggcaaattgacatagaacatggaaatgtatctaaaatgattggaaacttattataattagaaatgtattaaaactcaggggaatggccctgagtctgggggtgtcgggatacctggcccagttggatttttttttttttttttttttttttttttttttgagatgaagtctcgctctgtcacccaggctggaatgcagtggcgctatctcggtttactgcaagctccgcctcccgggttcatgccattctcctgcctcagcctcctgagtagctgggactacagccgcccgccagcacacctggcgatttttttttttttttttttgtatttttagtagagacggggtttcaccgcactagccaggatggtctccatctcctgacctcgtggtccgcccgcctcggcctcccaaagggctgggattacaggcgtgagccaccgcgccctgcccccagttggatttttatttccaaccactgctaaagcattcctatgccatttgctctgaaccctggactctcaggaactgggttggccaatcaccgatttaatccatcttgctgtgatggagagaacttatgcccaaaattgttgattggcagtcaaggcccaacagccaatgggcggtagctgcagcctcgcggtccctcaccacctgtgctctgctcgtgtttaccctgcgtgccgccaatagtgattcaagccagttatccatctgttctcccacaccacatcttcccaaaaaggccgtttcttctcctcttggctggaagcctgtgccctctgctcacagttctgttagagcattcggatttatatagaacgaaggtttgctttgctttaaaacatcaattccttgatcccagttctgttctccctgggccttatggagtatacgatcaccttcttcctctttagattttttcttctctgggctaaaaatctcaaagtcctcatgtgacatgtttttatgccctcttacctgatttcctcccatgtgagtgtgctataaatacagctcttccaaagcagaacacatcagattaaatacttgtgatctggcagggcacggaatagaatggcgtaggccagcacgtgaattggtggtaaactgaaggtcatcggggagaaaataacttctctaccctcttcggtgtagtatttaaggccagtgaattaaactaacaaaaggcacatctcacaggatacgagacatgcaattttattaacattttacatgcactggagttcacagaaaaggagtgaaagtcgaagtgggaggattgggggcttatataccattttaaacaaagaaaagggtgtctgcatttcacgagatgctgaattgcaggaaggtgactaggaagaatatgcggaagctaatggaagatgagggttattttagtaaggtgtgtttctgcatctcatctccatgccaactcaccatctccagcagtaagacacaacttttctgttcctggtacagcagaggggaattttacaagggaaaatttgagtcctggttttaggtagatgaggggaaggcagagaatttctcctgcatttgtagattctcagccaccttcagttcaatataatccttatggcaaggtcgcatattttggggatgacctcttctgatccccttcaaggtacaatttgaaaccttctccaagtattctgaattgctttcctctggagacattaatttccccacctcccgctatcacctttgaaatcatgctctaagtaacccttcatattatcacactgtaaattgggatgtttaaagtttggttgtttatgcagttataaatcagcttaattatttgtcattcagcttctaatagcttctctgcaagaataagaaagctcatctgatactcggctgaaatccagattcgctcatccttcctccctccctcccttctgcctactgcatgccagtgatctcccagccaccaggaacagagtaaacaaaacaaagcccctgccgtcagtaggattacagtctagctcggagaaataggccacatgcaaatatatatgtagataatgtgttgtagcagtaagtgctaaaaaatagtctctgttctgctgctataatattttcacctgagtgatttataaacaataggaatttattgatcacagttctggaggcagagaagtctaagatcaaggcaccggtagattcagtgtctggggaaggtttgatctctgcttcacatgtggcctcttgttgctgtgtcttcatgtgggagagggagtggaagggcaaaaaaggatggacaggctccttcaatcccttttataaaggcataatcttattcatgggggccccacactcatgacctaactaccttgttaaagccccacctgctgataactatagccttggagattaagtttcaacatatgaattttgggggaacatgttcagtccatagtaaaaactaagaaggtaaagaggatgaggagttggggagtgataaaaatggcttctgtgggccaagcgcagtggctcacaccagtaatcccagcatttgaagtgtctgaggcgggaggattgccagagctcaggagttggagaccagattgggcaacatagtgtgacccctcatggcaaaaaatcaaaaattaactggcatggtggtccacatctgtggtgccagctactcgggaggatcacttagaggttgcagtgagttgtgatcatgccactgcactccagcctgggtgacagagcaaggccctatcccccaccccccagagaaaagcttctgtgaaggtgacatttgatcaaaattgtgaatggagtgagaatgtgtccatgtggatatttgaggatagattatttcaggcagtggaaaccataaaggcaaagctctgaagcacattctaggaacagcccagatcccagtgtgtctgaatacagagaaaggggaaagagaggcaggtcaaaggtcacacagggacttgcaggccagagatgcaggccatggggaagcctttggactatgttgtgaatgttagaacatctgatggaaggtgctgagcaagagtggcatgatttgatataaacttcaaatcttaaaagccctcataaaagaaaaacactgattgctttgtggggaaaaagccatgggattgggaaccagtgtggaagcgggaaatgggtcaggtggccagtagttgaggggtgttgttgacctcagtccttactccagtttaataaccatccggctgggtgtggtggctcacgcctgtaatcccagcactttgggaggccaaggagggtagatcacccaggtcaggaggtcgagaccatcctggccaacatggtgaaaccccgtctctactaaaaatagaaaaaattagctgggtgtggtggcgcatgcctgtaatcccagctactcaggaggctgaggcaggagaattgcttgaaccagggagtcagaggttacagtgagctgatatcgcgtcactgcactctagtctgccgacagagcaagattccatctcaaaaaaataaataaccatccaaaaactgaactatacggcttccttgatggggtttgtttttcatcaacttttgctggctcctagcaattctgcttttcatctttttctttttgttactacaaaatttccttttttcttttttttgctggctttactgaggtataattgacaaataaaaattgtatatacttatgatacatagtgtgtgtggttttctgggatttttgttgttgctttttaaattttttttaaagacagggtctcactgtcgcccaggctggaatgcaatggcacagtcacagcgccctgcagccttgatctcctgggttcaagccatcctcccacctcagcctcccaagtagctgggactataggcatgcgccaccacacccaaataatttttatatttttaatagagacttggccaggccagtctcgaactcctggactcaagtggttcacctgctttggcctcccaaaatgttgggattacaggcgttagtcaccgcatccagcctcagtgtgatgttttgatatacatgtgtgttgtatacatatacagttaaggtaattaatgtatctgcttttattttctaagtacttgcaagctcctcgcctcataattccttctagaactttccttgattgaaaatctagtcccctgaatgaggtggacataccaagacaggatgagggaggtggaaaggatctgttccttgtagtggacacacctggtttgaatctggctattcttttttttattgagacggagtttcactcttgttgcctaggctggaggacaatggcgcgatctctactcactgcaacctccgcctcctgggtaccagtgatccttgtgagtcagcctcatgggtacctgggattacaggtgcctgcaaccacgcccagccaattttttgtatttttagtagagatgggtttcaccatgtgggccaggctggtcttaaacccctgacctcaggtgatccacccacctcggcctcccaaagcgctggaattataggcgtgagccaccacgcctggccgaatctggttcttctttagctcaggcagagtaatcgtattaccttttttttgttgttgtcataaaataagataatgcttctctaagaaataagtaggctgtgcacagtggctcacgcctgtaatcccagcactttgggaggccaaggagggcagatcacgaggtcaagatatcaagaccatcctggccaacatgatgaaaccccgtctctactaaaaatacaaaaattagctgggcgtggtggcacgtgcctgtaatcccagctactcagaaggctgaggcaggagaattcctggaaccagggcatcggaggttgcagtgagccgagatggcgccattgcactccagcctggtgacagagcgagactccaccttaaaaaaaaaaaagaaagaaagaattatagtggagactattaaagagcttgagtgtatccatgttgttgggtctacatgtaaaaacaatatatatatatatatgtatatatatatatatgtgtatatatatatatgtatatatatatgtgtatatatatatatgtatatatatatgtgtatatatatatatgtatatatatatatatatatataaataaggaacttaactatacataattttctgcagtatgaaggctgaacagatcttaattttttctacacatttttgtttttactttagcatgcatttgactgagtcgtgaagtttttaagggtgtgagatatgcttttttatgttttaatccccaattcagtgcctgaatgctgacgggtgctacacagacagtgaatcagtgggtctgtgcaaacgagggccagtgagaaacaccctagtgtcctaactgaaggaagaggccatttccagtgacagcacactcatcagttcacctggagtaccggaggcacgttttcaggttgactagggaaccaatgaggcttctgacaagcaggggacttgggtgcagggccagcaggagcccaggcctcctttctagcaagctgtgctgttctgccgggcttctcctgctatgggttattgagttctgtttcctgagaggcataaggggaaagtgtagacccaactcctcagattgtcttaaataatttgagtaactaataggcattaagtaatttgagcaaatattgttctccagaggttgagaatcctttattgtccctttcctcccaggaccactcagtataatgttggaagagagccttctgtccttatccaggtgcagggaatgaaccagatgattcaattcctacatacctttttttttttttttttaaacagagtctcactctgtcacccaggctggaatgcagtggcatgatctcagctcactgaaacctccacctcccaggttcaagagattctcctgcctcagcctcccaagtagctggggttacaggtgcctgccgccacacctagctaatttttgtatttttaatagagacgaggtttcgccatgttggccagactagtcttgaatgcctaacctcgagcaatccgcccgccttggcctcccgaagtgctggaattacaggcgtgagccaccacacccagccacgccctttcttagactagaccctgaaaaaggatcccttttcatcactcccactgctcttaaggattctccctgctgtggtctaaatgttcgtgtccccagaattcaaatgttgaaatcctaacgccaaaggtgatggttttaggagggggtgccttagggaggtgatgagctcatgagggtggagccctcatgaatgggattagtgcccttagaaaagaagccccagagagcttcctcatcctttccaccaggagaggatgcagagagaaggtgtcattctttccactgaggacagtcgagtgcaaagagccagaacgatctgggttaacatcccaattctatcacttatttcactgtgtgtccttcagcaagttactgaattgattgtattttctgtttatttaacaaatatttatacaaagagcttaccattgccaagcattattctaagtccttcacagatgataattcatttaatgcttgcaataactgcaaaaaatagaaactctcagtatccaagttttatggcgggagcagtggggagactgtgaagtcacttgtgcaacgtcccacagctaggaaaaaagtaagcaggactgcaacctacgtatttagtactagaggtgtttagtacccgagtgagttcacttaatccgctctgctatgctactctagatttccgtaatttgtaagtaatttgtaaaataacagcttgacaaagattgctgtgagaattcagccaatgctagctagcttccttctccccttccatttcatagagagggtaaagtaacacactggtttgagtattagtgaaagatgatggcatttagaattgtaaattgagggaacaaagtaatcaatgatatcatgagaagcaaaaaagacttttttggacttttgcagttgtactaagtttctatggttttaccatttgttttctggaaagattaaaaaccattttgttgaactggtaattccaagcttttaattttgttttcaccaagtgtttgttgctcatttattacacacattgaatttgccccagtttttccctaccacaagtatctaatacagtgagataggtgttttgcttctgcccatggttttttgggtaatacctgacatgctaacattattctgttattttttcagttcattattaaagttgtttgggggaatttgaacacatctgattcctctcaggaacgagaggggaaattgtctagcagctggcaccctgagaactggtacaaattactatgtccgatagtttatcttgaactacggtgtttataactaccaacagagcatcaatttaacaaaaattgcagtacttagtattaaaagaggcttgcactttaaagaagaatgtggagaattttcttttccattacacacgtactggccatattttggcaacagagtttccagtgtcattggctctgaattgaaaaacatgagtgagtatcctttcctatgtacaggagatttccgaggtacgtaatgtgattgttattcattattcaggttacttctagagctctctaagcaagatgtgcatggggaaataaatatgaacgagagagaccgtctgtgtccttctgatgcttcattctgaagacggaaggccagatgtaacaagcacagtgaatacagtgctctgggatgtcaaaaagagaagggataatttatgaccggggcaccaggaagccctgtagaagtggtgggattgggccaggtgtgatggctcacgcctgtaatcccagcactttgggagaccaaggcaggcagatcacatgacgtcagaagtttgagaccagcctggtcaacatggtgaaaccctgtctctaccaaaaatacaaaaattagctgggcgtggtggcacatgcctgtaattccagctactcaggaggctgaggcaggagaatcgcttgaacccaggaggaggaggtttcagtgagccaagatcacaccattacactccagcctgggtgaccagagtgaagctccatctcataaaaagaagtggtgggattgtagctgagccttggagaataaataagacttggagaagttgtgatgcctgaggaagactttccatgatgaaataaagaaacagccacagccagagctcagatgagaggaaatttaaggaccaggggtccttttggatgaagcatgaagcacagaagaatggagggaaggaaagggatggcagtctgcatgagaaaggacctgaaatggtattttctgtgtgattgactattttctttcattgagtgaaggttttgaaccaggaaatgaaatcatcagagcagaattttaagcaaactaatctggcttgaaactaaattaggctggagtaaatgttcaagagtgtgaaagtgaggtcatctgttgcaatacttgggcagtaagtagcaggggcctgacatgttaaggtgactataagactagaaacaagatctctgcaaggaaaagaatcaatgaggctggacaaataactggagacaagagaggagatgggtgataaagggagtgctttctaatgtgtattggtagatgtttccagtgacactacttagtatcacagatgttactgagactttgctcaagtcaacttgtaattgcatgcactgattttctctgtaagacttctcagagcctataatatgctaacatgcgctgtgacactccaagaagaagatggtgttgtctaatttcccatacttatttgtccacagaaactcttttttaaaaataagctaggcacagtggctcatgcctgtaatcctagcagtttggaaggccgaggcaggaggatcgctggagcccagaagtttgagaccattttgggcaatacagtgagaccctgtctctaaaaaaataaaaaattaggtgtgatggtgtgcacctgtggtcctagctacttgggaagctgaggtaggaggattggatgagcacagaaggttgaggctgcagtgaggctgtgattatgccgttgtactccaccctgggtgacagagcaaggctctgtctcaaaaaaaaaaaataaataaataaaaagttgataggtaaatgtggaaaggatctaggattttctggaacactattttgagacatggtgtactacatttggaggatgatggtgtgatttataaaaactgggaagttgacattagaatatggtttccactaaagataagttgacatcaccttatcttgttgttaaaatgtgttaaatttgaggcaccatagaccgtgtatttggaagcatggagaaagttgcatgttttgtggaagtagagctaagatgagagatttggatagcaagattaatctggggttatcacctaggggtgatcattgaattcataaaggtgaaatagtagggaaaggagaatttgagtggagcgaatgacagaatgttgggaaagatctgtaagagacagaagaactggcaaaggctaagaaacagtggtcagggagaaggagaattcggatcttgcattttcagcaaactagaataggactttgcagagtcagggagtgttcagcaacgtcaaatgctgcagagagaggagtgggggagctttaaagtttggaaaataagacatgatcactggctttggaaagaattgttttattagaacatggtaggtgtggaagcccaatttaagaaatcttggagtgactttgaaaaaaaaaaaggcatgaacagaaagtacatcacatccctggttagagcattgttaatgatataaaataaagatttaatgaaagtttagaggaagaacaagattcagatttctttttaaaaaaatctttacattttgctcaacacagggaaattctttgcctccaaacccgagagctatttttgttttcttttaagggcatgggcaaaatgaacaggattaagtagaagaaaagaagcagaaaagaagggataatggagagggaaagacactttctttttgttttttaatagagatagggtcttgctctgttgcccaggctggagcgtagtggtacagtcacagctcactgtagcctcaaactcttgggcttaagcagtcctcccacttcagcctcccaaagtactgggattataggggtgagccactgtacctggacctactactaaaatccctggaatggtagttcttaaatgttagcttgggccgggcatggtggctcacacctgtaatcccagcactttgggaggccaaggtgggcagatcacctgagaccagcctggccaacatggtgaaacaccatctctactaaaaacacaaaaattagcagggcatgatggtgggtgcctataatattatccagctactcaggagctctgaggcaggagaatcacctgaacctgggaggcggaggttgcggtgagctgagattgtgtcattgcactctagcctaggcgacaagagcaaaactctctctcatttaaaaaaaaaaaaaaaaaaaaaagaaaagaaaagaaagaaaggaaagaaaaaaaagttagactacagaattccctgcaggacttgtttaaatacaggcttcctggcctcagccccagagtctctgttcatcagaaactgggtacagcctaagaaccggcctttctaacaagttcccaggtgatgctgatgcagttgacctggggatgacaatttgacaacctccaccccagagaagggaaaaatgtagaatctaggttgcaggtcaaggtgtgccctgggagagagaaaaggcacatctttgtcaggaagttaccaggaatgaaagaagaaagggtgaataaaaatacataacaatttgaagtgcagttagaagagagatgacagtcactggaattggagaattatgtcctagagtctagaaagttgtcactgtagattgtgaagttgtgacagtgaagatggacaggtagagatgatactgtgagcccagtgctgaaaccatctaggaaggtgtctgtaagtgaacaaatggaccttatgaagataggtcatgtcctatggtctggtaatggtgttggggcagcagagcccctaccaaattccttatgctaaaacgagaacgtgcccaggtgcggtggctcacgcctgtaatcccagcactttggggggctgaggcgggtggatcacgaggtgaggagatcaagaccgtcctggctaacacggtgaaaccccgtctctactaaaaatacaaaaaaattagccgggcgtggtggcgggcgcctgtagtcccagctactcgggaggctgaggcaggagaatggtgtgaacctgggaggcagagcttgcagtgagccgagatcgcgccactgcactccagcctgggcgacagagcgagactccataaaataaaaaataaaaaataaaacacacaacaacaaaaaacagagaactccagttctacctctcctgcaacaagtcgggaggaacttgctgtgatgaagctgaatttctctttaagccaagacagagtcagagggggtttgctaagaaccgtagatacttacatcgtgctctgcaaaaactccctttttctgtcctcacaaggaccctatgggattcctgctattatctccattttacagttaaagaaataaactaacttgctaagttcacaactactgaatgaggaagccaggaacggagtccgagcagtctatgggaacttgacagaatctctctctgactgttggcacgtgggacttcccacttcccttaaccatgttaaaggaacccggagcatatcccaggggctgcactgcatgccatagggttgttcccagagtggcactgtatgattgaggatgcaggccagttacagcagagaaggggcctcagaaaggtcacacaccaggaccagtgttgagaacaagaggtaggatgatgcaggctggctcagggcccatgaagggctggagcccattctcaccagcgtggaagacccggggctggcggcatgaggcagaaagaaagcacttcatcaggctcaatggcaacaaatctcttcagtggaaaagttctgctgtttcctctgtatatcccttgggtctgtatcattctcaaaatgagaagtctgtaaagcccaaaactatccggttaatgtgcagttccaaccagcttaaagaataaacggtaggtaaaatgcctgtgtgttgtatttctctttatgtctgccttttaaaaactgaaagtgcatgtttactaaatcacagggtttgagttgaggaaaacactaccgttgtatgcctacaggcatgcattaagtagggctaaaagcatcctttagcaaaagtagtttcctcttttccttgctaaatatcttgtatgcattgtacctgatcacctaaaagccagtgcttttagtaattattgaagaataagaagggcctgtggtgaataatgtcgaaacagtgtgatgggggagctcacacgtggttgcagttgaaggcagagaagatgtgggccgtaaggaatcccccaggactgggtgttccttctcactgcttcttcagaaaagcattgtcagagtacgggagagggagcaaaatagtgtaaaaatgaccctcgccagctccagctgcttttttttctttttttttttttttttgaggagtctaactctgtcactcaggctggagtatggtggtgccatctcggctcactgcagtcgccgccccctgggttcaagcaattctcccctctcagtctcctgagtagctgggattacaggtgtgcaccaccatgactggctaatttttgttgctgttgttgtcatatttttagtagagacgggtttcaccatgttggccaggctggtctctaactcctgacctcaggtgatccacccgccttggcctcccaaagtgttgggattacaggcatgagccaccacgcccagccccgtttgctttttttatgaaaagaatcactaccaatattttaacatgttacttgggacatatttcagcagctaggataacacataataggggaatcactgggaaattttatcatcttacctatacatgcgataaaaatctattaaagtcagctctatatcttggagcagaccttgggggaaaattagtgcagagctgggatttgaaggatggtgggaattggacacatttgagcatttcctcagtggttcttgcatttctccttatttatcagcctcctgatgtgagaaaagtaactacttaatgaagagatccaaaataaagaagcagccatctgggtagtttaatcttataaatacccagctgcaattttaagaagagatttagaagcatagtggtgtgtctcgggttcctggaccaggtagacccacaagctgtcacctcccacctggcccctgctctgtttcagattttgttcattgcagtcatggatagagagtttctgtcatgaagacacatcacatctgccacatcagtttagcactgttctaaactaggttgcgacagaatttgttcaatgtgaagtttttctgatttggtgtatattaggaaactcaatgtctttagggctgtgtttttccgataaacacatttttcccctgcagaggatgtttgaccattttctttgttactcctctcccagaagagaggaaacttctcacctgcaaggactttttgctccgcagttcccttcacactcacatattctcctgtgtcacagctctggggtatgtcttatgctcacccatcacgtagttcgttatcaccactacagatattgacaagctagtgaaacctgcgttttcattgcatttaactttgaaggcacacatctttgaacagaatgctaggtgctaatgtcatagcttacatctagatagggctctatttatgatgctgttatgttgtcttcataatctattgtggtattcagtttagctcataacagctgtataaattcaggttgccaagggtaaaagaggtgacccaacctcccatctggctgtattccccttgcacactcatatacctgtctcttctcaatgccctaattctatctcctataaaaagtttgcatcttcatgaattattcctatcttagtaaattaataaatggcctttcagaacaagtcataataaaaatacagctgggcatagcgatgcacacctttaatcccaacactttgggagactgagcaggaggattgcttgatgacagatgctcgagaccagcttgggcaacaaagtgagaccctgtctttaccaaatagaaaaaaaattgaatgggcccacgtggtggggcatgactatagtcctagctacttaggaggctgaagcaggaggattgcttaagcccaggaggctgaggctgcagtaagtcatgatggtaccactgcactccagtctgagtggcagagaaacactgtgtctcaaataataataagtagaaccatagcacatttaaaaaaaaattatctagctaatatcacatcaaaagactatcttcaattaatctttgcaaaaataaaggttatcaaggttgaccttttttaatttaatattttaaagtcagggtcttgctctgttagccaggctggagtgcagtagcacaatcatagctcccctgtcacctcaaactcctgtgctcaagccatcctcccaccttggcctcctgaggagccaggactacaggtgcacaccaacacaccgggcaaggttagccttatagacagaagttctctacctaggatgatttctatatttttgttcaccaaaaaaggttctctggcctaccagcagcaccctggctgcttttgctgactctagtcattccttaatgagtatacctggtagattcttactggactataccttagtgcagaaggatattagaatatcccacgcttgatagcagacctggttgaagaggccaacacaaaccagagtcagggataaaaccaagataaaaatctcatctccgctgacatcatagcatccatgcagttgctcaagccgaaagcatcctcgattcctctctgtttctctcccctgctcagatgatctgtactgatccacttttctccatctctgctgctacctcattagtccaagccatgttttgtctccctggaactattaatattagaacagccttttgacctgtctcctcctctctctcttgcttttcctgattttctctccccacgacagctggagggattttcttaacacttaaattggatcctgtctctgtcctacctaaaaacctattgtgactgtctattactcttagacaaatcaaactccttctcatggtttaaaaggcagtgcgtaaactagctcgtgtcagcctgactttccagtgtccttcctgccagtcccacctcattgcctagcaggtactcttgtctccctccatcgcctccacaggcctgctcccttgagctctttctgtccctccatgaggcttggaatctctcccctcctacctactcactgtcatctatgtcccaactcattgtctcctcctcagagacttcttgagcactgccgctcgtatcaccctgtttatttcctccacagaacattaatgaaagagttcatagattgtctcgtacacatacttaccaatttcttgccttattttattttgagacggagtctcgctctgttgcccaggctggagtgcagtggcgcgatctcggctggctgcaacctctgcctcccaggttcaaatgattcttgtgcctcagcctcccaagtagctggggtcacaggcgtgcaccaccatgcctggctaattttttgtatttttagtagagaccaggtttcaccctgttggccagactcctgtttgtcaaacttctgacctcaggtcatttgcctgcctgagcctcacaaggtgctgggattacaggtgtgagccaccatgaccagctgattacttgtctgtttttaaacaagtagcatggaggtgcctggaggcctgcgtttgtgtttcacttgtttctgattgtactcccaggaacaagcccagcgcctttcccacaataggtattgtataaataatgaatgaatgaagacagtctctattctcttgaaatgtaaacaggacagtgaggggtaaaataaaatggacagttatcatgtagagtgatgggtgctttgatgggagaagggttctgtcccttaggaacattcaggggaagtagtaccaaatactcaggaattagagaaagggtccaacagaaaatgatatctacagatttcaaggatccctaataagtacctatattgtgttactgtattaacattaatgtttcatttaaaaccagcgtttttcaacctttgtcattaatcgcccccttaaggggccttttctaggcagtttttttcctaatcaccatccctccctccataaaatttcataccacagacatgtctataccaccgtgtatttttctaggtactgtatgtgtatctctactttatactcaaaatgagtaagattgtttttttaccccctaagaacaaacgtttgcccccttggggatgagattgcccctgttgggaatgcatatattaaagcatttaatatcaatcataggaccaagttttaaagaaaatgcagttggtacgtctgcacagtacttgcactttaaatgtcaatggactgtgtagtatttcaaaagcacacacatgcacaattttctttccaatggaggagacagatgatactggttttttcaaaagtgtgatatcgatggatactgtggctcacgcctgcaatctcagtattttgggaggccaaggcaggagaattgcttgaggccaggagttcaaggcctgcctgggcaacatagaaagactgccccccgctacaaaaaaattaaaaaattagccagacgtgatagcaggcacctgtggtcccagctgctgtggaggccaaggtgggaggatcactggagtgcaggagttcaaggctgcagtgagctatgactgtgccactgcagccttgggtgacagagtgagacccaatctcttaaaaaaaaaaaaaaaagtggtattcgtactcattgacgtgaaaagtcaacaccaaagtcataatgagagttcacataataatatccaccaatatgtgcctctggaaaaagcattaaaaggtgcatcagaggaacttatatttttaggaaaaagtgtgacagacaaatgcacagcagtcattgcacagtttggaaaggaacatgtgggggctggttgactccaagagtgcttggtgataggttgggttggtgacttagtaagaaagtgttgcctaagactttgatttagaaacggcacttaagttattaggtagatgagtgctgatagagttacttggaagaactgaggtaggagagctgtgtttgaagattcctggagataagaaaacattttcagagaaagagtgagtaatctggtttacattctgctattgctgttgttggaggttaattctgttgggaacacctgtgttcacacaggtaaataccaactggctcttccttaggggataaatagtgtataaagttggtgtagaaaatgctggtgaaggagtttttagtaatggaacttagcccaagggcaaattgtatatcactcaacacttttcacttgcttatctttcaggaattttaagaaggttaaggcactaaggttccttaagtgttttaactctgcaggccccatctgtgttccagctgctgttctgcaactgcaaatggattctgctttagtatgataataagaaggtcataacccagcaaaagtggtgggcttctaactctatccttttagcagaatttcttttcattagctgagtagaattgagcttcactggttggcagtgaaatgaggcatggcctagcttgatggtccatgaaggatgctcactgagggtgacattttgttccattaaagctgatgtttctatttataccaaggatagtttgtgcagttacaccggaaataagatatttcctgcgtttacagacatctacatgcttgcctttttttccatttcccactgaaccagtctcgttgttgtcaattattcttcttcctctatttaatggaatctttactttcttgacagatgaatgtacatgaccactttcataatgcctctcccttaagaaacttcctactgatcttggccaggcacggtggctcacacctgtgatcccagcactttgggaggctgaggcgggcttatcatttcaggccaggagttcgagaacggcctgaccaaaaccccgcctctactgaaaataggaaaattagccaggtgtggtggtacacacctgtaatcccagctacttgggaggctgaggcaggaggatcacttgaacctgggaggcgaagggtgcagtgagccaagatcacacccactacactccagcctggatgacagagcaagactccatctcaagaaaataaaataaacaaccagttctcatgagaatcctatcacgagaacagcgccaagatatagtgctaaaccattcataggccacccttatgagccaatcacctcccaccaggccccacctccaacactgaggattacaatttgacatgagatttgggtggggtcacagatccaaactgtatcactttccattcctccaggcctagcaaccactattctactttctgcgtctatgatgttgaccattctaactacctggtatgagtggaatcatatatttgtccttttgtgactggctaattttacttaggataatgtcctcagagttcacccatgttatagcatttatcagaatttctttcctttttaaggcagaataatattccaccgtatgcatataccacaattgggtttatttgattcatctattggtggacattcgggttgcttccaccttttggctactgtaaataatgcagccttcctcctgttccctttctccccttaagggcccttcagacctctgccttctaccactgggcatagtctacacacagatcatgacttttggctactgtcagtaatgatgctatgagcatgggtgcacaaatacacctccaagaactttgggtgtgggtgtatgtttagacagagtttcactctgtgtccaagctgcagtgcagtgtgcagtcatggttcactgcaggctcaacctcctggggctgcgtgatcctcctgcctcagcttcctgggtaaccaggactacagacatgcgccaccacaaccaactaatttttcattttctatagagacgggacctctgtatgttgcctaggctgattttgaactactgggctcacagtatcctcctgccttagcctcccaaagtgctggaattacaggcatgagccaccacacttggccctccaagaacttttgaaataaactctattaattatattcagaaaacttaatgctatcaccttagactgtatagcataaattaagttcctcccacatagcaatgcctccttttaagatgctgctgggtaatagtccttagtttaaatatgtcccagctctccttagcacagcagcagtcttttacattaactttttagagtaaaagaaaaattaggagagggccggtcgcggtggctcatgcctgtaatccaagcactttgggaggctgaggtgggcggatcacctgaggtcaggagttcaagaccagcctgaccaacatggagaaaccccgtctctactgaaaatacaaaattagttgggcatggtggcacatgcctgaaatcccagctacgtgggaggctgaggcaggagaatcacttgaacccgggaggcggaggttgtggtgagccaagattgcaccattgtactccagcctgggtgacaagagcaaaactccatctcaaaaaaggaaaaaaaaaaggagaaaatgtttggagaagtactaaatataaaaatcaacttatttttagtagaatgtatttgttctcaacacagctaattgttttagataattaccagccttggactacagacacatttcactaagccagaaaattatttttgaaatattttgatgatgcagagaaatcatttaaccaattctgctatctcattgtcttttatgaaacactccctttaaaaatatacaagtattttagactatgcaaacatttacgcttgtttgaaactaagtaataaaatctattaaggttttctgttgcaaatgaattcatatcttcctgtggagtcataatttaagataaaaatagtgagattcaagttcaaaaacaaatttggcaaatcaagtattgtaaaagtctaggaaatgtgaaaattttattctagttgactttcatgttttactattaatttgcatgtggtgaattcctacttgcattgattctaaaaggttgtataaactgtatgaggatgggaattgtgtctgtttcatttactgtatgctcagtacatactagtactcaacacatactagtctcaatacatgctgggtacatacaaatgaataattacaacagtatcatttagaaactcttccatagtctttcttcatgccttaacatggaattaataaacaaaattttaagaaatgtcctacatataagacaaaaaggtcccaaaggatataaataatagtcctaataaaatcaagattttttttcacttgttattagcatcctaactgcaatggccaactaattcaaaggcctatgcatactattatactattaacagtaggaaaaaagtaaggtgaacttttttttttttttttttttgagacagagtctcactctgttgcctaggctggagggcaatggcgtgatcttggctcactgcaacctccgcctcccaggttcaagcaattctcctgcctcagcctcccaggtagctaggattacaagcacccgccatcatgcccagctaatttttgcatttttgtagagatgggttttcaccatgttggccaggctggtcttgaactcctcacctcaggtcatctccccgcctcggcctcccaaagtgctgggattacaggcgcgagccactgcacctggcccaagatgaactttcacaaacattttttaaaaagacttctgctcctgttgatagctcaacattgaagatactatgaatttttagttaaaaattttaaaaacatacagttttggcttctgtcaaaagaatattgctgcctcattgtcacagctatagccaagaacattaaaatctcatgtcctaatgacactagaaacattagaccaattgtcatttgcccctcccagctatcatttttctgtttcttctgcagaaatatcactatcctttggaacaattttgaaggaaggaggtggctgagattatcccatgggacttgtggttttctggactgagaccattctttcagagtttcatggggctgaccgccaccacaccacaaatcacctcaatgctgggaatacctgaatcatccaggctttacacagccatacagtggtgctgccagttaggagctaagaatttctcacctggctgtggtgctctatggcatgaccaatgcttgggtgaaattcaccaaaaacagcaaatagttatttctcccttttttattattatgtatcatattattgctaactaaaaagatccataatgttctagatatgttatgtagttatttgggcagttcttactctccagctgtttgtaaaagtagaatgctggccgggcgcagtggctcacgcctgtaatcccagcactttggaaggccgtgatgggtggatcacctgaggtcaggagttcaagaccaacctggccaacattctgtctctacagaaatacaaaaattacctgggaatgacgatgggtgcctgtaatctcagctactcgggaggctgaggtgaaagaattacttgaacccaggaggccgaggttgcagtgagccgagatcgcaccactgcactccagcctgggcaacagagcgagactccatctcaaaagaaaaggaaaaaaagtcgaatactaacatatttgggtttcatttaagaaaatcatatcttacattattatttatgtatgtatatgtccatacatatatacacacgtacacacatattctcaaatggcaagtgggatcatggacatctataatcatgcataaaagaaaggcctgggagagattaggagtgttgttttaattcatgttttacctctttgtttgtggctgtcagtagattaacataaagcatgttggaaagaaccagggattatcttctagcccaatgtattcaacttctgtttgcacatttacattctttctctgaatgatgagctctcggaggtttagtagggataagttccaagggaagcctttctcaaattcatcacttacaacatttatacacacagctctgatagttaagtaggactgactttttctaatatgtgtagggatatttcaaaattatttctattttttcctgtgggagttctgatgtatacaagcctagagattgagtttagtgatggtgccagggaagattttcttttcggcaggttaaaaagtctttgaaaccctcccatttaaaaaaataaataaaggattctggttgggcatgctggctcacacctgtaatcccaacaccttgggaggtcaaggcgggaagatcacttgagcccaggagttcgagagcagcctggacaatgtagtgaaaccccatctctacaaaaaatacaaaaattattatgtatggtagggcacacctgtggccccagctactcaggaagatgaggtgggaagaccacttgagcgtgggaggttgaagctgcagtgagctgtgatagtgccactgcactccagcctgggtgaaaaagcaagatctttccaaaaaaaaaaaaaaaaatccactttttgctctatttcttttctttcctttttcttttttgagaccgagtttcgttcttgttgcccaagctggagggcaatggcgtgatcttggctcactgcagcctccgcctcctgggttcaagctattctcctgcctcagcctcccgagtagctgggattacagtcatgcgccaccacgcccagaaaattttgtgtttttagtagagatggggtttctccatgttgatcacccatccttacctgatctgcacacctcggcctcccaaagtgctgggaatacaggcatgagccactgcgccctgcctttcttgctctatctttacaccagcatcccttcttcaattacacacaattctttcgatccctatcctcaaggtgccaggcgttattccacctttatcttttgaactttatccagagtgactgtcttgctgtaacagatcactctctggtcagacccctttcaaggctttaactttcttgtttgatagcattctcccttttcagttcctttcaaatccagtgttcatgacttccctgattctatcaagatatatttatattttttgaatgtgtgtgctttaagccagtggtccccaacctttttggcaccagggaacgagtttcctggaagactatttttccacaggtggggagggggtgggagatggttttgggatgaaactgttccaccccagatcatcaggcattagttagagtctcaacctagatccctcccatgtgcagttcacaacagggttcacgctgcaatgaaaatctaatgccacccactcacccactgctcaccgcccccagctgtgcaggagacccctgctttaggcatttcgataaagcttttttttttttttttttttttggcgttgtaccatcacccaactctgcaactcctcgaacagtatgagtgggaaatgccagtggcttccaatctatcctttggcactcgaggagggagtttatccagtatctgataagacatagctgccttggcatctgcaaactttcctggagctctggagagatgtctgaaattttattttttccatgttggttgttcacttattttaggaagagatacctctccaccctcacagccaggaatctatcccgttctagagaatcggtactgtgttttgctcattttccccatgcacacgaacttcttgcatgagattcccagcagtcttgatttcataatctttctccagagctttgtaaaatgtccaaggatcctgggacagaatattcactataagaaattattaagctgtctaaaaacagaaatagcttttacactgcctgtaagacagcaaataggagcgctggttggttgattgattgattgagacagcgtctcactctgtcacccaggctggagtgcagtggtacaatccgcagctcactgcagccttgaactcctgggctcaagcgatcctcccacctagtcttccaagtagctagcactacaggtgcacatcaccatgcccaggtaatttttgtattttttgtagagatggggtcttgctatgttgcccaggctggcctcataattcctgggctcaagctatccttccacctggacctcccaaagtgttgggattatgggcatgaaccactgcaccttgcctaggaactatttattaagcaaatgtaaacagtgttcactttcatatcatctgagaggacttttatacctttccctgtccctcaaactttgtattctcttttgctttcagtatttttagcatctctttttactgttaaaaagtgaaaagtatctctttcattttttagtattttatattttttacttacgtattttattttttatttttatttatttatttttgagacagaatctcactctgttgcccaggctggagtgcagtgacacgatctagtctcactgcaacctccacctcccaggttcaagagattctcctgcctcagcctcatgagtagctgggattacaggtgtgtgccaccacgcccagctaatttttgtatttttagtagagacggggtttcaccatgttggccaggctggtctcgaactcctgacctcatggtccacccaacttggccttccaaagtgttaggattacaggcaagagccaccgcacccggccacttatttcatttattgacctcacttcatgctccactaagaaataaaaacttcacagatagcaacagcctcatcttgccaccaccaaatctgtaaacctgcctttatctgtgccccttgtgtgttctccttcttccctcctgttagaagaagcatctctcctcctgtcagaatcctcctgttcttggccaggcatggtggctcacacctgtaatcccagcattttcggaggctgaggcaggaggatcatttgagcccaggagttcaagatcagcctggacaatatagcaagacctcttatctattaaaaaaaaaaagtttttgtgttctttgtttctcaccttccaagactttttctttctctttttggaatcaaggtcctgctttgtcacccaggctggattgcaatggcacaagcatagctcactgcggcttcacagcttcaacctcccaggttcaagtgattgtcctacatcagcctccggagtagctgggattgcaggtgcacgccacaatgccctgctagttgttttttttttgttgttttttgttttttttttgtagagatggggttttgccatggtgcccagactgtctggaactcctggtctcaagtagtctgcccaccctggcctcccaaagcaggattagaggtgggagccaccgtgcctggccccaagagttcctatcctgcagcatctagtcatcccctctctactggatcactccatcagcatgacatattatggacattatggagtggcccatgatcagagcccaaaacaccacatcccagctcctcccgctccatgcagcctcctagctctgccccccttcccagccaggcctttgacaaatgagtggtctgcacttaacttctcccttcctctcctcttcatgtccagatattcctcccacagctctaacacattgctcccaacaaggccactaacaacctctgtgctgtcagagaagtcataaacatcgtcttatcttacccaagctgtcagcggccttcacaatcgttgaaccctacctccaacttgacatgttctctgctcttggcttctgagacaccatgttctctggacatctcttgccagttctttttttttttcttttggggagggagtggtagggacagacagactcctatccctctgcataacttctcaaagttagggttctttagcacttagaacctggctcttttcattagccaggtgtggtggtccatgcttgctacttgggaggctgacatgggaggatcacctgagcctaaggaggtcgaggctgcagtgagcagtgatcacaccacagccttccagcccgggcaacagagtgagaccctgtctcaaaaattaaaaaaaaaaaaaaaaaaaaaagaatttggctcttttctctttacttctcactcttagattcaatttttatttccaagcttccccacttgtatattcacacggacctcaaacttacccaaatcggagcacctgattgcccacctctaccacccaacatgttcttctctcaggctcccccttttcaataatggccctagccatcaataagccctgttgtttctataataactctaaaatacacccagcttcaccactaccacacatctccaagccaccatccactctcatctggactctgcttctgctcttattcctttccaacgtgttcaaaaagttaaactggagaaaattgacagcatctgcatttacgcaggggcggtaggaatgggagaggaggggaggcattttaaaactatgtatttagtggttagaacatgcagattctagtgaaccaatgcaaagtgggaaagaaccaagaggaaggagtccaggttaaagggatattcaacagaatggggcagatgggaaggccaggctttgaacaggtgacttcgtcttgggacttgttgagctgtgggaggatcagatggatattcttggaggtggttggatatagaaaactagaaacagccgggcatggtggctcacgcctgtaatcccagcactttgggaggccgaggcaggcagattacctgaggtcaggagttcaagaccagcctggccaacatagtgaaaccccatctgtactaaaaatataaaaattagctgggcttggtgatgcacacctgtagtcctagctactcagaaggctgaggcaggagaattgcttgaacctgggagtgggagtttgcagtgagccaagatcatgccactgtgttccagcctgggcgacaaagcaagactctgtctcagtaaaaataaataaactagaaacaagacttcagggctaaatatgtacatataggaatcatccatgataggatgtacttgaagccatggaggcaaataaaatcacctgggaaaaaatgtacagatgagaagatgagagtgtaatcctgcttcttgccgcaggttgagtttttggagcaccctcgttccaccttctagtcccaagcgtgtgttcctcttctctccatagcattaccctaccttcatgtggtcctggttacttcctcccaggatgcatgcaaaaggaagcacagtgttccacattcccttttagtcttgttgatcccaaagataagtacgtcatccaacttcttcttttttttttttttttcaagatggcctctccctttgtcaaccatgctagagtgcagtggcatgattgcagatcactgcaacctctgcctcccaggttcaagtagttctcctgcctcagcctcccgagtagctgggattacagcatccaccacctcgcccagctaatttttgtatttttagtagagacagggtttcaccatgtttcccaggctgctctcgaactcctgacctcaagtgatctgcctgcctcagcctcccaaagtgctgggattacaggcgtgggccactgcgcccggccccaacttctttataaaggttttgttactgaacattttggcacttaataaaattatctaaacctcccaagagagtgacaacacttgacaaacacatacaggcacacctccctaccctggggatgacttatctgacattccagttacggtgcacgaagccaagaatccctaagtagcaaataaaacctttcaaccattgaagtagagttataacttccagacactaaagctggagttcgtcttttgcctatttaatctatatattttttattttttagagacagtgtcgctctgtcacccagcctagagtgcagtgacatgatcatagctcactgcagcctcaaacttctggactgaagcaaccctccagcctcagccttctgcatagctgggactacaggtcccagcacaccaccatgcccagctaaattttttacagagacgaggtctcactatgttgcccaggctggtctcaaactcctgaccacaagcaatgctcctgcctcagcctgtcaatattttacctgtatttctcatcagcttggttttttggtcatggttgttaatttttgaattatatgaaagtcctacatagaaggttctctcctggtgttttggcagatgtaagaaaattgatttcgtttgtagctgttaatttgagaatccattgtagatactagcaatttctgaaggaataagagattcacactttaatgggacttcacaatctttcatctaaaaattctagctcctggtagggagacaagttccagacccacaactattagaaatatgttaataaactgggccccggattgaagcatgtctaaacaaactatggaatttaataatgtccgaataatgtggaaataatgttttcagtggaataggatgaggctgggtgtggttctcacacctgtaatcccagcactttgggaggccgagacgggcggttcacttgaggtcaggagctgagagcagcctggccaacatggtgaaatcctgtctctactaaaaatacaaaaattagccgggcatggtggcaggtgcctgtaatcccagctgctagggaggctgaggcaggagaattgcttaaactcaggaggcggaagttgcagtgagccaagatcacaacactgcactacagcccaggcaacagagcaagactctgtgtttgttaaataaataaatggaataggatgaaacagaaaaacattgtcattttttgaaaactctgaaataatctattctaaagtaattcaattgaaataataaattcactttgcattctccttttgccacaagattcaaatatttactaactggcatcaacactggtgttcaaattcagtattggcaatttcacacttgaagactgtctgtgttcccagagagtgttaagtctaactttgaggtccacaaatatttattggtgtctggtgtatgccagcaactgggaaaacaataggaggtggttcctacctcaaaaagcttgcagtttggtgaatttacagtctagtaagactagacctacgtaaaagatacagagcaatgcaaaacagtagatgtcagatgccatttgactaacatacgcgttaattgctgcaggatttctagggaaggagaatctggtgggctgcagtaggagaaattggaaaataatttactattctccattgacagtggcagtcaggaacctgggagcccaatttatttgtcccctcaacccaactcaaatgggtcctcccttgggaactttgctgccaacttgctcctcttctaaacccctccccaggcacagtctatcaaccccaactttgcaaaacttccattttttgttcttaactatgctaaagtactcacaatgcattgcaattgtttgtaagcctgtctcctctacaagattctgatttcctgttttgttatgttcatctttgaattcccctactgcttagtatgatacatacaatattgttagtgtccccaaaaagtgtttttttgtgaattaaagaaatgaatgaattcacaatgtatgacttgggccttaaggaagatggcattcctacatcttaaaattagtaaacagcatacctttaccaggcacatgttgatcagaaataaaggaaagtaagtagcctgtagaactggggtgctcaaacaccaatttttctcaggattactgaaaaacttaaatatacaggccaggtgtggtggctcacgcctgcaatcccaacattttgggaggctaaggcaggccgatttcttgagctcgagtttgagaacagcctgggcaacatggcgaaaacccatctccacaaaaaacactaaaaaaattagctaggcatagtggcatgcatatgtagtttcagctacttgggaggctgaggcaggagaatcgcttgagcctgggaggtggaggttgcagtgagctgagatgacaccactgcattccagcctggagtcagatcctgtctcaaacaacaacaacagtaaaaacaaaacaaacagacaaacaacctttaagttatacagctaaatataaagttcaccccaaacttagtaaatctgaatctgcaggcattcaggcaaaactgcagactgagcgtctgattttttttgttttgttttattttgttttgagacggagttttactcctgttacccaggctagagggtagtggcacaatctcagctcactgcaacctctgcctcccgagttcaagcaattctcctgcctcagcctgtggagtagctgggattataggcacgcaccaccacacccagctaattttgtatttttagtaaagatggggtttctgcatgttggtcaggctggtctcaaactccagatctcaggtgattcgcccgccctagcctcccaaagtgctgggattacaggcatgagccaccatgcctggccatgcatctgaattttttaaaggtgccataagtgatatacagccaggtggttactataaaatgtttgcagataactggcactggttgctatgaagaagcaaatatttttaaatttaataatattaagaattgtttgacccaggagtgcaaaagcagcctgggcaacaaagcgagaccctgtctctacaaaaattaaaattagaaaatcagccatgcatggtggtcccagctactctggaggctgaggtgggaggattgcttgggcccaggtggtccatcctgcagtgagctatgagtgcaccactgcactccagcctgggtgacagagggagaccctgtctcagggagaaaaaaagagaaagcacagagcctagtttgttatatcacccttgggggttcaaggtcagcaccatggacatcgccattggatgggttggtttttatcattccttccttcacaccagtctgtcaattaccccatcttcctttatttcgttgctaatatttatgcctctctagtgtcatcccacttgatgtatttaatatgttgttggcaagcatggcagttagctcaactttttagcagctgtattttgaatgaaaaccaacctcatgttccaagtcctcttgcttaattctagcaaattcctaaactgtatccaaatctagaagtctgacccctatgtggggtggttcttaggaaaacttatttagactgtattacaagtagttcggttctaacctcttaattttacatttgtacaaattgaggctcagagagatgacgttcttgagatggagagttactgataataaactaagttcaacagtgttttcatggtttggtccagaagttactataaaatcgtaaccacatccatggaaggaatatctagttactaataaaaataaatctaatggttgatacagtttctctaaatcctccctactctttattaaaacctatttaaccacatttatacatgtttatgtacaatgttatccaccccaataagtcctgggatcttgaggttaagagtcctggttctattcatctttgaatacaacccaacaacaaaaacagagattaattatactcatattttttctttatcatgctataaatccactttgcagttaatatctatgaaaattaatgaacatttaaaataaagtattcaacttaggaattgaatatatattatatatttattgaatgcgttttcatctctatttaagaaaaccagataattgcactagccaaaataaaaaaatttaaaatccacattaaaaagaaatgtattcagggccaggcatggtgcctcatgcatgtaatcccagcactttgggaggctgaggctggaggatcacctgaggtctggagtttgaggttggcctggccaacatgtatataatatatatattgtatataatgtatagtatatatcatatagactgtgatatattgcatatattatatatagactatgatatacagcatgtgttacatatagtatataacatatggtgtatattatatgtggtatatattatatagagactgatatactgtattgtatatattacatatgatatactggatagactatgatatactgtgtatattatatatactatttacgttattctgtatatattatatatacactatatctctcacctttctatctaaacctgcttcagttgcattgcatggagcctttgcatacagtttgttcacccctaaattatacatgcagttcaccagatcctattacgctatgtctgttccccctttaaattgatttttcacaagcacttagcttggtgtcttcagcgtctggcacctggtaggcattgagatgtttgttgcaatctttctcaaatgctgggtgtggatggtggtggtgtcagcagcagaattaaaagataaaggaaaccatctgtccttaaaggaactcaccctggtcacagagactgacatgcaaggggaaagggtatgaatgtatgagccaagcatgccagtgtccgttctcctggttcccaacaacagtgttaattttatggtagatgccatttcaagtcccacagccatcgatgtggtcaaatgaaaggtgttacacagggccgggtgcggtgggtcacacctgtaatcccagagctttgggaggccaaggtgggtggatcaccttaggttaggagttcaagaccagcctggccaacatggtgaaaccccatctctactaaaaatacaaaaaattagctgggcatggtggcgggtgcctgtaatcccagctactcgggaggctgaggcaggagaatagcttgaacccaggaggcggaggttgcattgagccaagatcatgccacagcactccagcctgggcaacaagagtgaaactccatctcagaaagaaagaaaggaagaaaggtattgaacagaattgaaaagtttgtcagatgagtgtttctggaagaccttaaaattaagaaattatttgttcataataaagactacccttttccctacagaatgtaattaagatatttattttttataacctaaaaattcgtctttgtcagtatcattttctgcaagataggaagctattatcctgcagccactggtttttgtgaaactgcccatggtttacgcctttgtatttttttcctgtgtcctctggagcactagttagccaaagtctaaaattggagcagaaattatggggcagtggagttggaattacagcttagactcctgtctctaccacatgtaactatggcctgccatctgatgttcttcatttgcaaagtgggaataatagtacttaatatacctgttgaaaatatttgactttctgactcagaagggatcttaaaaatgtccttttataattgaggtaaagaagaaatcgctaggtagggaaatgtatgtagtaaatgatgaaatctgtaaagatgttttaaaaattgtaaatacctctacaaatatcatatactactcaagcaacatcctaacatcactaggcatttgttttctgtttaactgcctttggaagacctgcatgtaaagtaacaaatatgtctcaccccagacgtgttcaactcccgtatctccctttttcattacagtcatctctctggctccttcactgcccccattcctatccatctgctctttgatgtcatatgcaccttacaggtttcagtttctcttcccggctttgctttcttttctgcttgtcttgagccccatggttgactagctgaagcattctcgaataaggagtctcaattcctttaatatccggcccacttttcttctttttttttttttttttttttttttttttttttgacatggagtctcgctctgtcacccaggctggaatgcagtgctgggatctcggctcactgcaacctctacctcctgggttcaagtgattcttttgcctcagcctctcgagtagctgggactacaggtgcacgccaccatacatggctaatttttgtatttttagtacagatggggtttcaccatgttggccaggctggtcttgaattcctgacctcaggtgatccgcccgccttggcctcccaaagtgctgggattacaggcatgagccactgtgcctggcccccagcccatttttctacgcttcttgcctaccttggttccatgataaaagccacctccttagcctgttaacccatacaatggaggtttagggagtgggtggaagagctttagtgtctttggtttaaatttaggtctgttttaaaattgtgtctgatacaaccacatctccttaataaacgtattggtttactattttcagttcagtctttagaaaacaagcagcctttcaggaagaatttcagagaggtttggttctcaaattttgtgtgcttctaaatattctttataccttgcttcaaaatgtagctacctgagctcacctttctgtagccatttcagtttattaggtttggggtgaaatgtgccatttgtattttcaacaagccccaccccagctgctgaaaatgatgcaaaatcaaatttgagcatcgctgctgtagaatacattctctctttcttccaatggagagttccattcctgaatgtgggatatgttgaaatggtgcagccaaatttgcattgttgttcggtaatatcagtggttcttaatcaaagacatgtatgagaatcaactgtggtgcttttgaaggtcatcactaaaaattgtccacgctttagctccacccactggcaattctgtgaaatacttttcaggtggggccccgctcgcctgttaacgtatcacaggtgatttctacttggtataatatggtatgacccatctgcagtggaaacaaatgcctgttttggataggagtatttcaattcaagttaatatgaattgataaatacacaggtaatatttgggttgttattcaaagaacttataaaagtcatatcttgtaaaagtctatagatttattacagccttttaaaaaatattgccaggccccaagccctgaaaatatgttgcgcttgctccttcccttactgaaatcacatttaaattcagaatcaccagtgctagtttactttcagttcaagacagcaagcctgaaaatagccttaatgacgcatgcagagcattttcctaggaacagactctggacttattagtgtctggagccatcagtcaatacttttctggtgcactggtgtgttagtaagggatgccagaaatgcgtgccttctcttatcagtcacccggagaattcacgtaacttgctttaaatagccgaagtgaagaaggagattgactttacagttgtgtttgcttctttaaaaaatatacttatcttttcctagctgtaaaatagcaatcgaaaactgccatctaaagtgaaaaataattccctaaggtttcaatagggtttttcttgtatcagaaccagggccagggtgtaactggatttaagtgccagacaaggagctagaagctgcaggtgcagctccccgccacgctgctctctgtgaccttgagtgagacacaaaattgctgggcttccgtttttcattttaaaatgcgagggttggatttgctcgctaagagctcttttatctctaatagttaagatgatggaacatgatgttttgagatgttttgctgaaatttctcacatagaaaatgggccttctgaaaacatataattatagttttgggtaggaagaagctgtcatggtggcgaaggggaacattgcaaatctgaacatgaccgcagctggcgggagaataatgtgttagaattgaaaggcaccctgcagacttgctgtttaatgtacaaagaagcctagggccggaggggcagggggactctcagggacagtggaatctggctcaacggtcaccctctggtagcaagcaagacctgtctctgtgacaggtctcaatcaatggagaagcttattttgccgacgttaaggacatgcctaggctcagcgtcctaaactaagccaagtgcaccaagccaggtgctcaggctcctaaactaaggtgcaattaggcaatcagcatggattgttagactgtacaaaggtggagatgccaattccccaactgttttcctaggggttgtgttcccacacacgcactttctccttagtaacagcgcacggctcctgacctggatgggtggccttagatctgtgaagcacatctaccttgccttgagaaagatgcaactcaatgttggcttccttagctccgtgccactcagcattgcagcaccgaaaggaaaactgtttcctctctactctcccactactctcaattcttccaacaacagatgtgggttgttttcccccccaacagcaagcagttctccagttctctgcagatgctaatgccacgtcctgcaattcaattctgaccttatctacctggagttagtgcagacccaacaggttgaaggctgagtcccaaaagactgtccccacttcagatgccagtcgcacaagtgatgagtctccaggttatcctcaacttctgtccaactcaactacagatcagaggttcccatggccccctactcaggttctataatttgctagaagggctcataaaactcaagagaacagccgacttactagatgactagtttattataagaggatacaactcaggaacagccagaggagagagggatgggagagggtgcagaacatccatgccgtatctaggtacgccacccttccagcacggccctggggtcacacacctggaagctctcagatctccatccttttgggtttttatggaagctttgttacttaggcaccattgactaaatcactggccactggcgattaagtcagtctccaacccttttcctgtctctagaggtcagggtgttggggcggaaagttcaaacactttaatattacggttggttcctctggcacccaggccccatcccaaggctctccaggagaccccagccaccagtcattcattagcatgccaaaagacacttaacactttggagagtataagagttttaggagctgcattccagtaaacaggtgtgcagatcagataagcatttcttattgtattgcagtatcagagatgatgctcaccgctggaccacattccaagatatggctccacttattgatctttgaatgaaggggtaccttattgatcctccccctgaccttaccccaaataacaaatcataccagtactaaactggcagaactcaagattggttaggaaagatcctctgaaacttcgtataatgacagttaccttgttttgagtgtgtcccctgtgccaggcactgtgctgagagctttgtgtgttcagactcacttcacagttacaaaaccctctttaatatgtgggaactgggcttgaaatggtttaggtacacggtccagttcatagccaatgttgtgttactagaaagggatcccaatacagaccctgagagtgggttcttggaccttgtgcaaggaagaattcagggcaaggccatagagtaaggtgaaagcaatttgttagagaagttaaaaaaagaaaaaagaatggctactccataggcagagcagcagcatgggctgcttaactgaatatacttatagttatttcttgattatatactaaacaagcagtggattgttcatgagttttccaggaaaggtgtgggcagttcctgaaactgagggttcctcccccttttagactatatagggtaacttcctgacattgccatggcatctataaactgtcctggcactggtaggagtgtcttttaacatgttaatgcattgtaattagtgtattattgttacagtggagggtgtccacgttcttggcgtcttcaacaaagaattggacaaaacccacaaagcaaggaaagaatgaagcaacaaaagcagagatttattgaaaacaaagtatactctacatagagtgagagcagccaaagcaagcagctcaagagcccggttacagaattttgtggggtttacgtaccctctagaggtttcctgtgtttgcttggtatacacgctatgtaaatgaagtagcgactctccatcagtctgattggttgtaggaggagactaatcagaggctgaagcgatgttatgaagttgcaccctatgcacacatctgattggctacagaaagtgaccaatcagatgctgaagtgaagttacaaagttatacccctttgtaaatgaaaacttggccccagaccagcctgaatggttgcaggagggttctaaacagaggtactttcaatttcagaggcagagcatggtagcttatgcctgtaatctcagcacttaaggaggctgaggcagcccaatcacttgaggtcaggagttctagaccagtctggccaacatggtgaaactccgtctctaccaaaaatatttatttaaaaaactagccatgtgtagtggcacacacttgtaatcccagctactcaggaggctgagacaggagaatcacttgaacccgggaggcagagatagcagtgagccaagattgtgccactgcactccagtctgggtgacagagtgagattgaatctcaaaaaaaaaaaaaatacagttctcatctgccacacagaaaaaggagggggagggtattgcaaagggcgtagcctttggtccttttgttatttgagcgtggaaagttggggtttttcttttgatttagttttaggaagtcagcgtgaatcagccttaggttccctgtctccaggccctattctcctgcctcataataaataataataataaacagggaagacgaccagagatcactttcatcaccatcttgatttaggtgggatttggccggcttctttactgcatcttgttttatcagcaaggtctttgagacctgtatctggtgctgaactcccatgaataagaatgcctaaactcttgggaatgcagcccagtaggtctcagccttattttatccagcccctattcaaaatggagttgctgttgttagaatgtctctgacagctggactcatccaaagcctttttagtaatgccatgactgtgtaaatccagaagtctctgtgacaggtctcaatcaatttagaagctcactttgccaagattaaggatatgcccaggagaaaagaacatggaatcactaaaacagtctgtggtctgggcctttctccaaaggtgaatttgagggcttcagtatttaaaggggaagagtgggctgcagagggaagatggagggtgtggtaattcacataatgcaggaggaaaggggcaggttagggaagagtcacttatatattcctccggctttcagtaaattggcactttacaaagataagatggacacagagtaggaagtatttaaccttttagttgtagttgtctgcttaggaacaaaagggaaggcaacttcttgcatggctcagctttcagcttcatttttttttcttttggcagagtgaattggggttccaaggtttgtttgttcgtttgtttgagacggagtttcactcttgttgcccaggctggagtgcaaaggcgccatctcggctcactggaagcacctcctgggttcaagtgattctcctgcctcagcctcgcgggtagctgggaatacaggcagcggccaccacgcttggctaatttttatatttttagtagaaacgggatttcaccatgttgcccaggatggtctcaaactcctgacctaagttgatcctcccacctcagcctccgaaggtgctgggattacaggcgtgagccaccatgcctggccggagtttttattttccttttacaagtgcttcctcttctatttcccacagaacattctggaaaaccaccagggtagaaccctgacttctatttgaccacagctcaccattcttatatgttttgtgattttcattttcccttaagaattgtctccaattgcgacattcttcagaacttattaaagatatctgaagtgtatacggtgaaaaatgtatagaatggtggtgtcaccacttgatgttgagtgtgaaatgtgtgggtagtaaacttctgaagctgctgctgtaagggccaagggaaacttccccttcaccctgtgaaagtttgcagaaaaagcaactcactaagacaggttaattggagaaaaggcatgcaaatgtatttaacatgcacacggggagaatctcagattacttattccctaatagagttaagaagcttatacagcatcctggccaaacaagttatgggagtagggagaagaggaattccattgagaggatcactagggagaatgaatggatccaggaacagagataaatttgtaaatagtctcttgacagttaaggtttggttgcattcttggtattaacagggaggggaagcagaaaccattggtctctttggtgcctctgggtcctgggcagatacagcctttgctgtgggagggatgtgggggaccttgaggcggcttcttcatttcagcaggccaactactcaggaggctgagtcgggaggatcgctctaagcccagtagttcaaggttgcggtgagttctgatcctaccactgcactccagtctgggtgacaaagtgagaccccgtatctaattaaaaaaaagaagacacctcttcaaattttgacagagtttaactctttcatcaaaatacctatatattttatgtaatatggatcatttatatatacacatatctgtgtgtacatattgttatctgtatacgtatatctgtattatataacatatataatctgtgtgtatatgtatatatctttttatgtgtctatccttcctgacacccattccctgaattcttttctgccaagataaatgcaaagagccagaaaatctgtgatcctatctcttaacagatctgtgctgagaaattactgtaggtatacctggagttcttaataaaaattctagttagatgacttttgagaaccataaaaaaaaacttaagagaacttctgggatctctagtagggactaactttctctttacaaatgttgacaaattgttgagattgtctgcggagatagtacatgatatggtttggctctgtgtccccacccaaatctcacattgaatggtaatccccatgtatcaaaggaggggcctggtgggaggtgattggatcatgggggtggatttccccctttctgttctcatgatagtgaggttcttatgagatctgatggtttaaaagtgcgtgtgtctctctctctcgctcgctcgctctctcgctctcactctctcttgctctcctgtgataagacatgcttgcttcccctttggtcatgattgtaagtttcctgaggcctcctgttaagcctgaggaactgaatcaactaaacctcttcataaattgcccagtctcaggtagttctttatagcagtgtgagaacagactaatacagtatatgaggtacacaagacagctcattacttttagagtcaagcattgtttttaatttaaaaatgttatctcccaggttgatcataggctgtattcattcagcttggctttgagtgactctgggctgtttgctaaaactaatttgtcctcaaaggaaagcgagttatgaataggggcattcaaaattttatgactttggttctgatgatactttcaaaaaatgaattttaaataattttcaaatgagagaaacaatcctcaaatatatgttcatttttttccaagggttttttgaaggggttcccattcacttggataggtttgtatatgcttgacattttttaattactcaaattatttgaggatcacaattcacttttaattgtttttttaatattggagatgtgggatttgtttttttctcttttggttgtcaacctggttactaacagactgattctccttgagcatccagaataagacaagcccgttggtttaatagttatctgtggtaagtaccgtcatacacagtgtgtctcctttgtaaaacttaagtgcaatgaatgatgttgttactagtccaacgtgtttctctcttgctagaataatagcctcacagagcaaaatctctgtcttgttgagttctgtgttcccactgccaagaaagtatcctgagcctaagaggcacttaataagcacttaatgaattacaaaagaaatgatttgattacagaactaagtctaccaagtgtagctagttcagttgcagaaaacagaatccagaacttttatgtttccagtgcatcattttgtctctaactgcttaggaactatggttagggctaagagaaaatagacgaatttatcccctgctggtgggcatgaaaattagcacatctccctggaggaaaacttggtaaaatatttatcacatcttttcagacgtaaacactttttctaaccacataggagacttacataaacatcttttggtcaataatttgtctaaggaaataaggataaaatgttttagatatgtttttaatatcaaaagaaatgtctaataacagtgcagacccctcttacgtaccccttgaggtcctctcagcctcacctatctgttccacccctctctgtggcaattcctctgcataaggccaacaggtcttccttgttggccacaggtggtgtgctgtgaggctgtgctcatcacgcttgtgtgcacaaagcactgggcagacacacccagtgcagaaaatctttgaccaagaggtgaccaaaactgataatattacatcttcgctatatatatatatatatatatatatatatatatatatattttttttttttttttttttttttttttttttttgagacagagtcttgctctgtctcccaggctggaatgcagtggcatgatctcggctcactgcaacctctgcctcctggcttcaagtgattcttttgccttagccttccgagtagctgggactacaggtgtgcaccatcatgcccggctagtttttgtatttttagtagagatggagttttaccatgttggccaggctggtctcaaactcctgacctcaagtgatatgcccgcctcggcatcccaaagtgctgggattacagacgtgagccaccgtacccggcccatcattcctttaacagagtgtcttgagatgtggcttatggcttctcagaagatagtccagaaggattgagccatcaatcaatcacacctagtagcagccaagtctattacagcccctcagatggtctcttcctctccttccctgattccttctctggcccctctcttctattccctgagattgtactcttatataagctcagtgcctcagtatctgctgtctggagagctgagaagttgtcttgttgattaaataagctatatcatcttttaagtggctacagatatggacagccattacaactgacatgaaaaggcaataaatgaaataagctggtcacaattttttttctgagacagagttctgttgtgttgcccaggctggagggctggagtgcaatggcgcgatctcggcttactgcaacctgtgcctcctgggttcaagcaattctcttgcctcagcctcctgagtagctgggattacaggcgcctgccaccatgccctactaatttttgtgggtttttttagtagagatggggttttgccatgttgtccaggctggtctcaaactcatggcctcaagcaatccatctcggctttccaaactgttgggaatacaagtgtgagccaccacaccttatctcttattggtttttacagagactaactgagatatatttaagcaacaggacttctacatagtaagcacaatatagttgcaaattaaggcagttattaattattacagtctaataatgtctgaaaaaaacaagtctgtttatcacgctgaatcacatctgtatactgccacaggtatacctcagggaagttcagattactacccaagggccaaccgctgcttctgaaacatcaactgacagaagaacctacggaagttataatatctcctggctagactgaagatgccttgagcagatatttgggtgtttttttctgttttttgtttgttttgtttgttttgagatgcagtctcgctctgtcgcctaggctggagtgtagtggcatgatcacggttcactgcaacctccacctcccgggttcaagcgattctcctgcctcaacctcctgggtaggtgggagtactggtgcccgccaccatgcccagctaattttttgtatttttagtagagacagggtttcaccacgttgggcaggctggtctcgaactccttacctcaggtgatccgcccacctcaccctcccaaagtgctgggattacagggatgagccaccacgccaggcctggggtatctttattaaagacctttagagttactacatgttattctcagagtttatttgtagatgttccaatgataaccttgcctctaacaatgcaccccagtcatagtggagcatctgtcattttagaaaagttttcatatattcagctcatctgtgccttcctcccgtgtctgctctttggaccttgtttcggccccttcaaacagagcaacaattggtcactaagctttccttcagaaagtctctcaacactgaagcaagggcagcagcaaaggttttaagagtttctagagagtgagtgatcacatggggtttcatgttcagaactcaccacccacaactctctgcactaatctaatccctgccaaaacatttggtttgggtcatggggacactcagctcaatcattttcgtttaaaaaaaaaaaacagaacaggctgggcacagtggctcatgcctgtaatcccagcactttgggaggccgaggccggtggatcacctgaggtcaggaggtagagaccagcctggccaacatggtgaaaccccgtttctactaaaaatacaaaaattagctgggcatggtggcgggttcctataatcccagctactcgggaggctgagacaggagaatcgcttgaacccgggaggcggaggttgcagtgagccaagatcactccactgcactccagcctgggcaataagagcaaaactctgtctcaaaaaaaaaaaaaaagaaaagaaaaaagaaaccaaaacatgagtataaaataaatgatgaaataaaatcgctgaaatttgtataacttctgatcgctagacctctgtgaacttagctaaaaccgcagctgttgcagtggagaagaaagtgaagattaccgaattaacataaaatataatgtgtctccccgtgcttgtcagcatgtactttgtaaaggctttcctggtgtttgtttagaatgctgctttggaaattctttgtagtgtataattttctaaataagtacagaatagacattttataacaatttaaatgccagcatcagtttaaaagggataccactgttggagtctcttaactctttcattactgtcctcgccacagaatacaattactgagtggaaccgcggtgacaaaagcgaaaacaactcagtgttcagggtactgtgaatatttgctgggccacatttcgtgggctgagactcttcaaaaaatgatgtcactggtgtctagcaagattgccttatatcaggctgcttttcattttgtttttgaaatgtttgtagtttaagaaaaacaaggccaggcacagtggctcacacttgtaatcccagcactttggaaggccaaggcgggcagatcacttgaggtcaggagttcaagaccagcctggtcaacatggtgaaactccatctgtactaaaaatacaaaaattagccgggcgtggtggcgggcgcctataatcccagctacttgggaggctgaggcaggagaatcacttgaacccgggaggcagaggttgcagtgacctgagatcacgccactgtactccagcctgggtgacagagccagactctgtctcaaagaaaaaaaaaaaaatagatacagtatagagaaaaccaactaagaaatgggagagctaagtgagtgaagtgtaactgataagcaaagagaaggaataaaaataccaagttatcactcaggagttacaggcagcagctacacaaaagatgtagccaaccaagggaagaagagagtgctcaaattagtgtgaacccagacacctgagaatccaaacttttcaatcgctgtagctaaagttctttggcccagtgtagacacaagctccctcactggggtctcaggatataaggattcaagccctgtctctcgtgccactctgtcctttcaaccacgcagtgctggattttaaacaggtagaaagtaaaatgtttattgtatttacccctttgcttaattcttaatcattttaaatttaataaatatctatatacacttgcacttacatatatatatgttgatcgtataaaacaaaatcctggctgggcgcgatggctcacgcctgtaatctgagcactttggaaggctgatgcaggcagattgcttgagtccaggagttggagaccagcctggacaacatagtgaaaccctgtctctacaaaaaatacaaaaagtagccagatgtcatagcgcatacctgtaatcccagctacttgggaggatcatttgagcatggaatgcagaggttgcagtggggcgagatcacaccattgcactcagccctgtgtgacagagtgagaccctgtcttaaaaaaagtatatatttgtttcaaaacatattgtaggaacttttgcccatatataaagaataaaataaagttgaaaagtttccttccttaatggaaggattatttattatcattgaaagttagcaagatgatagagagaagttataatcagacaaggataactagaaagtaagatatcagtaagtgctaaataaagcagatggctatgacctggttcctgtaagtatagtcagtacctcttcagttcctgggtgcttcctatataagacttgatagctacactcccacctgaggcatttaatataataaaagagtagaacaagttttataagaagttagtgtacacaacaaataagtggataaaaaaaacggattagatcttcttgacctgtcttttctatagtccctctctctctctttttttttttttttttttctgagatggagcctcattgtgtcgcccaggctggagtgcagtggaacaatcttggctcactgcaacctccacctcccgggcttaagtgattctcccacctgagcctcccaagtagctgggattacaggcacccaccaccatgcttggctaatttttgaatttttagtagacctggttcctaggtctactaaagtaggttttcaccatgttggccaggctgctctcgaactcctgacctcaagtgatctgcccacctcggcctcccaaagtgctgggattactgatgtgagccaccgtgcccagcctccatagtctcttacaatagggatctgggtcattttttttttttttttcatttctctaaaaagagcaaattgagagtagttaatatttaagacaaatccattatagacattaaaacaaactatgaattttccttttatgttattagcaattgacagtttcaggatgaaaattgaaaaccatactttgctatttagcatagtaaaattcacctttgtattaggaaatgaagaaatcaatgcataaaaatctaagtaactatattaatcatgatcagaaatttatttctatccttgagtgaatttcatttcactttttaatcataggtattcattctatcactggcacatttttattaaacttaggtatgcattgtgttatagcgttcaaattattagcttcactattaactcattagtcattgtttagggagaaagctagaactatagtgccatgaaattataatgtgtttattctatttcataaccaaagatatttttaagttaattatctcctcctataataattggtgcttagcagccttaggcctagtgattccagaaggctgtaagaaaataaaagttcttccttttctaaacattaaccacctctctgacaagagcctgtgggcctccacacagcaggcctctgtggagcaaatagagtttcctttggatgtgagaaaaagcaagtcttgcggccaaaaagctgtccactaatatccttccagccctgccagattagttcttgcgtatacccatctgttaatgacagggtccaggcatctgtctctaggcagaaaagagcatacggcagtgagatgagggacttcaaggccaggggatagagggcatgagtcagggcagaagcatggagaaggtgggaaatttggggagcttgaacagatgtttctggaccatccttttgggtctgtaggccagatagtaatgaagcattattgtgtggggtaaatatgtgaggttcattgtctcacggcagggaaatcgaggacgtggacgtggaagaaatgagtttaagagcggaggtttaataggtgaaagaaaaagagaatagctctctctctctcttgcaaagagagaagggctcccaagtgcgtcatctggtttcatggtgaaacgcatggggtttcatagttgagcttgagaaggcgctgtctgctttacatagggcgcgagagattgttcggaccaggtgtgacatttgcatggtgcatgaagatgctggccagcccaccctaatctttcatgcagatggggtctcaacctggccagcaccatgttgtctgttcctcactgtacttgtggttgacaaacaaaagggaagatggagccaccaggttgcacatgcctggcccccaggtagccttcatctattggcacagctgcggcatttacctgtgcagacttttagcttgtttatctatgctttcagcttgatttttcaggctgctttttgttagaaaagaaacaatatgggggctgtgtttcattagaaggaagccttaccgaggactctcttaccctcactgtttgctgaaataatttatttctagctcatatatcagtaatagtgctggagtcagggtgggaagggaggtggtgaaaccaggtggttggtctcttcagcagccttctcaagatgagtgatttgtggaggggcgcggtggctcacgcctgttatcccagcactttgggagaccgaggtgggtggatcatctgaggtcaggagttagagaccagcctcgccaacatagtgaaaccctgtctctgctaaaaatacaaaaatttgctaggcatgttggcgggcgcctatagtcccagctacttgggaggctgaggcaggggaatcacttgatcctacgaggcagaggttgcagtgagccaagatcctgccacaaattgcactccagcctgggcaacagagcaagactccatctcaaaaaaaaaaaaaaatgagataggaagacatacatggtctcatagtttataaaattccacaccaaggaccctgcacaggaaacactgaaaggctgctgcagcgaccctagttttacagagggaataaaaagtcatgcaaattgtacttttagtagagacagggtttcaccatgttgcactggctggtctcgaactcctgacctcaggtggtccgcttgcctcggcctcccaaagtgctgggattacatgcgtgagccaccacacccagccattcatgaaatacagctttctagatggtgaaaaagagatgtgaagagagaaacggaagatctaaataaataaaaataatgatttgtgccgggaactgtggctgacgcctgtaatcccagcattttgggaggccgaggtgggcggatcacgaggtcaggagatcgagaccatcctggctaacaaggtgaaaccccgtctctactaaaaatacagaaaattagccaggcgtggtggcaggtgcctgtagtcccagctactcgggaggctgaggcaggagaatgacgtgaacctggaaggcggagcttgcagtgagccaaaatcacaccactgcactccggcctgggcgacagagcgagactccatctcaaaaaaaaaaaaaaaaaaaaaaaaagaaaatcaggatttgacatcgctgttgatttcctgaacctcgagttttttaagtgcatctttgtacttaaaaggaataggttacctttatgagggacacccatcgttctaacatgtgaaggtgttcatttagtgtcacacgcaaggcagacctgggcccaatctttttttgcctttctttataccaaccaatttttagcattttgtaaattataactttcaagtcttcaaaatttcacataaacatgtaaatgttgtggaactgccatctacacacccctttaaatgaaaagcactctagtactgtaggagaaacacaggctttggagagagagagattttagcaccagctctaacgcttatggcctgggagaacatataaaaaaaaaaaatcttcagccgggtacggtggctcatgcctgtaatcccagcattttgggaggccaaggcgggtagatcacctgaggtcaagagtttgagaccagcctggctaacatggtgataccccatctctactaaaaatacaaaatattggccgggcacggtggctcacacttataatcccagcactttgggaggccgaggtgggcggatcatgatatcaggagatcaagaccatcctggctaacacggtgaaaccccacctatactaaaaatacaaaaaattagtgagccgcgccactgcactccagcctgggtgacagagcgagactctgtgtcaagaaacaaaaaatacaaaaaattaactggacatggtggtgggtgcctataatcccagctactcagtgggctgaggcaggagaattgcttgaacctgggaggcggtggttgcagtgagttgagacctaaccattgcaccctagcctgggcaacaagagtgaaactccatctcaaaaaaaaaaaaaaaaaaaaaaaatctttcacaaatgttgtcttaaaatttaactttttttttttttcagagaaaggatcttgcaatgttgcccaggctagattcaaacccctgaattcaagccatcctgttgcctcagcctcctgaatagctgagactacaagcgtgtgccacagtgaatggctgggagaacttttttgagcctcagtttcttcaccttggaataaaacaattgtagctggggttaaatgaaatgtagcaatctatgtataatatacagcacattgtttgtcccttggccgacattccgaaagtggtagctttcatcattttacagtaagtcctgtcatgtacaaggtaaagaaggacctagaagaagagaatatgaatttcttaacatctcttatcacttacacattcccttctcaacaaatattgattggaaacatactggagacacagtgttgaacaagacatggccttggtgttttagtttcggttttttgagacagggtctctctctgttgcccaggctggagtgcagtggcgtgatcatggctcactgcacccttgacctcctgggctcaagcgatcctcccacctcagcctcttgagtagctgggaccacaggtgcacaccaccacagatggcttttgtttgtatttttggtagagacagagtttcaccatgttgccctggctggtctcaaactcctcggctcaagcaatccacctgcctctgattacagatgtcagccactgcactccaccaaacttggtgtttttaaagcacttttacattattgtctagataaagagatgccactcttctacaaattggtacttacgaatttattttgaggatctgttcggctttagtccacaaaccaatatgccacaaacttttaattctttatcccaaaaagggggctacaatgcatagatgatttaccagtcgccctcatgctatgtagcatgtgctcatacgtcatgtcgaaagtaccagaaactggaaaaggaatcaattcctttttttcttggcttggaacagggagaagcaaaaactggtagaaaagtctgacatcacctcttgggcctgaccctccatagccacaaaacaagttggccaggaatccaggtagaatctgcaaaagcagactccaggtctcacactggcctggcaataaagtctttaggatgttaatagaggttgagtgaaagtgaaatgaaggaccatattgtctcccaaccaacgtagtatcctaatgattctgtagagcaggatgaatctaaatctaaatgtggatttcaatagaattccgcaacagccatccctgaagctccttctacaggatcctacctagggctgtgggctatttctgtatctgtgctttctgcttttcttccccatcttactctacagctatgaccaagcctttctgataaacccgggccggtgggggaggggggagggtggagttaaagggtggcaggaaaaggacagcttgaaggacaacctattaactagagtgcacctcagttacatttggccttgggatctggaatagcttcgctttcctcaagagccagagcacctcttgtgtcccagcatgtcccagagcactgtgtcagtttcttatcacagtgcccactgttcctggtgttcccgtgaaacctctggaacaccaagattttttggcttctttttgttcttgcttcttgggactcttctttaccttaaggagaaagcacaataagaagaaagagtaaatggcccactggcctcaaacattcatatccaagaatcagttctattcatcagtatttatgatggaccatgcaggagtgaactaggaatgagctgaaccatgccccagggccatgatgctggaaaaccataaaaatctggtagggcagggtgtggtggctcacacctataatctcagccctttgggaggccaaggcgggaggatcacttgaggccaggagttcaagaccagcctgggcatcaaagcgagacctcatctcttcaaaaagtaaaaataaaaattagctgggcattgtggcatgaggctgtagtcctagctactcatgaggctgagactggaggattatttgagcctaggaggttgaggctacagtgagccatgattgcaccacttcgttccagcctgggcaacagaaagaccctgtctgggggaaaaacaatctggtaggcttccagaccaaaagtaacttttgtagttcgaacaagggcaagagccctgaatggtaagaggaaagagttccatgtggctctttaccattctgagattaagccaaaaatgaagatgtcaacttaaaacaggatatatttgattaacaaatggtttcatggataaaaattcaatgattccgtaagggatattcccttggaacttcaagttggttaaaaaaaaaaaaaaaaaaaaaaaaaaaagcctgagcgtttgaggactatcaaagaaaatcagaatgaaagagatatgtatcagtacattcttgcattgttacactgttataaagaaatacctgagactgagtagtttatcaagaaaagagatttaattggctcacagttctgcaagctgtacaggaatcatggtgttggcatctggcttctaggggaggcctcaggagacttacagtcgtctaggaaggtgaagggaaagcaggcatatcatacatggctggcactggtgcaagagagaggtgggaggtgccacacatgtttagacaaccagatcttatgagaagtcttatcatgagaacagcaccaaaggggaaaatctacccctatgatccaatcacctcctaccaggccccacctcccacactggggcttacaattcgacatgagtctggccagggacacaaactcaaaccatatcaagatagaacactgtaaacaaagtgaatatgggaaaacctggccgggcgtggtggctcacacctgtaatcccagcacttcgggaagccgaggcaagcggatcacctgaggtcaacagttcaagaccagtatggccaacacggcaaaaccccgtctctactaaaaatacaaaagttagccgggtgtggtggcatgcgcctgtagtcccaactacttgggaggctgaggcaagagaatcacttgaacccgggaggcagagattgcagtgcgccaagatcgcaccacttcactccagcctgagtgacagagcaagactctgtctcaaaaaaaaaaaaaaaaaagaaaaaaagaaaagaaaagaaaaaagaaaatgagtatgggaaaaccttaccatttgctcaagtcccagagaatatgaaagaatctatatcacagaaaagcttcttgactttaacagcgagttagtttgtgtcgtgcatgtggcagatattaaactgtgttgatgagtttggtttgaggacgtttacagtggaagaccacccaggaaatgacttgtcttgggctttaatggggggtaaatacagagaaatatttacttaggtgtagcatttactttggtatatagcaaatgcctattaataagcacttactgtatatagttagccctctttatccatgagttccacgttcacggattcaaccaactgtggattgaaaatgttaaaaaaaaattacaacaataagaatgatagacttaaaaagcaatagaattgaataactatttgcatagcgtttaccttgtattaggtattataactgctctagagataaagcatacagaggatgtgtgcagttatgcgcaaatagtacgctgtctttctctttgtttgagatggagtctcgctctgttgcccaggctagagtgcagtggcacaatctcgggtcactgcagcctccgcctcctaggttcaagcaattctcctgcctcagcctcctgagtagctgggattacaggtctggccaccacgcctggctaatttttgtatttttagtagagacgtggtttctccatgttggtcaggctggtctcaaactcctgatctcgtgatccgcccacctctgcctcccaaagtgctggcattacaggcgtaaaccactgcacccatccaagtacactgttttatatcaaggacttgaacatctatagattttgagggtcctggaaacaatatcacggcagttatcaagggatgactatacacccaatactagcctggcctggtgcaatccattttctgtaatcccgttaccttaaagaatggcgctcttacccttgttttagccatgtgaacttatgcttaatgagactaaagaatttgcccaggccactcacctaataaatggcagaatcaacatccaaatccaggtccacttaaaatcccttgttcttgaacccatatgaatgaaattaatatggagaataccttccacattgtagacacactgcaagctgaagtgagaccagggaatcagaagtgacattgtcactggcctctttggtttagcatcctggggtcttttatcttggctacatctgtcccccgcatcccttgactgtactctaattttagaaatatagttcctgaagtaaagatattgaggaataggtatctgctgctcttgtttcctagttctataaagctaattcccatataaaccacatctaatggtagcatcattggttacaggaggtgaggcaagaaaggaggcacgttccaacttaacatcttaatctaagagcataaaattattacctgtggtctctggaattatacaccaatttccaccaccactttaatttctttttcctttttcagtcccctctttctgctactcagatgattgaaaagtgataaaaagttggtagaagtcataagattttctatggggtcttctgtcgagtcaggcattaaaaatgtgtcttacattgatgaaaaactatatgtgatgcttaaactctgtatcttccaaggaataaaagaaacatctgggctgggtgcggtggctcacgcctgtaatcccagcactttgggaggccgaggtgggtggatcacaaggtcaggagatcgagaccatcctggctaacacggtgaaaccccatctctactaaaaatacaaaaaaaaattagccgggcatggtggcgggcacctgtagtcccagctactcgggaggctgaggcaggagaatggcatgaacccaggaggcggagtttgcagtgagccgagatcgtgccattgcactccagcctgggtgacagagtgagactccgtctcaaaaaaaaaaaaaaaaaagaaaagaaaagaaacatctgaaagatgtgaaagaccatgctacaatttttttttttaaatcttggatctatacttttgtgatcagaaacttttctgaataatggatggatctactaatggaaattgtatttctagtggtaaaactgagtttgatgaagactacatccttaggaggctgaggggggaggattacttgaggccaggagtttgaggccagcctgggcaacacagcaataccctgtctctacaaagtttttttaaaaaaaataaaatgtaaaaactttaaaatatttttaagattacatctcactaaaaagtgcaccttgctttagtgctgggtacagtataaaacagtgtggcccatttggacagtagtttagaataaaaatttaaaagtcttaataactcatgtctgacacatgctacctctgggactccatcctaagaaaataattctaagtagaaagaggcttttgtacaaacatttttcaaagcagaatatttttcatactgaataatgttgtgaacctaagtatcaaagaagggtgaatggtgaatggttgagggagtctttttttttttttttagatagagtctcactctatcacccaggctggagtgcagtggtgcaatgatctttgctcactgcagcctctgcctcccgggttcaagtgattctcctgtctcagcctcctgagtagctgggattacagtcatgtgccaccatgcctggctaattttgtatttttagtagagatggggtttctccatattggtcaggctggtctagaactcccaatctcaggtgatcctcccaccttggcctcccaaagtgctgcgattactggcatgagccatcacgcccggccaaaatatatttttaaaagtataaaaactgtgtgtgtgtgtgtgtgtgtgtgtgtgtgtgtgtgtgtgtgtgtgtataagagatgaggtctcactttgttgcccaggctggtctcaaactcctgggctcaagtgatgctcccaccatgccctcccaaagtgttgggatttacaggcatgagccacggcacctggccttttaaaaaaatatatattttttgctttttcatttttttatgtttaatattggatgaaatgcaatatgttatgattgtagctctggaagtaaactttatatacttaagaacatttctagaaaaaatagaaacatcatactctcaaggattgtgtttcagttgtacaggtaaataaatgtacacatttatttacgtgtatttttaattcccataattccacacaagaagcaggatccctggtatcactaaaaattaaagtggatgtcattcgagaccagcctggccaatatggtgaaactccatctctactaaaaatacaaaaattagccaggcatgatggcgggtgcctgtagtcccagctacttgggaggctagggtagaagaatcgcttgaacctggaaggcagaggttgcagtgagctgggatcgtgccactgcactccagcctgggcatcacagtgagactcagtctcaaaaaaaaaaaaaaaaaaaaattacagtgaatgtcaataactggcttccaaatatttaactccacctcatgtctattgtgcctatatccagaatttggttttcctttcccaatctgcaaattgtgactagaccatagtaacatcagggatcttaagtcagtcttaacccagacaagaggcaggtagaacaaattaacttcggaaaatttggaaatgaaaatgggttctctctactccaactcccctgtgtcttctctggcaagtccaggtagagagcgcattgaatagggagaaactgctcccttctcctgagaggtcgaaataatttttttaaagaataggttaagccggacgcggtggctcatgcctataatcccagcactttgggaggccaaggcaggcagatcacctgaggtcaggagttcaagaccagcctgaccaatatggtgaaacgccatctctactaaaaatacaaaaaattagctgggcgtggtggcgggtgcctgtaatcccagcaactcgggaggctgaggcaggagaaccgcttgaatgcaggaggcggaggttgcaatgagccgagatcatgccattgctctccagcttgggcaacaagagcgaaactccgcctcaaaaaaaaaaaaaaaaaaaaggaaaaaaagaaaaaaaaagtaggttaaaaggaatatcacatgaaaaactatgttactttgtatatatcatgtatataagaaatacatagaagaggccaggcatggtgtctcgtacctgtaatcccagcactttgggaggctgaggcgggcagatcacccaaggtcaggggttcgagaccagcttggccaacacagtgaaaccctgtctcttctaaaaatacaaaaaattagctgggcgtggtggctcacgcctataatccaagctactcgggaggctgaagcaggagaatcaattgaactccagaggaggaggttgcagtgagctgaaattgcaccactgcactccagcctgggctacaaagtaagactctgtaaaaaaaaaaaaaaaagaaaagaagaaaaaaagaaagaaagaaatatatagaagcaatccacttgcccataatgggaaagaaatacaataccacttagaacaataccattttcaccatttctgagcttacctgtttctttcatcttgtggataaataggtattagctaaagagagaataaatgcttatctgtaaattcttttggtttgatttgtttttttcttttttttgagacagggactgactttgtcccccgggctggagtgcagtcgcgtgatcatggctcactgcagcatagaccccctgggcttaagtgatcctcttgccttagcctcccaagttgttgggagtataggtgcctgccaccacacctagcctaatttttgtttttgatttttagtgagaagaggtcttgctatgttgcccaggctgatcttgaactcctagggtcaagcaatcctcttgccttggcctcacaaaatgctgggattacaggcatgagccaccactcctggccctttatctgtaaaatttcaaagcatcaaataaggaaagagatcttaattaatatctttagtagctgaacaaactcaagtaggagaaataatagaagaaaaagtcattgctttcataattcgttgcagccatgaatgagagttgctatagttgtagcatattttccccggctcttttctcattcaatgattgtacctttcggaattatgtctttaatgattaattaattaaagtagatgtttggggtagcaaggcagtgactaagtcctttccactgaaacggaagaactggggattttattcatgtttgtgtttcctgatttacagttgctacaagcgccaatgttgaaaacacatatttccgtggctcttcttcaccttcattacttgtagtgctttcaaagagaacaatggcctttttctagttcagaaatgggtgttatgtagctcacagctgggagatttcaagtgttttgaatacgaacaagctgttttgtgataaagaaccagtgcagaggggaaaccaacaatgattacagtagttattcagtatgtctttgtgtttgagggaaaaaggagggacagtgttgttttgctcttatttttttccctcttccttttcccactttagacaaagcccgttgcatttgcggttcggacaaatgtcagctacagtgcggcccatgaagatgatgttccagtgcctggcatggccatctcattcgaagcaaaagattttctgcatgttaaggaagtaaggagaataatttcattttctaacagcatgatgtttcaccttgacataccatttcttatttcctattcatatgccgtttctgtgaagtagcattgcacatcgctgcagttgtataacacacataactaaatcaatggctctcaacctctgctaatataaatataccttttaaagtggaaagaagtcacaggcctcttgcaataacttcagcgctccctggggctctgtggcccagaaattgggaactgctagagtagatgatccttttttatgcttaacctatacttttttttaatgtttcaccttgactaggtgtagtttttcctgatgcctgaagtctaggcatctggggagggtttaataataatatctagaattcatgactcttctctctgctgacagtgtctcaatacaaactactgatgacctttttcctccttaaatgctaaatttctgcagtgggtgagagaatggtaagaattgacaccaataaggcaacaaagaggtatcaggaaaagtccttttcctacatgctaaatgtctccaccttctagtgagcaatgacacaacctgcaaattggaaactttcatccttaattaaggtttgtttggagtcaacatttatcaaatgcctgccttgtggagcactgtgtaaactgaccagaaatttcccctgtagaatattctcagtgtgtgatcctgaggtttttcttggacctgaaggaatttatacttggagctcttccatctagggtatatataatatgtcataggaagtatgtgtaaatcgaaactcttcactgcactaaaggctgtcagcaaaggagttgataactgccgattaaaagaacctagggctgggcccggtggctcatgcctgtaatcccaacactttgggaggccaaggtgggcggatcacaaggtcaggagatgaagaccatcctggccaacatggtgaaccccgtctccactaaaaatacaaaaattatctgggtgtagtggcacatgcctgtaatctcagctactcgagaggctgaggcagaagaatagcttgaaccagcgagtcggaggttgcagtgagccgagattgcgccactgcacccgagcctggcgacagagtgagattctgtctcaaagaaaaaaaaaaaaaaaaaaaaaagaacctagaagcctgggtactatggctcatgcctgtaatccaagcactaagaacctagaagcctgggtactatggctcatgcttccaagcattttggaaggccgaggaaggcagatctcttgagcccaggagaccagcctgggcaacagggtaaaaccccatctctaaaaaaaaaaaaaaaaaaaaaattaacctggtgtggtagcatacaccggtagtcctagctactcaggaggccagtggattgattgagcctggaaattcaagacaggagtgagccaggatcatgtcactgcactccagcctgggcgacagagcaagaccctgtcttgattaaaaatagaagagcctagagaatttagagcctaccattttggtaacctctgaaaagagatgtcaaatactggctaggtgggaacaatagaaaaagttatcagctgtgcctagaatctcactttacaccaggaagttagattattatgaggtctcttcttgatgattgatgctgaaagggggatctttccaccatgaaaggaaaagaaaaacagaatgtatattcttcttcgacgtgttcaaggacagatttattcaatcgaggaaaaagaaggcaaatcacaaagatttaagatacatattccacctgcaagacataaattgtcaacatcacacaagtagagaaatcatctgtgaacatcgcattgtatatttataaaactgtttgcacaaaggtaaattgtcctgtgacatgaaatatttaaggtacacttcaatatttatctctttctctcaataattccaattggtctgattatataaggggaagatttctgtaacagtacttcctaaagatctcttggtaggatgggctgttattctttgaacccagagagcttatccctactcatggtgacagcagctgctgcaagggaattcagcctggtcctacggcagcaccaggacagacaaggaacgcagagcctttgatagattgctgaggacgctaaatgcatttcttacatgtgaaacccatgagccgaagggtttcttgaatgataatatttaaggcatagttaatggtcattgccatatttctctcgactgaaaatagtgtggaagaacaaggatttgaccttctgtgcactgatttttaatgcttttgattttgtgtttagaaatttaacaatgactggtggatagggcgattggtaaaagaaggctgtgaaatcggattcattccaagcccagtcaaactagaaaacatgaggctgcagcatgaacagagagccaagcaagggaaattctactccaggtatgagacagatgtcaagtgtttgcataaaacttagattataccactatctgtgtactgttgtctgctgtattctgtatcctttattatgtattaacaaggaggctggtaatatggtttattgatagcatcacaaatcttgcattttcctgcatttaaaaaacttcagtccagcacctgattttcaccctatttgggaaagtgtcaaattattatcattaatgaaaagagctaaggtcatagagtattaaattcaggctccagggcagaggaaaatctgaaaccttaatcatttactgaaaaatagtctggcacatcatagccctggtgactaatcccactgtctgtagctgcctggtatggctgggagatgtttgagagatgacattctcagacatcatcaggcagtggcagctcttgtcatccgttagtttcattttcacctgagaaactcaattttcagttctacccactgttaagcacttaaagagaagcgaagtatgaaacaagttaaaactgcctgtgcagatggcaattagatgagttatgtaagaagctggggctgaataatccctcctaggatttgtgaggttgtctgtccctctctgaaagaatcactagaaaggcttctcgtagatgtactgaattttccatggaatcgtatgcagacgggtctaaggacgcagcatgcctctcccaatgtgaaaggatgggacatgggcaaggcctttcttaaatacgaatcgctggatttctcttttctccatcttacatcttatttgtttatctaagatgcaaatccctttgtcagtgataatactttactgtgagcaagtatttttttcaagcgtcagcagatgagtgaaacagaatatgctttgtggtttggaacacccatcctcattaactggcttttcataattgtcaagttcatttagttcagacggattcctctgtgttttgagacctccaccccagaattgactttcattaattcctgggttattgagagcactcagatggtgagatgcattcagtcatataaaagtagaggcatgcataaaaaagaacaaagattggccgggcatggtggctcatgcctgtaatcccagcactgggaggccgaggcagacagatcacctgaggtcaggagttcaagacgagcctggccaacatggtgaaaccccatctctactaaaaatccaaaaattagctgggcatggtggcgggagcctgtaatcctagctactcgggaggctgaggcaggagaattacttgaatctgggaggtggaagttgcagtgagcccagattcgtgccactgcattccagcctgggcgacagagtgagactctatctcaaaaaaaaaagaacaagatcatgtcttttgcagcaacatggatggagccggaggccattatcccaagcaaactaacacaggaatagaaaaccaaatacgggggccacgtgcggtggctcacacctgtaatcccagcactttgggaggctgaggcgggcatatcacaaggttaagagattgagaccatcctgggcaacattgtgaaaccccgtctctactaaaaaaaaaaaaaaattagctgggtatggtggtgtgtgcctatagtcccagctacttgagaagctgaggcagagaatcacttcgaacccgggaggcagaggttgaagtgagccaagatcgcaccattgcactccagcctggcgacagagcaagactccatctcaaaaaaaaaaaaaaaaaaaaaaaaaaaaaaaaaaaccgcatgtttttacttataagtgagagctaaacattgagaacatacaccaggaagggaacataagacactggggactacttgagggtggaggatgggaggagggtgaggatcagaaaaaccacctcctggggcattatgttcattatctgggtgacaaaataatctgtacaccaaacccctgtgacatgcagtttacctgtgtaacaaacctggacatgtaccccgaaactaaaagtaaaaaaagaaaaaaaagttgcctgtaaagataaccctcttaggattaaaatactttactctgaattaagttatcattatcattagcagcagtaaattattcattagaccaacatacatataatgcatattttgatatgcaatattaaatattaaacttttgttgaaaatgcatttcttaatgagaaaaaaaagtaaagacatgcagatgaacagcgcatgtgcattctgcctgcagggtgtttgaagacccgataggattctttcaatccttaatgttccattggccttattttgtgttttcctaccctctgtattgaaaatggtatcataatactagctaatgaaaccttatggccaagcacggtggctcatgcctgtaatcccagcactttgggaggccaaagcaggtggatcgcttgaggccaggagttcgagaccagcctggtcaatatggtgaaaccctgtctctaccaaaagtatgaaactagctgggtgtggtggtgcacacctgtaaccccagctacttgggagcctgaggtatgagaatcacttcaacttggaaggcggaggttgcagtgagccgagatcatgttccaacttgggcgtcagtgaaactctgtctgaaaaaacaaacaaaaaaaagaaccaccttatatggaaacattttgttttaatagggtgtagacattgctcctgtcaactaggtagtatatcgtttgttgaggtttgaagttatcccagctgggggtgttttgtttttagttaggacaattcagcatttttcagaattttcttgtcaaatgacttgagaaaggggttccaagatgaaataaattaaggatagttctaggtaatagaaagttacttcaggatttttttatagccttttaatgtcatcatgtacactgtgaatctctggtggaatgggaatttttttaagtatagtatttactaaaattgctttctcataaaaactcccctggctcatgtcttaggaatagtgttttgtagaatacattttggaaaatttgggatggatttttgcagaggcaggcttgtgtgtctttctttgcctcttcatatagaaactgagaaatgagaacaacttcaaagggagtagaaatctttcccaaaattgtttgagaaatgtagtctcctgtgtctcccaaatgggcttgcctaggctaacattagtgctccactcatctttgtaaggacctgtgggagcagtgggtattagatcttacaggtcacagatgagaaaacaggttaagagaagttagggaacttgatcgaggtcgcagagctagtaagcgtcagaaccaagatggtagcctgacctccacgctgtacagacttccatgctgcactgcagattaaggagccaggtcttgcctggcacagcaagcccaggacagatggttattgccatctgttattatttactttattagatatgttgttttgctcttgcatttttttcccttaggactctgagttatccgtatttgagggaatgtaacatctcagaacttactccagagaactagattaccttttcttacagccatatatcttttcctttgattttcttcattttattttggcccaagattttgcctaagtatgtgaaaatacttttacttgctttcataggtttttacatttctctccttttgtgtgtgtgtgtgcgtgtgtgtgagacagagcctcgctctgtcacccaggctggagtgcagtggcgcagtctcgactcactgcaacctccgcctccccggttcaagcgattctcctgcttcagcctcccaagtagctgggactacaggcatgcaccaccacgcccagctaatttttgtatttttagtagagacagggtttcactgtgttggccaggctggtctcaaactcccaaccttaggtgatccacccaccttggcctaccagagtgttgggattacaggcgtgagccaccgtgcccggcctctcctaacattttaaatgtagttttgttttgaggacataaccagaatccggcagtctttaaaaactctgatacagaaattataaaaattgacagaactcaatggaaatggaattggggtaccgttcaagaacttggcattttaatagaattaaaagtcaaggacaaatctgcatcctggtcattgtcaccatttgcagcatttgtcacaattttacataaataatattttggctgttactaaaattcaaagggaatataaaacccatgaacttaaactgaaattagacttaatacttcagaaaaaaaaaaaaaacttctggggaaaaaaatgttttggtcttggtaataggtccttgtataactgccagaaactgcttctatagatatcacttgtcattaatttcacatactgtctgatgcccttattaaatgtatttgagtatctcttaagaaccttaaaaagatatacagccctcctgctaattgcctaataaagtttttgatgtttatgcattaaaatgctagaacagtagcaataacattcagcctgttactgatactttaataaaacttttatttccatattaatatttacgtaagtaaatattgccctttgatgcataaacactgtagcaaattctttcaactagaccctggctcggccataataataaacattaggcagtgagatcattttgcccaaatgtaaaatgttcttcttatcttcatctgagagaggggtcattcggtaacacgttatttagcatgctagtaggctggtgaaaaacacaaatgctgttgttctaatattaactccaatgtttctgagacactgcagtatatcatatcaaactttcaaatttggtagttcggaaatgtatgatcttcaaattattcctaaattaaccacgtttcattctccacgtgagtcacgcttgagaagtattctgggtactatctgatggctacatcatatcatattctgtttagtcatgtttcttcgtgtgtccgttagtggttggcaagttttcatatggctctgttgttctttgatagattgctcatgaaagcgtgagtgctttcaatcttagtgtactattaataaaataagcctaaaacagaggagctgaaaccaaacaagaaggaaatattaatcttgggtgttagccttaaggttctgtgcatcgcctctgagggtctctaaaataaaaagcaaaataaatctgtgctatttcactgtctgtgatctgggcaagtaacttgggggctgcagaaattacactggttctcttccattctctcaggtccttttaaaattaaaccttgaatttgaaatcagagaccatcatgtggctatttcaagtactccaggaatctccactgggaaatattgttttcctccttaaatgaaagataaatttaaagttgaataaaaccataatgaattatgtttactgaataatataaatgtttgaggatgcgaaataagtgtcagatttaatagaaatttttgctttactccagtaaatcaggaggaaattcatcatccagtttgggtgacatagtacctagttccagaaaatcaacacctccatcatctggtaagtaggtgataaatgctgaataatacatactgcatttcatgctttccccagctctatccagttttgtgaatttacgtatacactgaatcactatgttaaccctacagatgttaaaaggaatcagaagtgagcatgcccttttggagttacaaacaatatggggaaatgtttttttctggctggaaaaagaagtatgtcaaagtgtttacattgctgtagatgatcaaagtgattaatgtatttatttatttatttatttatttttttgagacagagtctcactctattgcccacgctggagtgcagtggcatgatcgcagctcactgcgcctctgcctccagggctcaagtgatccccccacctccgcttcccaagtagctgggactacaggtgcacaccaccatgcccggctaatttttgtattttttgtagagatggagtttcaccatgttgcccaggctggtctcgaactcctgagttcaagcgatccacctgccttaggctcccaaagtgctgggtttacagatgtaagccactgcacccagccatattaacctttaatccctagttcctgcgatggtgcttgtcatgggcagtaaatgggtgaatacttgccaacaaccatagcacaatgtgagatataaccttaacattaaacagaaggataaaaactttagaaaggtaaggaacagagggtaaagtgaagatagaggattggcctgttgtgggctctaccagaaaagttctgtggaagacacagacaagaagtatagaaaaaagatgaaaatgtgtgtgggaacagtaactactgttttctttccaaagcagtgggttcatcctaatggttgctggataaaataaagcacacctacttaaatttgaatttcagataaacaataatttactagtttaagtacatattgcatggggcatacttacactaaaaatgtatggaacatacttatgctaaaacattgttttaaattcaaatttaactgcatttatatttgctaaatctgggaactctcctattctgtgtagaacatggaattctatatagacaggagactaatgatttgaattgcaaaaaaaagcacatgatcagtatcttagtttgctaagagaattgttattgggaatcagagtaagactgtaaaggttgactgccagggtgtttcagcaaaatgatactgtgtgtgatttctagaaagctggaaatgggaagagataaaaaacagagagttgtacaactatgcagaaatcaaagaactagtcacacagtgactgatgtgctttaaggacaggatttctctattactaataatcagcttcattcctgaatggtggtggcctttagagaccaatcaaggacttcttagcaaaaactataggattttttttttttaagagaaggggtttcactatgttgcccaggctgttcttgaaactcctgggttcaagggatcctcctcctcagcctcccaaactgttgggatgacaggcatgagccaccatgcccagccattggcaaactaagatactgatcatgggctttttttgcaattcaaaccattgttctgtttatatagaattccaagttctacacagaatataggactttcaagtgagcaaaatctgagcacaataaatgaattgctttaggaagcaaattaatttcaaaaactatctacttataacttgaagcaagcaattctaagatgctcaaaattaagtaaaatagtatgcatgaaatgaaaatgaaaggccctgtaggtattatgtgaaacttataccttcccttgataattacggagcccctgaatccacagaggaagggaggcctatcctgttccttctcaaatgtgtgaagttgcagggattcctatataaaccttacactcttatatatctcaaagatgatttcagtgatttctagggactgctactaggctcttaaagtggaaaaagactatgtcaccttgcgataaagcagcagttctgcctgcaaatgtcagcctcacttctttctatataccagaaaaattcttccattccctccagccatattgtagccctccagtggttttggcaacacagatgctccccaacttatgatagagttacacttcactaaacccatcataaatagaaaatatggtaactcaaaatgtacttaacacgtggacagacccagtaaaaagtctgacgtcaaaccatcgtaaagttcagaccttgacttatgataaggttatgtcctgaaaaatttgtaataaacttgcacaatcttaagttgaaccagtgtatgtcaaggaccgtctgtatagtgaaaggaggtgctgcattttgaagaacaagttagtatacatgtaaaataacattccattttgtaggcagatgtttgacattactaaaagtaaagttccatgaagagtgtaatatttaaaaaggtgatttaaatgttcaccaaggttttgtagagatacaccaactttcaagtgacttttctggtgactgagtcacttggagctataaccaactacaaaatgtataataagcatattaggactctgagacaatttttatatcaatagctcaactgatttaaaggaaaacttcagaaagctcgaaagagaagttctcccaatccacctccaggcacaactgctccaactatcaagtgtggatgggtctgtaatgatcattttcatcgtttccaaaggtctcatctattattctcctcactcattgccagaccaaagaatataagtatctgcctaaagtatatatgcttggatgctgtcaagaacttggaaaatttcccacttgacatctgggcattggtgtcatagccagttgcagaatacatacatcgcacccacacacacgtgtgtacatatgtgtcaagcccaagctctgcttaacttgacccaaacctttaacaccaaaacttaaatttcaaaaaattgttctcggtgccatggtcacgcctgtaatcccagcactttgggaggctgaggcaggaggatcacttgagcccaggagttcaagaccagcctggacaatgtaagtgagaccccgtttctaaaaaattagctgggtatggtggtgtgcacctatagtcccagctacttgggaggctgaggtaggaggttcactcgagtccaggaggttgaggctgcactgagccatgattatgtcactgcactccagcctgggccacagagggagaccctgtctcaaataaataaataaacaaacaaacagaaaaaatgttcccaaggctctctatcactaataataatatatgcatgctagtgaggaagaatgagacttttcaaatatatgaaagcagttctttccaagtaaatactaatgtttgctaaagcatggaaatataagtatgaaatttaaaaagagtaacatttctcattaaaaggagaaccatctgagtctaataaaatacatgtagctgaacagatttgaaaatgcttcttaactgccttggtaagtttctttaatatgttttgaaagtgaccacatgtttcagaattctacgtatttcaaaatgaactcagatgtttttagacctgagttaaccaaatgtcagaactagtacattatagaaagttctcaatttgggatatccagccctcatgtccagatacaggtaaatttcaaacctgactcaggctatgtgtgtggaaagccaaacacctgggcaacgttgcagccaaagatgtatacgtttccactctttctttgtttttttttgagatggagtctcactgtcacccaggctggagtgcagtggcacaatctcagctcactgaagcctccatctcccaggttcaagtgattctcccacctcagcgtcccaagtagctgggattacaggcaccggccaccacacctggctaatctttgtattgttagtagagacaggattttaccatgttggccaggttggcctcgaattcctgacctcaagtgatccacccaccatggcttcccaaactgctgggattacaggcatgagccaccatgcccagcctcactcttattttaaaaaacaaaaatacaactgatgatcacagcaggctagattcaatgggcaaatcacaaaattcaactcatgaacttgactgtccaagggtcctgtaaattctgacatccaactggttatcttcattttaggagagccctcaaagggtactatcccttgaatgtggtctttatgagcccaataaaagatgagaaagataaaacctgtgggaatttaccaccagcaaggaaactcttgattttggttaacatgtattgtaggaataatgaattcctgacgcagattttgtccttcatatccaggaaagcgctgacaacatgctgcttgagttgagattcaaggaaaaacatttctgaagagttttctgagactcttgcctggcttatgccattcaataagccccataaggaaactttcctatatgagcaaaggattagctataggatggtataaaagtcagcactggataaagccctaggcacattttatgttttctctacataccacatgttaaaccttttagcacatcagtatgcatagatggggcaaagaggaagacatacttactatattaggtctacgtaattaggactgaattaattccattattaccttttttttgatagaaaatcatacctcctgcattatgcaagcaatagctgattatttgtaatagtgtacaaacaatggcaggtattcactccatcacaggtttcctacctcaccaaatgaaaaggaataattaaataagagagcctagttttcaaaaggctgcttcatttaatattcataacaacttcaaaactgaaaaataatgtaatgcctgtcagatgatcttccatcctttgaaaaggttagaagaagctgctgtgagcagttcagcttgtgtatcccagggaatggtagctgtattgtaacaccaagttgtctgttatttcaaactggtaatttgttccttccttcaatctaaatgtactgtggtttttgttagagagctaacatgtataatatgatgctttcctgcagtgagtaaattttttttcttctccttgactgattcttaaccgtagaataattttctagctagtccagctctatgatgtcatcctgactcctgacatcaaggacatgaccccattgaggatgtgaagggaactgaaagagggcacccagattgagaagggacttcgcctggatgggcagtgtggtatagggacggttacagactcatttaggtgggcactgtggtatacggagggttatagactcacttacgcaggaggagtaggtctgaatcctgactgccaagtttttgccaagaacaagtcccttaaattttgagttttttaatcttaaaaataagagccttgaagttgatctttatttccatctctgactctgcagttgataaaattctgtagctatttcaattgcatgtggaaggattttgtaaaatttgaagtgagattatgcatctttttttcttgtaacactttttaagtactatattttcaggtggaacaatgggaaaagtaaatcatgtcaagcaacaaagctaaacctttcattttacagatgaggaaaccagtggcatatcctcttgggtcctcgtgcccttccactctgcctcttttgttaaacccagtggctttgcataagtcaccagaagtcttccaatgtcattttattagacagatttcactcggatatcttgggacccagtgttttcccattagtcttcatcagcctaaaatcatcttaatcctgtccttcctggagccctccctgaatcattggccttgtgtatgactcctttgcattgactggattgagaattttccattctctctttttctcaaatgtctgttgcaattttagggaaacttttcacactgtccttatttttacacaaaatctgcaaaaagaaaaatctttttttgcacattgtattgttggtgcaaatgtaattgcggtttcggaccatggattttaaatgataactaggcctaaatacatctttattaatcaaaataggaaacactacaatcaacacatttttgccaaggagaaataagtgtgtttattcctgtagcataaaactccatgctttgggattcggcaaactcttgaaaagcactttctgcatcctgctggttgtggaagaattttctctgcaaaaagttgtcaagatgcttgaagaaatggtagttggttggcaagaggtcatgtgaatatgatggatgaggcaaaacttcgtagcccaattcattcaacttttgaagcgccggttgtgtgatgtgcagccaggcgttgtcacggagaagaactgggccctttttgttgaccgacgccggctgcaggtgttgcagttttcgctgcatctcatcgatctgctgagcatacttctcagatgtgatgttttcgctgggattcagaaagctatagtggatcacaccggcagcagcccaccaaacagtgaccataaccttttttttttttttttttttggtgcaagtttggctttggagcttctcagtccaacagctgagctggttgtcagtggttgtcatataaaatccaattttcgtcccacgtcacaatccgactgagaaatggttcattgttgttgcacagaataagagaagatgcttccaaacaacaatttatttttgcttggctcatgaggcacctacttattgagttttttcacctttccgatttgcttcaaatgtagaaagaccatagaatggtcaatgttgaattcttcagcaacttctcgtgtagttgtaagagaatcagctttgattattgttcttgagtagtcgctgtcaacttccaatggtcagccactatgctcctcatcttcaagtccctcgtctcctttgcaaagcttcgtgaaccaccaccgcactgtacgttcattagcagttcctgggccaaatgcattgttgatattgcaagttgtctccactgctttacgacccattttgaactcgaataagaaagtcactcaaattcgctttttgtctgacatcatttccatagtctaaaataaacataaacagcaagtaataagtcattagcaaaaacgcataaagcgagaaatgcgcattaaaatgatatataacataaccacatttatttaagaatgtattccaatatcaaatggcaaattccaacagtgcaaaaaccgcaattacttttgcattcacctataataaaggttttcaaagtagttgtttgttatctcaaagctggtttaagatattgtaatgaagtcaaatgttctgtactgcacttttatacagttgatacagagaaaatcaacattatatttgaaactacagatttaaaatgtttctctgaaaatattcaagacgtctagcatgaaactgattcattcaagcaaacagattataagtgtatctttcagtttcattagatttgattaccttgcattcttaatgtgccttacctttaaatttaattttcttgcgtactgtgttgagcactcatgatagttttttttactatggttagttttatttgctttcattttattttctttataacctatttttcctctcctgtccacctgatttttgaattgtctgtatatagctatagacatagatgctactggcttagatgcagaagaaaatgatattccagcaaaccaccgctcccctaaacccagtgcaaacagtgtaacgtcaccccactccaaagagaaaagaatgcccttctttaagaaggtaacattaacttccaagctcccattgtccacctgctcaactgcactgcgtcacatttctagtcctgttgactgtctgcgtcctttgataagccaataacgtgcatgctctgttatttgtttcttttccatgctgctgtagctaagcagaagcagaaatcggtaagtttacattgacataagctgtgtttatcctgccactggcatcattagcattaattcccacagttgtattaaatacaatcatttctgtcccaagcaaagaacctatcaacagctaattgagttcatgcatttcaaaccaactaaattcagggagtgacctgttaaaacaccattacagtacttatcctttttgatggaataatatctaccaccaagggaatttgtttcaacattcagggatgtcaaacactgacagctccacataatgcacctaaattgtgcatgcttattctatctctttcttttatccagaaatttaacttatgatcaaacatattaaagcagttattaaattctgacttatgatatccagatacatagcttgtactaaaaaaaaaagtattcaagttttaatttagtcagtatttaaacttctaatccactaggtgcaaaatctgcagatgaacaagaccagtggaaaactgcaggcttgttttggcggtttactgtgagtttttcctattgtcatatataaatattctcccgatgttcttgccttctccatcagtcagattttaccatctcaccctttggacagtgcagccagtggtcatgcgtagagcctttgccattggccatccaagatgctacacagcgaggctccttgtcccctaaatggaaactatagggtattcctgagctctccttacttcagacaaagccttttcctcacccattttgtagctttaaagcattattttttaaggaccactaacctccccccaaatttccctttttttcccctcttttacccatcagtttccacagctaccatgctgtcttttagaatcatactaatgtcgccaagtctggcaaaaccatggatatattctcacacgcagatgtgatgtcaaatctgtctatcctctgcccccaaactctccacataatgaacacttttcctctgcaaacatgtattttggtttgtggaggaactcaagtcattaatgaggtgtcagatacagaactgtaaagttggctttttttgaatcaattatgattattttaataagggaaaacttcagcactctgggcaaaaattgcaacacttggatttttgtgttaacatagcctcagcttgatgttcacccacaacagtgggcccatttctggggtccgatcttcttgttacagctaaagcttgcagccaagtgactaacagtgtctatcattcagaagcttagaaaatcggcatcgctaagacatttgggccttgacggagcaggaatgtgagctaaaaccctgtttgtcaagataggtttgtgaagtttgcttacctttaaattctaaaactttaaaaacttttatcacaattttttcactaaataatttgagcaggcagggcgcaatggctcacacctgtaatcccagccctttaggaggctgaggcaggtgcatcacctgtggtcaggagttttgagaccagcctggccaacatggtgaaacctcatctctgctaaaaatacaaaaaattagcctggcatggtggcaggcacctgtaatcccagctacttgggaggctgtggcagaagaattgcttaaacccggaaggcggagattgcagtgagccgagaccatgccactgcactccggcctgggcaacagagctagataactctgtctcaaaaaaaagaaaaaaaaaatcaagctaaatggggttaacagggaagagtagataaaaatgatggcgtcattcttcatagggcacaaagcaccaatattccatcaaataaggtaatttctgtagctaccctattgattaagaagctgattgattaccagcaacgggtgaccctttgctagttggcagttacagatcgaaggaaccaaagacctatcaaacactgggccacttcagaattaaagtcttgagataaaatttcttggtagctgttactaaaatgcaggaaatttacattcataatttcaacggtggaaaaggtgttcttacaccgcatagttatcaggacttggcttctaaacgttttcagtatgatcccaggtggtataaatgaaatagtttaagaaatatgcttatgatgccttcggcactggtattcattcttcttatgttattgataatgtggttaacatcaatgtagaattcaaaaacaaaacaacagcctgagattcaatgagaagatcgttttctatgttttaggttgcttttagagtggtgcttgtgtggtacgtgtgctgtcactgtattatgtttgtcttgttttttttttttctgttcaaaactgtattctaccttgattgtgtcaattaaaattaattctgaatgctaggtgaaattttaggcagtgaaatttgacagcacagtcatggtaatatttttcttccctctgattatatcgtctgtgactacgggtaaaatctcagatggaagcttttgaatttgaaatgctttttaattctcccctgaggcaatgtgaattcaaatgaagccagaaaagtttgtaatgggcaattttaagcaacaataaaatgttcttgagtgacgggcagatgcaaaaatgacattcatatctgcacatcagtgtactgaattcttaaaatcatttacagaacatttttctgttggtgtgtgtgattctcaagttatattttttgacactccttagccagaaagattcatatagcaatgatttgcttatcgcagtgtctaaggccatatcactcttatgcatttttttaaaaagtcatttttgggtcaatttagcattttatgctatcaaaagagccaattttaatataaaccaatttgctgttacctaatttttggaaagatgttattttaccattttatttgaagcaattaacctgaaaagtgttgacagttttagaaattgctacaaaatttagctcctcccctcttattaaaaagaaataatttactgcagaaagatgtcattagttatctgacagaaaactacttttgagaatcatattagatatgcacattgataatgaaccttttgagaccacaatagcatggttgaatatattattatacattaatcaccttccctcgaagacacataaaccttacctttgaagtaccaaggtatagaaaccaaaaaattcaatagcattaatcactaagctgtgagcagggatcatgattactgtttactaaaataagcatgcatgttcatttaaactctcacaataatatagaattttgacagtagtgagagttacaatattttgagattaggtaaaaagtattggtagtgagagttataatattttgaaatgaggttttacacaggtaagacaaaaacctaagatgcaaaggtaatgcaatctttctttcctctgtaattaaccatgttaggtctaatcactacaactctttagaaaattcaaatgcagccgaaaagcaatattaacttctagtcaagcctaaagcacctatcttgcatgaggcatgtttctctttgttctgtcaactagtttttgttcaaaagcagcatctcttgctttaggaacgaataggtctgtagcatttcttgagatgagcaagaagactgtagacaacagtaacttgaaacttcaggaaaatgaacccaccaatctttgactgggtttatgtagaaaagaggcaagtggggaaaataaaatgtctggaaagccagtgcctcatattatggagttcagaaagagtaccttatacacaaaatatttatgttctacctgcctgtgaaacgtctaaaagcctctcctctctctgcagacagagcacactcctccgtatgatgtggtaccttccatgcgaccagtggtcctagtgggcccttctctgaagggctacgaggtgggtagcagccttccacaggaagcttaacttgcatgctgaacttctttgtgatgctgcctcctactcccgaccctctctctgaattttacagcttaaggagccaactttagagcttagagagctcacagcagcaaagcctgttgttctgcaaactggtatacactgcttcgtcctttttctgttttgtttacctggctgttgctttgaagatttctgctagctgcagtgtactcagtccaggaaatagtgtcaaatggagaccgactgaaaccacttgcaatgttatttgtcactaaaacatcatgataagttcagtttaattgtcattgcatcagaactcagaagcagaaaaatgcggcaacctcatattgccactctttccagatgcaaagctcaggttttcaagcattcctaagagaagtaaaattgttttatcatcgttagtaattttttttggtcatatcttaatttattgcttgctcaattgcaggtcacagatatgatgcaaaaagcgctgtttgattttttaaaacacagatttgaagggcggtgagtatttcagcatactgggttttgtggattttgtcttaaagatggcaaaacgctggtgggacatgcgtgtgattccaagagaaaatggccctctgatgtctatatgatgacaggaaacaagtttcactcaatttaatctgattcaatcaatatttatcatatttgcttggtacatctttaacccctgatgtctagttcctgtacctacatccataagctgaccttgggcaggacaccactggccagtctcaccctcaattcatggtcaactggccctctattgctgcccaggcatcgcactaaatatccctcttccattcacttttccactcttctaaaagacttctgtgccatctccccctccttaatcctctgataaccccttctcatctcacgctcccccagtgaacttgcttccgtgtcattgagaaaatagaggcaaacagagaacatccaggcatttctacaaccccgcctgtggagttgcatgtttgcctgcatgctctgctttatctccaatgactatgttcccagcaagggccaacccaccatgtgggcactagatctcattccccatcccctctctgctagaagtatccatacagagccgtaatcatcctttgctctctcctcatgagtatttcctgttctaatggaaactccatcaccatgtaaaaatgttaattcctatcacattgacctcatattgctctaggtgtctcatttttttttcttttctttacaggaagattccttgaaagaattgagtgtactggctttccttccactttcttcagcctaccccagttatgttttcacccacaccactcagctaaactagtcatgtcaagatcacccatgaccttcacattgctaaatccagggataaattttcagccctaatcttacttgaccatgagcagtagttgacatggtggattattccatcctctttgaaatactttgcttggtttctggaaccacacttttctggttttccttctatcacactgactgctcctttgtctcctttgctgatacttcctcatcaactggaaatcttggacagcccagggctaagctctatgatgtcttttacctacatttctttagtgatttcattcagcatcagatttttaaattccattcctttgccagtctttcctctaaattctagacccatgtatacaattgcctattcattatcactactaagatgtctaatggacttttcaaatgtaacctcccccaaaacttactcctcccatggtcttccctatctcaattaatagcttcttcgtctttcagtcccgagacccttcagcccagatcattttccttgactgttctttctctcttatatttcacatgcaaatgctgttgtctttatcttcaaaatatattcagaatcgaagcccttctcacacatcctctgccaccattttggtctgagacatcttcatctcttccctggattggtgcaacagcctcccaccttgtctccttgcttctgtggttgttcccttaaagcctgtgctcaggttagctgctgcatgaccctgttaagatgtgagctagtgcccaccactcctttactcaaaaccatccagtgacttctttttttcctctgaatggaaaccaaagtcctacagtggcctacatgacctcctatggtctattcttccacacgtccttacctagattttctcttgctgctcttccctcgctcattctcaccctgccgtacttactcccttgctgttctttgagtgttccagacagattacacaatcacctcagggctttggcactttgcagttccttctgctaggaacacttttccctcagatattctccttggtatacgtgtgtacatgtatgcacacatacacatgcacacatttgttctgtgtctctcctttccctctgttttctagtgctcttttatgtatttccagtactatttttgtttattgtcattctcccataattagacgataaactccatgagggcagggtttgagaatgttttgtgaactgttgtattctcagtgcctggagcagtactcaacatgagcagtggccagatgaattttgaatgaacgtctgctgcatactctctgctagagaaatgcggagatggtgaagccagtctctgcctatgaacagctctcatggaaaccataaattgaaacctgtagcagtaacactgcatataagtaaaagggcaacttggttatatgcatgcacaaggtgcaggtagcataaagggaggcgtaattaacaccaacttcaggacatccacacctggaagaatttttaaatggtgcctaacgtttgaccaaatggattacagggaagagaagggtatgttcagcagatggtatatagtgtgtgaaggctttgaggtatgacacagcattatgtgtaaggcaactcacacccacatcttaaaggacatgggcaaggagtgactggtaacaaatccaagggtcatatctagtgtgtcacgccaatgggcttggacttaatcctttctttctcctcctcttcccccggtcactattcaacttgcctcagtaagtatttattgagtatattctatgtgccaggcattgtgaggagcaaaaatagacaagggccttggctttgtggggcttaaagtctattgaaaggcagtcttgaatcaaataattaatgggtgccatcattgaatgttaagccagctcctgaagcatcaaagacatgactagagtccaaaatggaaacctcagagtttaagagtaggttattacaggggacctggaagatacagggctagtgtatatttctgtatttttaaccagataaatgcagtgcttctcttctccacattcctttcctcctcccatcctaacaatgcaactacaatagatcaggagtcccaaatccccgggtcacagatcagtactggtccatggcctgctaggggccacacagcagacggtgagtggcaggggagtgtgcaaagcttcatctgtatttacagtcactcctcatcactcacacattattgcctgagctcagcctcttgtcagatcagcagcggcattagattctcataggagcacaaactctactgtgaactctgcatgcgagggatctaggttacatgctccttaggacagtctaatgcctggtgttctttcactgtctcccatcaaccccataaaggaccatctagttgcaggaaaacaagctcagggatcccactgattctacattatggtgagttgtataatcacttcattatatattccagtgtaataataatagaaagaaagtacacaataaatgtaatgtgcctgaatcatctcaaaaccatctccccactcctaccaaaccggtccacggaaaagttgtctttaatgaaactggtccctggtgccaaaaaggttggggactgctgcaatagatagtatttgttggtttcaggattcttttagatttcttactatagtactttctttctagaccacacctactactacaaccatttctaatttatattgacttttggcaggggaggcaagggtaggaaggaaagttttataggaggacaagtctttttagtaagtgatcaagcaggctgggcttggtggctcctgcctgtaatcccagcactttgggaggccgaggcgggtggataatgaggtcaagtgttcgagaccggcttcgccaacatggtgaaacctcgtctctactaaagataagaaaattagctgggcatgttggcgggtgcctgcagtcccagctactcgaaaagctgaggcaggagaattgcttgaacccgggaggcagacgttgcagtgagccgagatcgtgccactgccctccagcctgggaaacagagtgagactctgtctcaaaaaaaaaaaaaaaaaaaaaaaaaaaaaaaaaaaagtgatcaggcaaagaactgaaaggagagagaatgaggaaaacaaaaactattataagtttcaaggtatgaaaagactttataatcaaggtcttctaaccaaatattcctaattagatttttttaattttccatatctttaagaaatatttttcagtttgtgacaggaaatagaccctttagcttggaccaaggctactaggcactggccaagtataaaaggcatagctctactctgctccatttagcttgtttctttatccttggctctgtcatttatcacaatttggaattgtcaacatgagcctgaacactaaaaaaaattctgctaacaaaggcactgtgttttccatgcctgagtcaacccactgccctttcctaaatgccaaagatggggaaatgggatggaatttcctggattactacttgtacttaaacctgagtaagttttgaatttggaagacacattccagccagagagggtggattttggacccatgttcgagtgtatcagccacccagattggttttatttaagaaacagataaacaaaatatcttaaagtatctgttatttctagccagaagtaactttcatatggtttaattaatagacctgccttggctcatcttgacttacagagctggggttctatattctagccctgttctccccagttaacagtcctcagaggaagaaacgagtccataaggcagaatttaaaagctgtgtacaaatttaacatttttacccatggcaagacatctagagtaactgaattattgactgtctttgcttttggcaaggcaagacagcaatagaggatggaaattcaacaaaagtatcaggtgtgtatatacatatgacattctaaaagggaaaaatgaattattccttaatcatctattaaataagctaagtttattttttaaaaacgtttaagcccaagaggagaaaatatgaaaggaaatgttagttatgcgaaaggttctaggtagtcaagaattcctttttcttttctgaaacccacttaaattcatttgcagcagccctagggggttgtcagaatcacattctggttaagtagtgtcagtgtgtcagatcaaagaagaaataaatcatcctcctcctcctcctgttgtgtgcaataaagtagcccattcaaaactggattcacagtaaccaactgtgtcatgtaaacaaagcaatcttcagattcaccttgtaggatggtgacaggtaaattaacaaggaagttgagaacaagaaggaaagctacctgggataaattcacggttttttttttttgtttttttgttttgttttgtttccttcagtgactttcaaaacgtcagcaatcagccctgaagtgtttggaatgcatactgaattgctacagggataaatataccattgccagaatcttctgtaggacagtcttactagaaatcagtaatcctgaggctgagcacagtggctgtcacctgtaatcccagcactttgggaggctgaggcaggcagatcacttgaggccaggagtttgagaccagcctggccaacatggtgatacctgtttctactaaaagtacaaaaattagctgggcacaatggtgggcacctgtaatcccagctactcaggaggctgaggcaggagaagcgcctgaacccaggaggcggagattgcagtaagccaagatcacaccattgcattctagcctgggtgacagagcaagactctatcttaaaaaaaaaaaaaaaaaaaaattgagcaaataaaaagttgtttatctcatggaaaccacgaggaaaatacacaagaaaaagtatagtaggctgggtgcagcagttcacacctgtaatcccagcactttaggaggctaagggaggaggactgcttgagctcagaagtttcagaccagcctgggcaacataatgaggccctgtttctactaaaaaaaaaaaaaaaaaattagctaggtgtggtggcatgcacctgtagtcccagctacttgggaggctgagccagggggatcacttgagcctgggaggttgaggctgcagtgagctatgattactacacccttgcactccagcctgggtgacagtgagatgctgtctaaaaaaaaaaaaaaaaaaaacacattatatgacatagttcattgactattatttacatagtttcaataaatattaaatatggagccagccaaaattaatttgtctatttgaatccctctgggacattctagcctgttgcagtgtagatctttctttctgtgctgggtgtcattctggaacattccgtgttatatgcttggggattcctttcacctttgttttgggttgaagctcctgtttcccagatcccttgatttctttcaagctttactgtcattttagtcaaaaaccttctcatttccctaggaagggtatatacatgtttttttcaatagcctgaatgtttacaaacctttctgtttaattgctagtttaaatgcttatggaattctgattgaaatagttttccctccaaattttgaaggctttttgcttcattaccttgtggcttccattgttgctttgagaagtacaaagcattctagtgctttgattctagaccctttgggacctgtctttttcctctgaaagcttatgggtttctctttgtccccagtgttatgaaattcataaaaatatgtcttggtgtgggtatttcaacccgtgtgccggaccctttcaattcagaaaatcagatccttaattctggaattaattctttattttctttcctctgtcttctttattatctttttctgaactcctgtaatttggaatttgaacctcttgggttatgtctacttttcttacttttcttctcctatcttccaactcttttttgttttaccctttggaaatgttacatttcttttaacctttcttttgctttttttctatttctattatcatgttacttccaaaagctcttattctaagtctttaaatagaaatttgttctagtctcatagataaaaccatcttttagcttttaactgtgaataattgtcataattgatttttctgtttgttttgctctctcatgaggttttctgaagatgcctgacaaactgtcctgtgctcaaattttaaaataaggcataaaataattaatcagaggttctgtgctcataggcggagcttgtcaactttgtgtttctgtgtatggcaatcttgctagataatttacacaggaaacctccaatatcattatctttgggtccttacaatttggcagtcagattccccagagaagaatcttccattctgacccctggggatataaatataagcctggctaccaaaactgtacaatgagaagaaaggctgaagactcaacattcagaatcctttcttttccatccagtattccctgctcctgttctgtctagggtcccctggtcagaggccctcttgtattgcctgcaagataacaaatgtagggtcttgtaccacacaggaaaagaactgtcacctggctatttgatattgtgagggggcagtggagggctgtaactgaaacagacttttgaaccaaacttttccttttcgccctaacttcattctctaccttctttagaaatattgtgagccttcaattttgcttcacagctttttcctactgctgacttgaatattcagctttctgcagtctaagtcatttgctatttccagttcccaaattttgttgctctcatttctaccttatctaaaatgatactcccaattcaatattgtctctcataataccctgtatgttctttccacaacaatcatcatctttaattattttcctttattatttatctctgccactagaccattagctatctgagggaagactggttcttatttatttttcatgcctatcacagcaatgaactatggcacagagactaggaatatagggtcaggagtctgggttcaaatcccagctctcccacttagttacatacatacccttggataaaaaatctctctgtgagtctcatttttcatcagcaacagtgggataatagtaaacgtttctcctagagctttttggatcatttagtaattcaaataaagtgctcagtacttatctgacacttgtaagcaacaagtaagtgcaacgtaaggcaggtgcaggatagggccgggcgcggtggctcacacctataatcccagcactttggaaggccgagggaggcggatcacttgaggccaggaattcaagaccagcttccatagtgaaaccccctctgtactgaaaatacaaaaattagccgggtgtggtggcacacacctgtagtcccagctactccagaggctgaggcaggagaatcacttgaacctgaaaggtggagattgcagtgagccgagaacgcaccactgcattgcagcctgggcagcctgggcgagactctgtctcaaaacaaacaaaaaacaaagtaaggcaggtgcaagataaaaatgaataagtaaaaagaaaaaaaatgaataagtaagtatcctaacacatatggtttgaaaatatggttgctatatatatttcatacttagatgaatttggggcatacacttctatcccctttgattagaccaataaccttaaggtcttctgtgactttttcctccaacaggatatccatcacaagggtcaccgctgacatctcgcttgccaaacgctcggtattaaacaatcccagtaagcacgcaataatagaaagatccaacacaaggtcaagcttaggtaagtctgtgcaatgagcttaagctttttaaactctcctctcccgatgttgatgatgagaagacctaacaagatgataattccatgtgtcacagagtatagaaaaaacaggtgtgtgctgccagtcgctgttgctatggtcttactgatttcatggtgtggaaggatttgttatgatagtttcaagttaagaattccacaggctgtcagcattaatgttttggttgtggtttgttttcactaacatgagctttggtgtctgcagactctaagatctcctggctttgcatcagtgttaccatgagcaagtttattaaccttttgaagcctccatttcctcatcctaaaaaagaaataaaataactacctcatagaatcattgcaaggattaaacatgatatgtgctcaataaatgatatccattattatcctaaatattccttaattccagttatatatcaataatgaaatcattctcaggagagtgtaatttgtgggtgtggaaattagtaaaagatgaagtcaattcctggctatatttattgatagatatcaatatgtttgttttatttgtaaaaacagtgtagggagttattgtgtttacagagatggtatgtggatactgcttattaacgtatactgaattgatcacactgagacccttcagctgctatttaatctttttggtatgtgcttggagttttaggttaatcactgttacacatgttgcttactggatggttaggtttctgtttttataaagtaaactttctgagagttgtgtcagatctttgagcttaatttttctctgtttataggttagatatacaaatcctctgagaggctggtttctaacatagaagttcttcgtttactctgaagtatgattatataaataacagaaaaactattataaataataagctttatatgttagcaatgagcatgatacattatagaactcagttttgtttctcacctaacaacccttcgttggcaaaacttcagtaacaggtttagaaatatatttgaggaaaaaatgtaatcatgtgttttgcttatagcaattcctttttatgtccttatcatctgtcacagttaaaactctttccacacatcatttgatgctcacaagaattactttttattttgacttttttgagagagggtcgcactctgttacccaggctggagtacagtggtgtggatcatggctcactgcaccttgacctcatgggctcaatcaaacctcccacctcagcctcctgagtatctgggactacaggcacatgccactacattgggctaattttttgtagagagggagtctcactatgttgcccacgctggtctccaattcccaggcttgggcaatcctgccttggcctcctgaagtgccaggactataggtatgagccactgtgcctggccaagaattattataaaatgcttatttcataaattaaactgaattaacaaagtcaagtaattttttagactcatcagtggaatcaattacataacagatttccttagattgccaagattttttttacaactactgattatacattgtttttaaatgaattttccagtctatgtatttcattgagcatacactagataccaaatatcatgtggaagcccatgaataaaaaaagaaactgatgaagccccttccctcaaggagctgggtgtagccataaggcgaatcagtgaagagccctttgagatagagggtgatgagcaaagtggtcgagccatgaactggctgccaaagagctgttgctgcaggaggcacagggaaaggcttttccagggagctgatcctgagctgagacttgaagatgacaggatttagccaagaaaaaagggaaaggagtggagagggtgacagtgattcgagacagtgaaagccacaacaggcttctgaaaaacataggtgcttcatttaagctaaaatatattgttttaaaaagaaggacatgggagatgacatgacagagagaggcaggcataagacatgaaaaggttggagcttatttctattagtctgttctcaggaaaaaatgtgatcatgtgtttcgcttatagcaatttcttttttatgtccttatctatcacacttaaaactctttccacacatcatttgacgctcacaagaattactgctaataaagacatacccaagactgggtaaagtaaagaggtttaatggaatcacagttccacatggctagtgaggcctcacaatcatggtagacagtgaaggaggagcaaagtcacatcttacatggcagcaggcaagagagagcatgtgcaggggaactcccctttatgaaaccattagatctcatgagactcattcactatcaggagaactacatgggaaagaccaagtcccatgattcaattaccccccaccaggtccctcctgtgacacatgggaattatgggagctacaattcaagatgagatttcggtgggcacagccaaaccatgtcattattcttaaggtggtaggagaccatgtacagactggaggcattcattcatttagcaaatacttgaataccaaccatgtgccagccattattttggtgcccagggacacaaaagtgaaggacacaaagtcctctttctcatagtgtttgttttacaggaagacatggacaaaatcttgtatatatagacagacagagatggctggtcagtggttgagaattctaaaagcagcagcagaccaaggaataaagagtgagccaaggaggaggctgtaatattattataataaaatgcaagaagtacaaaaatgcaaaaaaaaaaaaaaaatgcagttgggcaaaccaactgcatctaacaccaaacccattttataataaagtgtagagtatatcatgtaatgtattgaatactaaaagtgaaaaacagaatggttgtatggggactcaaagttcggttcccactgtacatatattgctttcacactcttataaagttgaaaaatctttaagtcaaaccatcgtaagtcatggactgtctgcacttagtgtaggccaagtactgcagtaactataacggaagctttgcatgtggattaatttagtcctcatttccgtaatacagattagaatacttaggttctaagaggttcaatatgttacccactggccataaagctctatgaagcgatgacgcttcacttctgccccccaagccactttgatatgtggcagtgggaacagagaggcagaatttactgagcctggggagaaaggtagttagagaaggcttatacagattctttttgcaagataaggcaggcactggtcaaaattaagagttttgtgtgtagtaattatgaaaatggcattggaattacacatatggcattaaataactcatactagagctacctccaggtcttattaattcctaactgaccacttaggtgtccctcaacactagccgcaatgaaagtaaccatctctactctgttattacagtattttttgtttgattacagaaacctccttctaaataagttaacttctgttttttgttttttaacttttaagttcctatcacccaggtattaagactagtactcaccagttattttttcctgattctcttcttcctcccaccctgataggccccagtgtgtgtgtcattaaccctctatgtaccttgttttctttatccactccatcactgatgggcctttaggttgattccacatctttgctattgtgaatagtgctgcagtgaacatatacatgcgtgtatctttataatagaatgatttatatttctttgggtatatagccagtagtgggattgctgggtcaaatggtattcctatctttatgtctttgaggaattaccatactgtcttccacaatggtttaactaatttacactcccatcaacagtgtataagcgttcctttttctccataacctcaacagcatctgttattttttgactttttaataacagccattctaactggtgggagatggtatcccattgtggtttgatttgcatttctctaatgatcagtgttgtagcttctcttctttatctaagaggaaacattgttcctgttgttgtttatagatattagagatataaagcatagaaaggtgttcatttttcagtttaattcagtgggtataagaaactgtgggatgtggggagatgaggaaggcttgccccgtcttcaagatgctgagctgcattctttcattagctaggacaactggaaagaatcaaattgactttcagtttcagaaacgaacattggggaagtttctgacatttctttattagagtaaattctgagcatgatatactctgtcaaaggaaaattcctagcatggatacatccatttttaaaagcatcatttttactttgaagtcaaaagtattatcagaatttgtcatcgattcttaaggttgtatctactaatacagtgttgcaccaggattctgaaagtccactttaaaatattttaaaactctttccctttaattaacggagtgtaaagtatgtatgtaaggctaccacaaatatctttatatatgtgtatatattaaaacatgttaatatattgacataatataaataatatccatatatgtaatatattttaaggctatccaggttttatacaatcagcacatattagggctgggcgcagtggctcacgcctgtaatgccagcactttgggaggctaaggcgggagatcacttgaggtcaggagtttgagaccagccttgccaacatggtgaaacgccatctctactaaaagtacaaaacattagctgggcctggtggcacatgccggtaattccagctatgtgggaggctgaggcgagagaatcacttgaactgaggaggtggaggagattgtggtgagccgagactgcaccactgcactccagcctgggagacagagagagactctgtctcaaaaaaaaaaaaaaaaaaaacaaaacaaaaaaacaaacaaacaaaaaaaacaaaaaaacccacatattaaacttgtactactcaaacctttaaaagcaaggagttacacgggatgctgtgactgtctgaacacttaacagatgaaacaaagatgaaaatctttgtgatcagatttcttaatgcttacagtaaatattaatttaggttgtaacttgactgggattcagtggcccaatgttattttaaagctagtatctcatgtagtttgggccctgattttttaaagatatctaggtaaaaaaaaaaggactcaagtcataacatattgtgaggcagatggattagtgaccagagagttaccttttcttcaataaggtactagttaaaattatctccaggaagcttctggcaagaatccaacggcctaagaggaattaaaaggtaattgtaaatccacatttgctagcataaaagtctcatggaattcaacctccacgactgcagtgggaagtgaaagctatgtactatgctttatagacctatgctgcctagtaatagtagcttctgcctatttattaaattttaaaaatttacacgcctgttcaagtgctcagtagcccattagctgctgccacgctggaccacatacagagaatatttccctcattgcagaaaattcggtcagacagtccggtttttgagtctttggagatcacagaacagatgaactgaatgccattttctcggagttcaactagatattctaatgttttgtgataagtttctataaattttatactttagatttctgtagtgctgcctctgaaaactgcccttttaaaacatgactactttggttggaaaatatgaggtgtgtttttggataagtttctttctggtgccattcacgtctttgctgttttattttgtatttcatcttgttaataaacatctagacggcatacaggtgacatgtaaacatagatcagcccgtgcactgaaaggaaaacctgtcatggttgctaatgcaaagtggtctgcaatgaacacacggaagatatgtcaaggttcttattttacagcagttttatgaaatgatttcatagactgcaagcacaaagaatgtcagcagagagctaaaaatttccacaatccaagtattatactaaaagtaaattctgtagccggttgacagaaaaattccttaaatcctaatgatgtgtggagaaacagccctttccaaaaggataaattactgttgtaaatttttatcaattctattgcctgtaagcattaacataatggctgacctactcacctttctgttgaagaaacagtataccattttactttatcttaaaaatactgcactttaactgaattgtttcgccctttacagcggaagttcagagtgaaatcgaaaggatttttgaacttgcaagaacattgcagttggtggtccttgacgcggatacaattaatcatccagctcaactcagtaaaacctccttggcccctattatagtatatgtaaagatttcttctcctaaggtaagtaggactgctactgtttgctctataatcaaactttcctaaaatgtattttatgttctgctttctataattaggctattgtaatagcctttatgatgtatagagaatttgaggagacatgatagtcaagaatttttaaattgatatagtttcatggcttagaacagctgttctcaaagtgtggtccatggatccctggagagtgttgagacacttttagagggtccatttagtcaaaactacttccatgataatactaagacattatttgccattttcactgttttgatatttgcatggctgatgcaaaagcaatggtgggtaaaactgctggcgtctaaacataaatcaagactgtggtatcaaagtaccagcagttactgtattcaccgccaccatgctttcgcagtttgaggggaaaaaaagccaatttcacttaatgtccttataaagtagtaaagtttattacttttattaaatcttgacttttaatattcagtgtactaaaacaaagtacacacaaagctcctgctgtataccaaaaagtaaggacaagcactggtttgattgagttgtgaactaaactagccatgtttttcatagaataccatttttatctcaaacaacaactgacaggctatgcttattccgacttggtgtagcagatattttcttggacaaaataagcctgtcacttaaaggagaacagcatgtgttgccaatgataaaactcaagctttcagacaacaatcagaattttagaaaacttgtatgcatctctgagaacttgcaagcttcccaataaagttttctctgagatcaatggtaatattaatgaatatgatgttttaataatgtataatgaaatatgtcaacatttggaagatctgaagtcagtgaaccattattgtttgtatgatcaatgaataacattaattttcaagacagaccaatggaatgtcatggagtaagaaaattgcactgcaggttcagattccacataacaaatagtctttaaggaaccaccatttgttgagttttagtgtagtatcaaagaagactatactaaattgtttctccttttctcaattacaaatctgtaggaggttggattttcttcacgtatttcaaccaaaacatgacattgcagcaggttgactgtagaagcaaacaggagactgcaattgtcttctatgaagccagccagccagccattagagagatgtgtaaaaatgtagctatttttattaaaaaaaattcggccgggcgcagtggctcatacctgtaatcccagcactctactaggctgaggtgggaggatcatgaggtcaggagatcgagaccatcctggctaacacagtgaaaccccgtctctactaaaaatacaaaaaaattagccgggcgtggtggcgggtgcctgtagtcctagctacttgggaggctgaggcaggagaatggtgtgaacctgggaggtggagcttgcagtgagccgagatcgcaccactgcactccagcctgggcaacagagcgagactacatctcaaaaatatatatatatatattttaacatgtatcagatttattgtgaatttttaaataaatgttttaatagttttccattttagcttctttaaagaggttgtgagataaaatgtttgagagctgctagcatagaaaaaatgtgagtgcttaaagcttgcaactgtgatttatgttaacatgttaattttgcagataatcttatagctccatctattataagccccttgtgctgtatataaaaaggccccagagaaaggagtcaataatgtaccttgtactttacctggatgtagttattactctgttaaaaactcattatcttttacaggttttacaaaggttaataaaatctcgagggaaatctcaagctaaacacctcaacgtccagatggtagcagctgataaactggctcagtgtcctccagtaagttatctctatatacagcataatccagttacagagatcagaccttttttttttttttttttttttttttttttgggggacaaggtcttgctctgttgcccatgttgggagtgcagtggtatggtcttagctcactgcagccctgaactcccgggctcaagtgatcctattgcttcagccttccaagcagctgagactataggtgcatgccaccatgatcggctaacttttttttttccccctgtagagacggggtcttgctatgttgcccaggctggtctagaactcctggcctgaagtgatcctcctgccttggtcttccaaagtgctaggattacaagcatgagctgccatgcctggccagaactggcattatattttgaaaaaaacagtcaaacacctgtcagggaagagaatcctcatcacttacagtggtattcattccaaagtaaactgtcctccctccttccatgatcatgtgttttgagcacaagtaatccaaacgatgatcatagcttaccaaaagcttccgtacatcctgcagtaacttcactttgttaatatccaacacaagatcctggttccgaaaatttggcttgtatgatgagtctatttggagttggtatattattcatttctgatcatagggatcaagttgtctgctcttaataactgtctgagacatttattttcacatggtctcaaatcaatttctaagtaataagttacctagattctcacttgtcgtctatgctttacatgcaatgccttgaggtattagagctttcctaggtttagttttggaggcagggtcttgctttgttgcccaggcaggagtgcagtggtggtgtctcagctcactattgcaacctctgcctcccgggctcaagtaatcctcccacctcggccctccaagtagctaggactacaggcaaacgccaccatgccctgctaatttttgtattcttagtagagacggggctttgccatgttgcccaggctggtctcaaactcccgacctcaagtgatccatccaccttggcctcccaaagtgctgggattacaggcatgagccactgcaccaggcttttttttctttttaagcatagccatttcagggtctataaatatttgattgcttaatatatgttaaaatttataataaacactaaaaaatcttttgaaaagtggcattattttcttctctactgaactactgtgaagtttggacaatgtcaaaatttcacatcctaatcttaccttattaatttctaaattcagatttcataatcttgggccgggcatggtggctcatacctgtaatcccagcactttgggaggccgaggcgggtgaatcacttgaggccaggagttcaacaccagcctggccaacatggcaaaaccccatctctactaaaaatacaaaaattagcagggcttggtggtaggcacctgtaaccccagctacttgagaagctgaggcaggaaaatcacttgaacctgggaggccaaggttgcactgaaccaagatcaggccactgcactccagcctgggtaacagagtaagactctgtctcaaaaaaagaaaaagaaaaaagatatcacaatctttatgtcaagaacaggcttcttcctattctattctattctgttcaaatatatatacatctcttttctaccatagtatctatgcctttttcattgctgattgatagacaacttttctgggttgccatgtccttaacaactgttacctttctggccattatttattagttaagcattcagtgccctcaacaatgatttgaggtagtcagacacttcctaactaaataaaaagggagatagtagcagcacttatagaagcaggagcaagtacaaaggggtgcagctcatgagccccttcctcctcttatggaggtgggaagggggtgaaaactgggctggcatcaatgtggtctggaatgtctgcctctgcaggagctgttcgatgtgatcttggatgagaaccagcttgaggatgcctgtgagcaccttgccgactatctggaggcctactggaaggccacccatcctcccagcagtagcctccccaaccctctccttagccgtacattagccacttcaagtctgcctcttagccccaccctagcctctaattcacaggtaaggggagtttttatatatatctatatatacaatcttcatagaaaaaaggttgcctatggtgacacctctaggatccaagcccagtagcctgcttggggcttgttctagtatattaactcaaagcaagtccagcatgagctgtgtatgtacctgtaagaaaagcaccatcaacagaatatattgggaacatacacagactaccgaaactttctaaacagtagcatagactgtggaagtggatcacctagattcaaatcctggctgcacctcttaccacttgtggggtggataacctggggcaaatttcttaactgttcttacctcaggaataataatggcaacctgtccaagaggctgctggaattaataatctcaagagatgatcttatagggctgttgtattaatgagttattatatacaaagggtctacagaacagtgcctgtcccatactgtatcactgtatcaggtaagcatttgctatttttaatattctcacatacagtcaagcagaggtagttaagtttacaccgctgtatagaaaaatctcagggacctgcatctgtatttgagccacaggagaataaataaaagaacattttccctgctgctgcttttttttttttaaaggaaaaagttaccatgggcactgttctaggcacttacaaaagtccaatttaatatagtatagtataaagccttataaatgccactggatgttaccaaagggatgaagctaggttagacttcatttcagcttttcggatgcttaaaaaggactctgcttgaatgcacttgctctgggacatgttctttacacactgaccttggttaacgcctggtgtgctcctttcgctgccagggttctcaaggtgatcagaggactgatcgctccgctcctatccgttctgcttcccaagctgaagaagaacctagtgtggaaccagtcaagaaatcccagcaccgctcttcctcctcagccccacaccacaaccatcgcagtgggacaagtcgcggcctctccaggcaagagacatttgactcggaaacccaggagagtcgagactctgcctacgtagagccaaaggaagattattcccatgaccacgtggaccactatgcctcacaccgtgaccacaaccacagagacgagacccacgggagcagtgaccacagacacagggagtcccggcaccgttcccgggacgtggatcgagagcaggaccacaacgagtgcaacaagcagcgcagccgtcataaatccaaggatcgctactgtgaaaaggatggagaagtgatatcaaaaaaacggaatgaggctggggagtggaacagggatgtttacatccgccaatgagttttgcccgtttgtgtttttttttttttttttttgaagtcttgtataactaacagcatccccaaaacaaagtctttggggtctacactgcaatcatatgtgatctgtcttgtaatattttgtattattgctgttgcttgaatagcaatagcatggatagagtattgagatactttttcttttgtaagtgctacataaattggcctggtatggctgcagtcctccggttgcatactggactcttcaaaaactgttttgggtagctgccacttgaacaaaatctgttgccacccaggtgatgttagtgttttaagaaatgtagttgatgtatccaacaagccagaatcagcacagataaaaagtggaatttcttgtttctccagatttttaatacgttaatacgcaggcatctgatttgcatattcattcatggaccactgtttcttgcttgtacctctggctgactaaatttggggacagattcagtcttgccttacacaaaggggatcataaagttagaatctattttctatgtactagtactgtgtactgtatagacagtttgtaaatgttatttctgcaaacaaacaccttcttattatatatataatatatatatatatcagtttgatcacactattttagagtcttaatgccaagtcagcagatttgctttatgaattacagggactagaaatgcccacattcaggaaatttgtaataacattgtctagacacctatcctcattctagtagaaagtgtgtacatactgtaaatatgtgtgattgcttgacttgaaaaggtttgaattctgaatgttataccatccttgtaagtaagtttgtaatttccaccataaattatggtaaatataaaactccagaggttgttctactccatacagttcacactgattgtgacacattcttagtagctagtgtctgttctagtcactgcactggagtctacgagccggaactcgctatatgcacgtgtgtgtgtccgtatgtaagaaagtgtgcaccgagtgactgaatggttgagatgaattggaatgctgaagactaacgaagaaactagagactgatatcgagcattctgcccacctcgctctgtatttaattaattgtgctatatgttgctttaacaacccattgagcagtcagggaatgtgagtaagcttgctgccaaaggtaactaggaaagcattcatctgctgcctccttgtttttgctcctagagagtgaaaatacaggcaattttactgtgagtgtttcactggaaatgtacaatctttgtgtgttagagtatttgttttagtaagaaatgtttacacagcttgtggaattatttcgtgggaaaataaatttttataacttctccc

SEQ ID NO: 80 - DNA, 69245 bp, Homo sapiens; identical to SEQ ID NO: 75

SEQ ID NO: 81 - DNA, 9826 bp, Homo sapiens
ccccaggtgagccgcccgccaggcccgcccgccccccgggccccacccgcccccagtgcgccctgaccccgacccccgaccgcccgcagggcccggcgacactcagacgggacgttcaccagcgagctcagccgcctgcgggagggcgcgcggctccagcggctgctacagggcctggtggggaagcgcaggtgaggccgggtggggtggggggtcctggcgtggtgccccagcagcaacgcgcgaccccccagctccaggactaactctgttttggggcggggggcagcgagcaggacgcagagaacagcatggcctggaccaggctcagcgcgggtctgctctgcccgtcagggtccaacatgcccatcctgcaggcctggtgagcacccgccccaccgcagaccccactccagaccccaccccagacccctccttctgtcctggcctccccgggtcagcgctggtggccactggaggcccaattccagcagcggggccggggtctccagccccagccctcagaccctcacgtgctgtctctgcaggatgcccctggacgggacctggtctccctggctgccccctgggcctatggtttcagaaccagctggcgctgctgcagaaggaaccttgcggcccagatgaggaaggaaccccctcaccacctgcccggcccaggagcgcagctgcatttggggtggggggcaggatgggggagagggggaggggtggtacttggcaccaataaaggaggaatcagacccagacgctgggagttgtctgtgtccactcagtgtaatcgaggcaacccctgtgtagcggggctgagggatggatggaggcccatccacccaggagggactgaccacacccagctgccctttacacctgcaggcacggcggcccctcatccttatctctggcatcagggccacctcctgtacctcgactaagtactgcagggccccgccccaccccttgtcatccattaggaaacattctggggctcgggggatcccggacaccctctcagctcctgcccgggggcccatgtggtcagtgtttctgtaaggggtagtggggagggtgtgaaggggccaggggggctcaggcgggcaggaagaggggagggtggaggtgtcacctggggtgccaggaatccactctggcgtgaggactccggaccctctgtctcgtgtggcctcggaccagtggcttgacccctcagagcctgtggagcacggagcgtgcagggcttgaaggcgaccatgagggcaccgtgcagggttaggacactgagcccagccccagccatgagaggccagaagcttcggcgcacaggcctggaggaggagaactccacctacccctcacgacagccacttcctcgccccgaccctacccagtggcctctccctagagctgggggcttctggggggccaatgaaaagagcagggcaagtgtcgagtctcacctcaccccctctgtcgggcaccagggccccccaggaactcccagctgcccctcacagccccgccttagcctcagtcactaaggccctgtccagccccgccctgagaagccgacttgtctctggggcaggcaggggtgtccccaggacacagtgaggagagccttttccttcagaacctgctgtcaggcagggagggaggtgctccctggggaacacccgggttctgagcctcaaggggtggccttaggaactttgcctgagggagatcttaggggaggagccaagccagggcagcctgggctagggaggcaggttccagacaccccgacaccaagggccgagcccccgcccccagcccccagcttctctcccacaccctagccctgcccctgccctgcccctacccccacggcacccatgagccgctctccagtcccttctgccctgtgcctcggtgcctgtgacctgagccccctggttgacccctgcactcagtccaacttgggccaaacgactgcccctccttctggcagtgggctggaccagccggccagcgggagcccccttggcagaagccggtcgtaaaggatcataaactgggcggcgtctggctggggcgaaggtcgctgaggtaggaactgcgccagtcctagacgccagacccgctcagaccctcctgccaggtgacagccgccaagatggggtcttgggccctgctgtggcctcccctgctgttcaccgggctgctcgtccgacccccggggaccatggcccaggcccagtgtatgtgcgggcaggggtaggtggggcacgggcggcggggagccaggggctgggaggcactgatccctcctctgcaaccttacagactgctctgtgaacaaggacatctttgaagtagaggagaacacaaatgtcaccgagccgctggtggacatccacgtcccggagggccaggaggtgaccctcggagccttgtccaccccctttgcatttcggatccagggaaaccagctgtttctcaacgtgactcctgattacgaggtgtgggcggcaggcgggcgggatatgggggtcccgggagaagggcacctgcatcctcaggccacacctcccttgggggcctaggagttctatgcctgcgggcatccactgacacccatgcttggtggtgcctgccctagaaggctgggccatttcgggatgaagctgcctgggcccacaccctcagcactgaccactgatgatggggaccctgggccagcgcctgcccacttggcctcagtctccccacctgtggggcaggacggtgactgcagacctgtctacatccacaggagaagtcactgcttgaggctcagctgctgtgtcagagcggaggcacattggtgagtccccgccccgctctccccgccccacccggccacctctgctgggctctgccctgccggtccaggaccagtctttgatgacgtcagctagggtgtggtttcaaattccacccccccgagggtgatgcccacatttcctccagtccagactctgccctgagctgtggagtccccgtcactgaccccttgtccagcagacaccccatccagtgtgcccaagactcccacccactccctcaaccatccacaagggaggcacctttatcctgccagtcacggggaccaccttggttcccactcgccctccctccccacgtgtcccccacagccccccactggtaaatctgttggctgtgccccagctcgacccagaaatccagagtctgtccacctccagtcccatcagggccgggacaccagcactcattttgggaaacttccagctggcccaccggcttccctgttgccctttgctggccccagtccactccacgtggcagaacagcccctgtggatgttgtaaaccaaggctgcccagcccaccccagccctccacggctcctttctcaccgagtcaaacccagacatactgtgcagaggctccactgcagcctcagggctcccgccaggcacgcccctccctcaccggctcaggactgcagtcttcagagaaatcccaaccaccctatgccctgttgcatcccagccccgctcccccaacatcctgcttcttgaccggcggcatttttttcggctttattaaggaaaattgcagaatcctgaggccagcacaggccccctcacctaccagcacacagcaggctctgtgccctccatgcaccacggcacgtcacctgcacatatcttgggatatgtctctgaaagagagagactcttttttgagacagagtctcactctgtcacccaggctggcgtgcagtggagcgatctcggctcactgcaacttccgcctcccgggtccaagcgattctcctgcctcagcctcttgagtagctgggattacaagcatgcgccaccacggccggctaatttttgtatttttagtagcgacggggtttctccatgttggtcaggctggtctcaaactcctgacctcaggtgatctgcccgcctcggcctcccaaagtgctgggattacaggtgtgagccaccgtgcccggctgacaatccagtttcttcacaaataaatctccaggaaaaaagatgggagaaagggaaaggtacagatgaacagaaactcaggagaattaccaaccaggtccataatgtgggccctgattcaaacaaacaattgttaaaaaacccttcagagaccacggggaatgtggcatcctggacatttgaggtagaaagtgaccgcttttcccaggtgtgacaacgacattgtggttatgttctaaaaagaagagtcctggctgggcgccgtggctcacacctggaatcccagcactttgggaggccgaggcgggtagatcacctgaggtcaagagttcgagaccaatgtggccaaaatggtgaaaccccgtctctactaaaaatacaaaaattagctgggcatggtggcaggcacctgtaatcccagcactttgggaggccgaggtgggcagaggccgaggcaggagaatcgcttgaacctgggaggcagaggttgcagtgagccgagatcacaccactgtactccagcctgggtgacgacagagcgagactgtatccaaaaaaacccaaaaaccaaaaaacaaaaacaaaaaccaaaaaaaaaaaaaaacagagaaaagaaaatggattgtctttcctcacctgagattctgctggctgcatccccaagtacctgcattatttttctgtggagcacctgccacctcctggctttataaagtcctttttgtctgttgttataagtcctgccaggacaggcaccaccaggcagagatttgtctcttgtgatctctgaatcccaacgcctagagctgtgcagcccctgtagccccccaacaactgaatgagcgagtggacggatggccgtcgaggggtgcaccccactcacggcggggacgggtggccgttgaggggtgcacctcactcacggcggggacgggtggccgttgaggggtgcacctcactcacagcagggacgggtggccgtcgaggggtgcacctcacttagggcggggacaggtggccgttgaggggtgcacctcactcacggtggggacggatagccgtcgaggggtgcacctcacaacggggaggggctgtgggagaggctgacggccacatcctgcaggtgacccagctaagggtgttcgtgtcagtgctggacgtcaatgacaatgcccccgaattcccctttaagaccaaggagataagggtggaggaggtgaggccagcgaagccgcggggactgggcacgggggtgtgggagcccagggtgagggcaggaggtgagtggtggccgggggctcaaccacagtgggggtccacaggggccaagagtgtggccggaccaagcccctctccctccccaggacacgaaagtgaactccaccgtcatccccgagacgcaactgcaggctgaggaccgcgacaaggacgacattctgttctacaccctccaggaaatgacagcagtcagtgccgcccaccctgccccagcacgagcccctcgcctctgacacccacagccgccctcgccctccaaggctcttaggctctgtcctccctgaccctccccagggtgccagtgactacttctccctggtgagtgtaaaccgtcccgccctgaggctggaccggcccctggacttctacgagcggccgaacatgaccttctggctgctggtgcgggtgagcaggtcaccccagccccgagtcccacacacttgaggccccccggccccagctgctcccaggcctgatccagcacagccgtctgttgcaggacactccgggggagaatgtggaacccagccacactgccaccgccacactagtgctgaacgtggtgcccgccgacctgcggcccccgtggttcctgccctgcaccttctcagatggctacgtctgcattcaagctcagtaccacggggctgtccccacggggcacatactggtaatggggagggaggggcagtgcacggggcagggccttctaggcaggctggacacagggacggccaggatcaggagaggaagggcggggtcggggtcagggggtggggccgatttcggtcgtgattttgaaacaaatgcagactctccttggaaaccaacccttcccatcttgagcggtgagggagcaaaccctgaacacacagggaggagcgtgggccccagagccaggcggtctcaggggcctggggaggtgggctggggccctggagctcttaagggatgctgacatctctgccctgctcacagtcaccactgggcccacacaggctgtctgcaaaccttcctggcaccaaggcacctggggccaccaaacagtacatgggaggcagaaatgcagaccccgggagcccccacttcctaaatgtttgcttacccgtcaagacaagccttgtgcaaatgggactcagtatctttgggcaactggactcattcattagtaagggacccacaggggtgttactgattgtgatgctgggacaagggactgtcctaggcaggcagggacgcccggccaccagcgggactgggcccctcctcagccaaccctgcccttgatggggagtcagaggggccaggctggggccatccaccccagccccacgacgtgccctcccttccgccatccctgaagccatctcccctcgtcctgcgtcccggacccatctacgctgaggacggagaccgcggcatcaaccagcccatcatctacagcatctttaggggtgagtggggcccagccctcaacaatgccctgtaccccctctgtccctgtctccatccccaccttgggcagagctggctgggtccctgggcctcagggggccggggctgagcacttccatcatcctcccaggaaacgtgaatggtacattcatcatccacccagactcgggcaacctcaccgtggccaggagtgtccccagccccatgaccttccttctgctggtgaaggtgaggtgggcacctgcatggggggcagggcagagggggaagggtggaaggtagggcggggggtcagggctggggggccggggcagggcccccgccaagtctgcacctgcctttcctgagccccagccttcagcgccagctccaccttcaaccccactagtcactgctgcctcccccgcctccagggccaacaggccgaccttgcccgctactcagtgacccaggtcaccgtggaggctgtggctgcggccgggagcccgccccgcttcccccagagcctgtatcgtggcaccgtggcgcgtggcgctggagcgggcgttgtggtcaaggatgcagctgccccttctcagcctctgaggatccaggctcaggacccggagttctcggtagagagtgcatccaaggcctcccctctgtgggtgggtcagggctgtacgtgggaggcagcctggccggggactcaatgagaccctgtccaggacctcaactcggccatcacatatcgaattaccaaccactcacacttccggatggagggagaggttgtgctgaccaccaccacactggcacaggcgggagccttctacgcagaggtgcggggcagggcaggcgggcatctccaagggtgtggggcttaaagatgtgtctaggagggacaagccccttcctgccccaggttgaggcccacaacacggtgacctctggcaccgcaaccacagtcattgagatacaagtttccgaacaggagcccccctccacaggtaagcccccctccacaggtgagcccccagggttctccaaataagccccttcggtggctcctttcccgcggtaggtgtgcaaggggcgggcagaggcaagcccaagcactgttcccggcccccagatgtccccccatccccagaggctggaggaacaactgggccctggaccagcaccacttccgaggtccccagaccccctgagccctcccagggaccctccacgaccagctctgggggaggcacaggccctcatccaccctctggcacaactctgaggccaccaacctcgtccacacccggggggtccccgggtgcagaaaacagcacctcccaccaaccagccactcccggtggggacacagcacagaccccaaagccaggaacctctcagccgatgccccccggtgtgggaaccagcacctcccaccaaccagccacacccagtgggggcacagcacagaccccagagccaggaacctctcagccgatgccccccagtatgggaaccagcacctcccaccaaccagccacacccggtgggggcacagcacagaccccagaggcaggaacctctcagccgatgccccccggtatgggaaccagcacctcccaccaaccaaccacacccggtgggggcacagcacagaccccagagccaggaacctctcagccgatgcccctcagcaagagcaccccatcttcaggtagcacccactctgttgccttccctccctgactccggtcattggctggtatgggaaacgctgtaggaagggtccaccccaggctgacctggcctgaccatgaaatcccaaagaggagtctgtttgggactgacagacacagacaggcccaaggcccccagtgaggtaacctgtgatgtgtgtaggacagaggccagatgtggggtccagcgaatcccacgattcccacggctgccgctcaccctgcaagtccctgcacctcttgtgagctcctgtgagcagcttggcctcccgggggggagggggtgggcagggtctcgatgggacacacaggccccttgagccagggtcagcagagcctgagatttgggagacagcccaggcctgggtggaacccaagtgtcccaagcctggcacaggttggcacgggaaatgcctggggcactcaacagtgcggggatgatgacgttttccactgcgatgccaggtggcggcccctcggaggacaagcgcttctcggtggtggatatggcggccctgggcggggtgctgggtgcgctgctgctgctggctctccttggcctcgccgtccttgtccacaagcactatggcccccggctcaagtgctgctctggcaaagctccggtgaggcccaggatggagaacagggcaggcgaccaggcaggaagtgggggacgggggacaggagaggggagggcagagggacagatgtggagacggaggggtgtccagcgtggaatgagggtgtgcagggccaaggctgcagagacccagggaccccgctgacgcctcgactcccgcctgcaggagccccagccccaaggctttgacaaccaggcgttcctccctgaccacaaggccaactgggcgcccgtccccagccccacgcacgaccccaagcccgcggaggcaccgatgcccgcagagcccgcaccccccggccctgcctccccaggcggtgcccctgagccccccgcagcggcccgagctggcggaagccccacggcggtgaggtccatcctgaccaaggagcggcggccagagggcgggtacaaggctgtctggtttggcgaggacatcgggacggaggcagacgtggtcgttctcaacgcgcccaccctggacgtggatggcgccagtgactccggcagcggcgatgagggcgagggcgcggggaggggtgggggtccctacgatgcgcccggtggtgatgactcctacatctaagtggcccctccaccctctcccccagccgcacgggcactggaggtctcgctcccccagcctccgacccgaggcagaataaagcaaggctcccgaaaccc

SEQ ID NO: 82 - DNA, 11614 bp, Homo sapiens
cacccaccccttcctgtccagtttgctcaggaccggacaactatatgtagatgacagaagagatacttatttggagcttgggtgagataagcatgcaggtgcctcaaagaagcaacctctacacacccagtactgggttttggtttccatttggtgtggaatgagtgtttctgaactgtgggtgagaggcagaaaggggagtggtttctatactgctgtccaagcaggctcactctgtttccagggtagaggaatgtgcctccaataatacgatttttctagggccatggggtttgaggttggtggaaatgtttgcctgtcccggcaaccatcattcccaatttggaggcatgaatctcagtctctctggggctcctctctcctttttgaaattttcccccatggtctctgtctctatatcctcccttgcccccacaaccactggatcttgcttgttccacctgaaacttggtgattgtcagctgtgcccctgaccacactgccactaagtccttctcaatctatatcctgagctctgattcctcttctgtctggctgattttcatgccgccttgcctacttgatatgtgctctgcccctgtttgaagacagggaaaattttacatgaaccttgatctatgttctgttttttttttttttttttttttgactgagtctcgccctgccgcccaggctagagtgcagtggcacgacctctgctcgctgcaaggtctgcctactgggttgacgccatttcctgcctcggcctctggagtagctgggactacaggtgcccaccaccatgcccagctaattttttctattttttaggagagacggggtttcaccgtgttagtcaggatggtctcgatctcctgaccttgtgatcctcccgcctcagcctctcaaagtgctgggattacaggtgtgagccaccgcacccagcctatgttctgaaatagttgtatatgggctgggtcacagggaaagtgaaactcagagctaatttaaggctggacacagagtcagcaacacacaagacatcatcttgaaggaaggatggctttggtaagtccccagaaacggttttaaagctttgatttgaggaacaaccaccctattagtgatgattatgtgtattcttgttggtctacagctctggcatggagggcacatgggcacatgctgagttctgggggtctggctctctcagacactgtgggaaggaaccacggtgctgggttatgaccctggaggctccccagcctcagctgccgcatggggtctggttctactgtggccaaagtttgcgtttatgcttttccaagccctcctctggccaaactaccagtggctctgctaagcctcctgaaggcaggaatggtgggctcagggagagcagcccttggtttaccccacaggccgcctcctctgtcacatcatcctcagtgggagggattagctggggagggagggtccagggaaagggctccagctgtgtgggtggcaatgggggctgtcagaaagggctctgtctccctcgcctccaggcagggccagtccctctactttccctccttccctccaattccttcttagtttccttcttcctttagacccaatagcagccacatttcccaagtgctcaggggtccagacaccatgctaaacacttcttttatttaatccacaccaggtagttaataagcaatcctatgaagtaggcataattactgccaacttcatggataggaggaatgatatactggtaagtatagagagggggctgcccaaaagtcagagagggaattcgaacttaggaggctctgactctaaagcttcgacttaaaaaagaaagaatgtatttaattccaggagaaatacgtgaacacattcactttgtctgaaaaaccgaaactctagcctgggcaacatagtgagatcccatccctacaaaaaatattaaaattagccaaggataatggtatgtgcttatagtcctagcttcttgggaggctgaggtgggaggatcacttgagctggggaggctgaggcttcctgcagtgagctgtgatagtgccactgcactccagcctgggtgacaaaatgagatcatgtctcaaaaaaagccaaaagccaaaaaccaaaactattagcataaaaactaatgtcccctttgaccatccttcccatctgtacagcctttcccctctgtacaacctggtgcgtattcttccaaatatttttctgtttttgcatacatatatggctaccttacaagtattggtttgtagctttggggtttgttgtagttttaaattgcattccgtgaggacaattcagttaggaaatgcttgaatcttttcctttatttaccagcttttggaataatagggtgattcttttccatcctccaaagatgcctagtgtttttaaaaaatatccttatgaacacgtgggttttaacatatttgatgtgtttcagtttgtgtacagttatttttattatttttttttgatgctcaaattgtcccttatttggtcaagttgactcttgacccctctagtcaaaggctttacttttttttaaatttcgaggttctgggggggaacatgtggtatttggttacataaattagtttttagtggtgatgtctgagattttggtgtacctatcatctcagcagtgtactcggtacccaatgcgtagtctttttttttttttttttttttttttttgtgatggagtctcactctatcgcccaggctggagtgcagtggcacgatctctgctcactgcaacccctgcctcccgggttcaagcaattctcatgcctcagcctcccaagtgggtgggattacaggcacctgccactatacccagctaattttagtatttttagtagagatgggggtttcaccatgttggccaggctggtctcaaacttctgacctcaggcaatccacccatctcggcctcctgaaatgctgggattataggcgtgagccaccacacccagccccagtgtgtagtcgtttattcctcacccactcccacccttttccctcagtcttcagagtccgttgtatgattcttatgcctttgcgtcctcatagcttagctcccacttacgagtgagaacataggatgtttgattttccattactgagttatttcacttagaataatgatctccaattccatccaaattacttcaaatgaaaggctttacttttaactatagctccccaccagactttgagttggctggcactctcaccaccctcggcagcagttcaactcctttgtggcttggctcagctgagatagggggaggaggggtgctggctggcaccagagcataccggaaacagaatttatgtggcaagggctgtctcccattctgggtgtggccagggcaacattcctcgcacccatgcaccctccagaggggcactgccctaccaccaactccaaacacaccctgccatcccttgctttaattttagcctgagctcagacttcagctgccctgggcttgcctaggacattctgggatggttaaaggcattaatgttggaaacattcagccctacccttcattcctgctcttctacttattaggcaagttacctaacgttcctgagactccatgtgctcattgtcaagtgggggtaatgatagttttcacccaaaggagtggtgtgtaatgtgggtcaagtgtccgcctgcctctgacatgttgggcgttgcaagtcagacctctagaacttgtaggaatcacttgggcccaggctcatggcaggtggcccttaaagaggcattttaggcttccttcggaatcatgcagtcactagctgacaaaaacatactctgtgcataaaatgcactcacactcagcctgggcacatcactccatcacactcctgtgctgcacatgcatgaaaatctccctcaaagatactctcttcatctcctccttgtcccctgaagagcaacttttcagtcctgcagccccagtaaatgaaggtgcttcctacatatgtgaggagtgctccctccttcctgtttcctgcaggtgatgagcacagggaatctgcaggctgagctggggctccttgcaggtcaggccctagaatgtttcctgcagatggctcacctctgcctgtttctggtttttctgttgcaggccagaccaagaccgagacttggagacctgattgagatttctcgctttggctatgcacactgggccatctacgtgggagatggctatgtggtccatctggctccggcaagtaaggatgggttctctttttaagcacaagggttaagatcaagaatgtgaagagatgcacagttacgtgcttgtcctcacttcagggtctagcagagtaggcactcaatacataatgctgaatgaattgtgctttttcctgctagatgtagcaactgctattcttcttttgcagtaaattggtggagagactattgacctttattccattatagagtggggttcagtctgaaccaactcactgtacttggtgagcatccctccgtgggatctcctatgtatttgttgttatggaggtacaagcaagagtaagaagcagttgcttccttcagatagcgtacaactgagcacatagtataacggaaggagcatgtgggcctcccaactcaacagaaccagtttggaattgtggctcctctgcttacagactgtgtgccttgagcatgcggcttcacatcactaagttcagcttcccaggagtctggggtcccctttagaggccaattggagaatttaaagctggagggcatggacatcccctggcctagttcctctaatttgaaaatgatgaaaccagggtcccaagatgagaagggctttttctgaagacacacagtaagagagccacggccaggacctggggaccctggattcctgggacaggcttctgtcttgttcagctgtttcctttcctactgtttcaaaatgccaccctcacctactggagctcccacagcactggctcagggcaatgggtgacattttcttttctttacctttttggagacaaggtgtcactctgctgcccaggctggagcatagtggcacaatcacagctcactgcagcctgtaatttcggcgctaaagcaatcctccagcctcgcccccggagtagctagaattacaggtatgtgctgccatgcccagctacttttttaatttttatttttagagacaggagttttagcatattgtgcaagctggtctccaactcctggcctcaagtgttcctcctgccttggccttccaaagtgctgagattacaggcacctggcctggagtgactttttctaagccacaagctagtgagcggcagttgggactatggcctggggctcttctgcctcctctctttgccctgtaccacactgccttgactgttgactctttcaggtatatctgaactcacatggtcctttagagctcaggttgtttactttagaaatgaggaaaccagaacttagggaccttctccaaagtcacccaggcttgggtcttccctgttttcaagtttgaggccaggcaggatggacaagtccttccacagctgctcctccttgatggtgctcggggcgatgaggctgcttggcttccagctctgagccccccaggccctgcccaggactgaactcactgtttgcacaggtgaaattgctggagctggtgcggccagtgtcctgtctgccctgaccaacaaagccatagtgaagaaggaactgctgtctgtggtggctgggggagacaactacagggtcaataacaagcacgatgacagatacacaccactgccttccaacaaaatcgtcaagcgggcagaggagttggtggggcaggagttgccttattcgctgaccagtgacaactgcgagcacttcgtgaaccatctgcgctatggcgtctcccgcagtgaccaggtgcatcttcagcctgcatccccttcccaggagccaggccactccctcagctgccagaggctgggtccctgctggggccagggtgggatggaaatagacatgagcaagacaaaatagcagatatgaaactgttgtccttgagggtgtcacatttggggtggggacaagggtggggagataggcaagtcggcaatgtagaccagtgcagtgggttggggggtggccacagaagggagtcacagcctgaaacagccctccacagccctagaggccggctttatgattcccactttacagatggggaaactgaggctcaccgtgcttaagtaacttgtccaaattcattaaactcctagttattgagtctctagtccatgtcagccatggtgaagagcgggggagttaaacctacatgtgttctctccaagggccccgatcaaggaaggctttgtagaagaggtcacacccgagcccagcctgatttaattattttgattaatctgaaagaaaatgagctggagattaccagggaacgggggcaataaggagtgtaggcagagggaacagcgtgagccaggaaggggaaaagcccagatcatgttgggcaattgttttctgtaaagggccagatagtaaatgtcttcgattttatgggccaggtgttctctgtcttattaccctgctgccgtagtttgcagcacaaaagcagccacagacaatatataaatgaacaggcgagactgtcttccaataagtgtattatttattttttacaaaaatagttcacaggttggatttgacccatgggccatagttggccaacttttggatacagggtctcacaaacttttttttttttgatacagagtctcactctgtcacccagactgcagtatatcatgtggagttcgatcatggctcactgcagcctcgacctcctgggctcaagcaatcctcccacctcagtctcctgagtggctgggactacaggaatgtgccactatgcctggctaatttttggatttttctgtagagatgaggttttgccatgttgtccaggctggtcttgaactcctgggctcaagcaatccccttgactcggcctcccttgggattacaggtgtgagccaccacactcagtccaagataacttaaaaaaccacatatcccctcatacattcttagatgacatcaaacactttaaaaaatcataaatgtaaaaaatttgtaaaggaaaggatggattttggtatattgcatattacatatttgtgtacatgttttcttcacaatcttggagttgcacatttagctcattcagttagggaaaaatgtcttccgtgtagtttaaatagccgagccaggtgttattgtcaaaccaatcagcctaatcaggcttattttgacgttcagaaaaaaactgacaatttttcaattcaaatgagtgtgttaatgcacagtttcatgataaccatctcactttagaattctcattctaaagcagcagacagatgaggcaggagcctcgacgtggttgcatattcctttctgaagccctctttgtttaggagcaatgcattcttgaatcctcccttactggtgactaggagtgtttacaccttagcctgtgcaccgtagattcagggtgtgggaggatttagctgttctgttgtatgataggagaaggagaggtgataaaaaggggagatgggtaaggaaaatccacaacttctggaaacaagtaccccaggagggagaccacgctattaactgagagactgccaggccatgctgggcactggggcacggtgggacatgctctggtactcagtgggaaccctgctgacagggtctcccctctgttgagctgaggagggtagacctatctctgaatgggaggggtgtcggaaggggattgggggtgggctgccttatcatacatctaaaagctcttctataggctgtgcagaagccacaaaatcaatctggaagaccccaattttaggaagtggttggccctctgctatgcttctgaggggtcagaactcaagccaatggggaagactcaggggaggcagttttatttagtttgtcccttgtcctggagcctctcttgttgaacttcatctcctgcaggtcacccaataacttgcctttctttcttcctctccctccttccttctcatctgactctgtctgtctggaaagactctcctctgtctgtctctagctcttgctctgtaagaaagtggacttgtgaaagctgcaggactcttggcacacaacaacgccatccagcccctgctctaatagatgaccaagctctagcactgcttctggcaaaataaggctgtgtccgtaggatgaccctagccccccgataaatgcctgcctaagaaagctctctgctgccaggagaatttaccatttgttctaacgaacacctgacaaagaccctgaccctttcttagactgtttattacaaaggacttataattatgaatccttcctctgtccctttgaaacatagatacagtcatctcttggtatccatgggtggggaagggattgattccaggaccccctgaggacaccaaaatccatggatgctgaagtcccttgtataaaatggtatgatatttgcatataacctgtgcacatcctcccatgtacttattttattttcgagacagcatctcactctgtcacccaggctggagtgcagaggtgcttcactgaaatgtgatctcacctcattgcagcctcaaccttcctgggctcaggggatcctcccacctcagcctcctgagtagatgggactacaggcacacgccaccacacccggctaatttttgtatttcttttttgtagcaatggggtttcaccatattgcccagactggtctcaatcttctgggcttaagtgatccacctgccttggcctcccaaactgctaggattacaggcatgagccactcataattactcataatactcaatgcaatgtaagtagttatactgtattttaaaaatgtgtattattttttattgttctttaaaaaattttttttccaaatgttttcaatccacaattgattggatccatggatgtggaatccatggatatggagggctgactgtatatcccttacaactctgaagtgccttcctcaaggacctgagagccagtcctttgaaatataatcatcaggaaggatagagcctctgtccccaatatccgtgggaggttagaatcctaactttgataattgccagctagcagacacagctggcctcatcgcatattcagggactaatcctttgtaatatttcacctccctgactctatgagccctcgctcacccgtctccctactcctccatctccctttacaatgtcagtcacctctgcacaaattggaatggagctcagctctttccctgctgtcagtagagactgaatcaaatctgtttttgctgtcttaagttatgtctggctttgtttgtctttgacacttggaaacaattctgagtgtatttgaataaaatggttttttttccccctttcttttccccagtcactcacatgcttcaaattcattgatactccacagaaatctgctatttggtcgctggtttaaatacttgcttccctgtctgtgaagggcttaagtgcccctgttgggaagtcaggcagatctgagccttgtcacttgtcagctgtgtggctttgcgtgagttctttttttttttttcttttttttttgagacatagtctcactctgtcaccaaggctggagtgcagtggcgtgatcttggctcactgcaacctctgcctcctgggttcaagcaattctcctgcctcagcctcccaggtagctgggattataggcacccgccaccatgcctggctaattttttttagtggagacgggggtctcaccatgttggccaggctggtctcgaactcctgacctcaaatgatctgcccacctcagcctcccaaaatgctgggattacaggtgtgagccaccgcccccccggcctttgcgtgagttctttacactgtccatcctcagtcttctcctctggaaagtaggaattagaatcactacctcctagagttgtcaggcagattaaaaaaaatactgggcctggagagttcccagcacagtgctgatatctagaaagcagccattctcacagttttcacccccaccccccaccccgtgttgtttcccccagtcgctccagtgctagtctctcagagacagtggcccaggcagggcagacccacaggatcgcagcagactgtctcggctagctcccaaaagctgtgccgagcacaccaaccctcgggggtcggcctcacatctctgtggttttttcagtttcttcttccttttgcagaaccatttcctgccagcacataagtgagacaatcttactcattaaagcacaccctcaatgctcctcatgggccagcatttgttcagcagatgaattatgagtgccgactctgtgcctggcagtgggatcagcacctgggacattgagaccaatccaggcgagctccctgccctcaagcctgtgtagtgagagttcccaggggtgatttcccaacttcatatctgcctcaagggccccagtcagccagccctgacctagaacattggggcactgcccctctgtccttgctgggggtttactatgctttttgctttaattattattgttattttttaagacagggactcactttgtcacccaagctggaatgcagtggtgcaatcttggctcactgcaacctccgcctcctgggctcaagtcatcttcctgcctcagcctcctgagtagctgggactacaggtgtgcaccacctggactcagctgtttttttttttttgtatttttttgtagagatgggggtctcaccatgttgcctaggctggtcttgaactcctgggctcaagcaatcggcccatctcagcctcccaaggtgtgaggattgcaggtgtgaaccactgagcccgacctattatgcttttaatacccacaggtgcatctggttttcctcctttgactctgtgtatatcacgcctatggcttcattcttccattcattctgtgcccaccagacatctccactcctctttcctgggtggcctgacctcttggcatcccctctcccagccaatatttgttccctctgtgattcaaatgaagaggactgggccagatgagtctttcctgagctgtagtttcctggtgtatgtatcgtggtcccgccctgatgctgagtgtgctctcccttctcttctgctgcaggtcactggtgcagtcacgacagtaggtgtggcagcaggcctgctggctgccgcaagccttgtggggatcctgctggccagaagcaagcgggaaaggcaataaatccaagaaattgtcccaacaaccaccaattcttacggaggaatattatttagccagcaggagtggagtttggtttactgattttactgttttgtgttcatgaatctttattttaatggagttaaaagcacaggaaaatgtatttggaaatgcagcttagtatgaattctattaaagacacaattgggctctgc

SEQ ID NO: 83 - DNA, 37577 bp, Homo sapiens
agatttgactttcgagagttaccatcctttgttagcaaaaggataaaactagggcccatgggcccttctgacttagccatttgttctgggtatgaattccctaagatttctctaaaggagtttctatacctgcctctttacttgtaagaaaatgaagatctgcataaaccaggcagacagtgttatgaaggttaatgccatgggttttaaagtacattttgaaaagcattcttcctttccaaccaccaacaaagggattccaaattacacctcttcctaaacgatgcaacatgagtgagcacataggcgagaggtcgcaggggatgataagagggttctagccctggagcctggctttccagagaggctgtggccaaggttttacgctcccatttggcctcctgttcatatgaaggaaggcccaggaccatgagttctcagatccgcgggctctgagcaaaccgggtgcaccctgactcggcttcatcctctctaactccacggtggcgacttgcatgggagagaggagcaaccaacaacaccttcgggctggttagggggtttaggagacattggttttgtacagacatgacttgatgctggattcccactttcagaagacaaactattcagttctgcaaactccacaatctagaataaggaattagataaccaaccccctccttcacttaacagttaaaaatcatacaggactctgaaaacaaaacaaaacaaaaacttaacctttcttagatcctaaaagcgttccttggatggaaaaccaactcttccactggctaaagatcaaaagcatctttttctctttaatggggccacagttgggcaaaacgcccatcactttaaaaccacctctcggctggaagtacgtaatttttagcgagtcacagaaaaatagggaaacttatgcggcgtttccttggccacttccccatctgggtgatcatgtactcagacccagcactgcagcctgggggtgctccccgtgaggaggaaaaggtgtgtccgctgccacccagtgtgagcgggtgacaccacccggttaggaaatcccagctcccaagagggtataaatccctgctttactgctgagctcctgctggaggtgaaagtctggcctggcagccttccccaggtgagcagcaacaaggtgagagaatgcagagctgcaggtaagaggctttggagagagagagagaaagagagagagggagagagagagagaaagagagagagagagagagagagggaggcagagagagagggaaaggcaaagagaggcagagagagaggcaggggggaaggcagagagaagagagagagatggagagacaggcagagagacagaaagaggcagagaaacagagacagaaagaggcagagagacaggcagaggcagagagacagagagagacagaggcagagagacagagacagagagagacagagaaagacagagacagagagaggcagggagacagagagagacagagaaagacagagacagaggcagagagacagagacagagagacaaagaaagacagagacagagagaggcagagagacacagagacacagagagaggtagagagacggagacagacagagagacagagagaggcagagagacagagatggagagagacagagagaggcagagagacagagatggagagagacagagagaggcagagagacagagatggagagagacagagaggcagagaaacagacagagatagagggagacagagagaggcagagagacagagagaggcagagagacagagatggggagagacagagaaaggcagacagagacagagaccaagacagagggagagacatagagacagagagagaaagacagagagaaacacagagacagagagagagagacggagacagaagagagaaatctgggagtcgggacacctgagtccatttctggtggaggctcaggcgactctccggatttctccagacctcaggaacctgatccgggtgaccttccttgcccatgaccttcttcacctgtgtgaaggtggctggaagcattacttgatatttctgggcctcagtttttctatctgtcaaaagaggggctggatcagggggtttctaaggaccttccatgattctaggccacaagtaaaatcgcagtggaatctaacacaagatagcggaccactgagacccgtttctaccgcatgaggctgcacgtgggatgtgcactgaatggagggctttcttccttagaagcctcatgagattttctggtgtgaaaagcttgatattctaaagtcactgtggattctctaatgcctggctctcgggtggttttctgggagaggtagtagagtgtggttagggctgcggtgtgtccccagaggcgaactggcctgggttctgagtccagcttgcctgggatgagctgcgtgacagctcacctgctcagggtctccatttccacctgcaaatagtaaggtcaagggtgatgaggagtacagtcgatgaatccaagtagtatcaagcactcaggacttaaggtcaccctcacacaggggaagaaggtcatgagtgaggaaggtggcccagatcagacacctgagttctggagaaatcaggaaagttgcctgaggctccaacagaaacagactcaggtgtcctgactcccagatctctctgtctgtctttgtttctctctgtctgcctgtttctctctctctctctgtctctgtttctctctttctgtctctacttctctctatgtctctgtttctccctatctctgttcctctctctgtctctcttaaatcatggcacacagtttgctcttgctgtttgaagctccttctctttaattgcattcccttttgggggcctttgctcttcttagagcccttcaggactcctctacccccacccacaactctgctgtaagatctttgtcaagaccctacattgccctgagttctctcttgtgtgagcagaggcagccaaatgtccagaccttcctggaacctcccagcgccgcatggctgcagtgggagctgccggccccctttctgcactccatcccacctcctgcacactcacctcttccatgcccatttcatcagctctgccctcccaaggccagtgggcttcccgcccagctgatcatttggtattaccacatgcacagacacgggagagtgcctttcttctaacctcatttagaagtttgtccatttggattgtattttggtacttggttaccctaaaaggcaagaaggaagctcggctgaatgtttcagggcagctatcctctctcccggggtcttcagttggcctgggagcctcctacccggccctgctagtaggggttcccttctacatccccactcccaccccgacctccaaagcctgtttgacaattagagctgagggatccagaacatccacggaccccgagcccccctcccctccccctggagagcagagttggcctctagcagcaacaggactgaagcagagcagactcgggttgctttttcatgttttcattacggctttccataggggagacactcgatcatgacagtgtctttgcccagtggttctcaaacttgagcccgcatcagaatcactggtgggcttatgaaaatgcagagggctgaatgtctgattcagtaagtcctggttggcgacctgagaatctgcatttctaataagtgtccaggtgatgctgacaccagtgctaggggaccacactttgagaaccctttccttaggagacgtgtccagggccaagcctgtgggggagctatctcaggacaagggccttttgagatggtgccttcacatctcctgagggtcttgtgaatatttggctgaaggccttgtgaatatgtggctgattctgattctcttggtctgaatttttcataaatggtgtttgtgctgccggtccatggaccacactttgagtagaaaggatttagaaagtctgggaagaggtcttcttatttgggggcaaggaagaagttagtgtaaagttttggatggatcctaaattttctagagctaatattcatgagaatgttttcttaaatgtctgtggtaggcagaattctaagatgactctggctgatccatgcccttgtataattccctccttgtgggatgtgtgaatagatggaacatcactaccatgattaagttactttatgtgacaagggtgaaggaattctgtggaagtaatttaggttctcaatcagttgacttgaagttaataaaaaaggtcacatgctgggtgggcctgacatagtcaggtgagctatttaaaagattacatgtgctgggtgggcctgacataaccaggtgagctgtttaaaagaggatcaggaggtcagtgtcaagtggtcagagacttaaagcagcagcagatgttgttttttttccattggccttgaagaaacaaactgccctggtgtagagaggacctcagggcaggaaacatgggtggcatgtaggagccgagagtggccttatccaggaagaaattgggggctcagtcctgcagtcataatagccctgtgggcttggaacaggaacctgtgctccaggaaggagcacagcccaaacgataccttgatttcagtctggtgggaccctgagcagagacatctcacctacagcaatgtgagctaaccaatgcggttgtttttaagtggctgagtctgtgctggtgtgttacacggcaatagaaaatgaatacaaggtcctgatacttcactttgattgtggtgcctgccctccaaggtgtactgtggcaatgacctcagtagcttcatacaacatgagctgatttcttgctcatgctacagcatcgtcatgggttaactgcgttggactatgacgactcatcagagccactcggggacccaggtcattgtcaaaacagaatttacggagaccagcagtgggacgcccattgttttgacacaagtgccggagggtggagattattcctatttatcagaagcagaagcaggcatagcaggagcaagtgagtggattgatggatgcaggaggacctcagcctgctgcccagatggcttgactgtgccgtgctggcagcatggatgaacaagggctcagcctgcaccatgcaggagagagctggcaagagagcaccagctgtgaaatgcacaggcctggaatcggcacttgtttttctcagtcacgtgccccgcccgacttcaagggttcagagaagtgaatattggtgaacatgagtgtacccaccatgtagggttacccagttagctcatttggggtgggagggagggacgcaggatttcagctcaccaagcttcacagagctgctcccgccaccaaggagcgagctggccaggcatctgacagctgagaggagctggaggggctaagaatgcaaatggaacacttgcccacagacccagggcaagccagaggtttcctctggggctttttgggtctggtctgtggaaacccagcaaatctgggctatcttcaagttgaagatcaggttttcttttgctgagggtgagagattttcccacacagtagagataaaaatccctgggtgttttcagtgttttttttttttttttttttgggggggagaatggctgacttcttgttacttggacaccctggacacagggcttgggacaattgccacccttggtgcccctcagaggacaaggtgggcacattttccagagagtggaagatgatctttcaaagcatacaaagaaaatcccatctgttttgacatcttaaaaactttggaagaaaatatttccaaaacatacatatgtatatatagtagtgagtatatatatatgtgtatatatatactgattatatgtattatatactcagacccagtatatacacatatataatatatactgctataatatatatactcactacaaattgacgccaaaaagatacctttaaagctttgccaggaggaatctcatttggctctaaaggccctttcccactagggcaggggaattaagcctgctgctacatgtattgctgtctgagtcggctcaaatctacctctcttgctttcattttgtttcttttggggagatgttcactcttccagtttctcaccagcaccttcttctagccaggaagaagcctgagaagagggggacattgtgtccccagggagtggtgggcagctgatccacacgtgctgacctggggtaggcactggcttctgtggagatgtccctggaccttcctggtcatgaggtgtcctgtggaatctactgctggcgtctgtgactgggaaaacccgaggtctggtgcctcagttgtcagagccagtgctccatccgaggtcaccccgctgtgcctctccctggctccacaggttctctgcatcttggccatgaccttgtttcttctgtggcttagactgtccaggtgatactcaaaatgtttagcaaccagcagggcatgagtaccagcccatcagaaaagatgctacagcacctgttgctgcacctgaagagctccgaggagcaccaggaaagccaagggagcagaaggtggagagctcagggccttggggaagtggttatctaccaagaggtggggcagtcttcccccacttggcctcactgctccttactcactgaatatcctgaagctgtggctacaggtcatcttgtctttcatcatggcagccccatctcagcccagatctcagtttaccttccattctctcctgggagtgcaggggaaggtctgaatctctcccatcagtgaagcacccctttacctaacagccacaccattatttccattcttctttagtgccccttacttcaccaaggtgggattcctccagagatgcaacttggaagcagagcaaaaattcttctgcatccagccctctctcttttacctcttgtccctttgccttcaggtttcaaacccagaataagaagcaggactgcctgcctgattcctcttgtaccttccctcctttagccctggagcccaaagggtctttttcttctactgacacttcctaccaggaaggaacttcccctgcatcatattcacttcctttcctctttctgaggaggcctttgctctctccctttcctggggctgtagtggcagaagaatccagaatatcaaggaggaaaacacattgggaggtaattgcaatattaccttcattgcgtctgtgttgcatgtactgtcccatcctagagaaagaggagtttgaacaaaatttaaactgttctttgtgattcaaggaaatcattaggagcatcaattgttttgtgctttaatgtcctgatatactcagtagggcacagtaacatggaagggactgctggtgtctgcgcttaaaatcccgaaatggctgtgtgctttggttctcgcacctgccttaatggttttcctgtctcctctgttactgggcaatcagctgccgcttttttcagtgtgtgttttcttctcctagccttctccctctttccaatttgccatctggaatctgcttttgattgagcattctgttcacctgttgttgcatgaaaaactatcccaaaacttagtggcttaaaaatgacaactattttatgataactcctagtttctgtatgtcacgaatttgagggctcaactaggtgattcttctgctccatgtgtctgattgagttcaaacagtggtgctcagctggtgaatggactcatctggagggtccacgatggcttcacttacatggctggtgcctttgcagggttcctgggaggctgagcatagctaggattgtcaaccaatgccctacatgtggcctccctagcaaggtggtctcagggcagttggactgtcttcgtggtggctgactttccaaggaagccaggcagaagcaagcaccccttggaaaccaggtggaggctgcatggatttttctgatctagctcaagagttcacacagcatcacttctgctgcattgtattggttacaccaagttacaggccagcccacattcaagggaggtgagttagactccacctcttggtggcagagtggcacagtcacattctagaagaccatgtgggatgggagatactgttgtggtcacctctggaaaatacattctgctactcttaaaaactagtgacgctcatacaaatcaacagaaagagcttctgaaggaagactttaaagctgcttctgtgagtgaaatatgctacatgcctttgtaccaggatctgattggctgtctttcccctactcagatcttcctgtccttgtttcttctgtctttgtcttattttagatgggcaggttttctggatgactgattactcaaatattttaggtgtttcccacactcagattataagacagaaagcaaaatttgttttaagggtgtatgtctgttaacaaccaaccgctgctctaatgccagagcttccagttactaattaactttatccagcaggtagcccagcagagctggaagtccagttcccaggagacctcagaagtcccgagttgtggctctgccgttggtggccatggggacttcggcaagagagttgactgagttcagtggttgtctgctatgactcgatgctttagaaactgaagctgtatctaggactgaggaggcctaagctcaaatccagattgacttagagttccagggttttagacctgcaagagacctgggaggtctcaccagcccaacctctgtattttagaggtgaagaaactgtgactcagagattgagcaaatgactatgtgtttgcctaagatcacatagttagttaatggtagagtgaagacaggaacccagttccaacctccagctccatatgctgtcactgagataaaaaccttagaattcctggcagccttgaagatgtatacgtgtgtatgcatctgtatgtatttagaattgtgtgtttatatgttaagcacgcaacatttatattgtgtattttataaagtaaatatttatagaacacttatatgttctataatatggatctatgaatttaggcttatggattccattaggtaaagttgtacatatttttagtatagtaactggtgttagctaagttgccaactacaataccgacgagttctcaggctgggctgtggaatggtcgcttagcaggaattcggcagaatgcagatggtggaagggctgatttctcatcacgtcttccaactgtgtccttgagcaagctccttatctccctgagtaccgggctctgcttctgtaaaacactgatgagagctactgcttgttgaacactttctttttgcagcactgctgagctcattacatatggtgtgacatctactcctcctgtagtgcacaccagggtatgcccatttcacagatgaggagactgagcctcacacaggtaatgtaacctgcccaccaccctgctgctggcaggaaggaaggcaggattcccacttctctgtccaggtacactgtgctcttctgtatacactttctaactctcaaagttattggaaggtgtagacagacttctttggagcttccccacagggtcgaatatgactaataaatgaagttaagagggaggaaattttgggatccaaaatggcagacatttctaattatggatacttcccaagactggcagtgtgcatctcgtgatggggtaagcttgtcttctatagaggatgctgggtttcagaagactgtttgggtgggcagatagacttaatggcttctggaggcccctctagctccaggtgttgatgcttttacagagcagagaacgagtgccaaaaccaaggattgtgtaggcttgggtttacatcctatttgtcattccttagctctgtgaccttggacaagtgacttaatgtacccaagtctatttccattgctccgtgtttataatggggatgctgagctctaccagactcatgagttttgtcctctggagttgttcagggtagtgcattcctcttacacaaataccaggctgggagaatttgaagcctgtgggtttgccctgcagatgcctagggcctcacaggtagagcttcctcatcagtcattttggaggaggatggtaactgttccaggctagaggagtggtcttgctgggtgtcagtcagggcagggtctaatgcaggaggcaggtgaagcaagtgtttgttgatggtccagcctgctgggggcttggaatgacccagactcacagggaatggaatgttgatacaggatttgaatgagcgaaaacatgagttgagttggttgactgaacttgaccaacttctgtcccaagaaccactgactaagagacacttcagtggtggttttagcgagaagggatgtttgctggcagacagtataaagagagcgcctatgccttggtggaaccatctgtatcagtttctgccgatttgctcctctgagattcagcccaatgtggcctaatgccctattctgccaaagatgggtctccctgcaacgtggcctccaggaagtgatctgtctcaccagaccccaccagggatgggaggctagtgtccaggacatcgccagctatcattctgacacagctatgcagaccaggaacagtctcagcctgctgcttggaagctcattccttgtctagcttttttctttcctatagaacaaaagcagtttctggacaactcatctaggtttttgttttgagccagcacatttttcaataaaagctgactgaaacctggtcatgtatttctctgtatctgagtctagaaagtcttccctcttaaaattctgttatttcctagggcttagttaaaaaatacattctatattgtttcacctttgaatttataaaaaatttccaggttaattttgatgtaaatatttatttcctcatgggtttcaaagaatttatacgacatgcgtaaaacatgttcgggctcctaggaattcattttacacactagaagtgactcagtgataggtgtaaagcctgatagctatgtgacttcattaacattcagcacctgccaccgtgtttttgttctttgaatgactgtgccacctgactcagagatgagacagttgcctaaaaacttctgggaacaaggtaatgatagaaatagagaagagtttcatcttctaggtgaattcagtccagatatattcaaatatattatcaaaaaaaattgttactccttctacatgctggaaaattcctttctggagctatcgtttacttactagtttctcaatctgttaaaaaaatgtattcctgcatgtattctgaagtattcagaggtgaagtttgatgatgtctgcaactttcaggtgttccaggagaaaatatgtctatgtctatgtctgtgtctgtgtgtctgtgtctgtgtctgtgtctgtgtctgtgtctgtgtgtctgtgtctgcgggtgtgtctgtgtctgtgtctgtgtgtatgtctaagtctaggtctaggtctgtgtctgtgtctatgtctatgtctatgtctgtgactttgtcccctatctgtgtctgtgtctatgtctctgtctgtgtctgtgtctgtgtctgtgtctgtgtccgtgtctgtgtctgtgtctatgtgtaggtctaggtctaggtctgtgtctatgtctatgtgtatgtctaatctaggtctcagtttatgtctgcgtctgtgtctgtgtctatgtctgtataaatgtctatgtctgtgtctgtgttggtgtctgtgtctatgtctatgtctaagtctaggtctaggtctgtgtctaagtctatgtctaggtctatgtctatgtctatgcctatgcctatgtctatgtctatgtctatatctatatctatatctatatctatatctatatctatatctgtatctatatctatgtctatgtctgtgtctttgtccctgtctgtgtctgtgtctatgtctgtgtctaggtctaggtctgtgtctgtgtctgtgtctctgcctgggtctatgtctaggtctatgtctacatgtatatctctgtctgtgtctgtgtctgtgcctatgtctgtgtctgtgtttgtgtctgtgtctgtgtcggtgtctatgtctatgtctgtgtctgtgtctctgtctgtgtctgtgtctatgcctatgtctatatctgtgtctgtgtctggctgtggctgtgtccgtgtctgtgtctatgtctgtgtctatgtctgtgtctgtgtctctgtctgtgtctatgtctgtgtctgtgtctctgtctgtgtctatgtctgtgtctgtgtctctgtctgtgtctatgtctatgtctatatctgtgtctgtgtctggctgtggctgtgtctgtgtctgtgtcggtgtctgtgtcagtgtctaggcctatgtctatgtctgtgtctttgtcccctgtctgtgtcccatgtctgtgtctgtgtctggctgtggctgtgtctgtgtctgtgtcggtgtctgtgtcagtgtctaggcctatgtctatgtctgtgtctttgtcccctgtctgtgtcccatgtctgtgtctgtgtctggctgtggctgtggctgtgtctgtgtcggtgtctaggcctatgtctatgtctgtgtctttgtcccctgtctgtgtcccatgtctgtgtctgtgtctggctgtggctgtggctgtgtctgtgtcggtgtctgtgtcggtgtctaggcctatgtctatgtctgtgtctttgtcccctgtctgtgtcccatgtctgtgtctgtgtctggctgtggctgtggctgtgtctgtgtcggtgtctgtgtcggtgtctaggcctatgtctatgtctgtgtctttgtcccctgtctgtgtcccatgtcggtgtctgtgtctgtgtctaggtctatgtctacgtgtatatctctctgtgtctgtgtctgtggctgtgctgtgtctgtgtctgtgtctgtgtctgtgtctgtgtctgtggctgtgtctgtggctgtgtctgtggttgtgtttgtgtctgtgtctgtgtctctgtctgtgtctatgtgtatgtctaggtctaggtctaggtctgtgtctgtgtctgtgtctaggtctaggtcttggtctcggtctgggtctatgtctatgtctatgtctatgtctatgtctatgtctatgtctatgtctatgtctatgtgcctgtgtgtaaatagaaagagaagaagagggagagtgagaataaagcgaatgcagcaaaatgttaacaatggcgaatctactgaaatatatacttgcatttgtcatactatgctttcaacttttcagtctttttgtaatttttaaaaattaaatgaaaaggtggagtaagcacttacatccttttaggctatatgtactgtctatgaccagaagctgcagacacctgggaatcaaaggcaggtaacggttacctgggcctcagtgcgtgctctaccacctgtccaactcagggctgtgcatcagctctttctaccttccagcattctttttccttcctttcacacttcacacatttttgtctttttcttatgcctggtcctgtttttcatcatatgcctctgttttcttatgttgaatgtggtgaaacatggttatttgacaaaaaaaaaaaaaaaaaagatagaattctaactcaaatacttggaaggagctgcccttgaaatttctttcttccagtaagaaggtcaactcagattccagcagaaatgtcaagttgtctgtgatttaaaaactcatttaaagaaagtaggccaggagaatagtgttttgctgcaaacttctgcaaaactaatttgttttcccctctgggcctgccaaagatttactgtttcccacgctacagcaattttggttccaacctttttctgaggttttgattattgaaaactgtcactactatgtgtttgtggtttacttgtctgcagccacatcctagagaagtcacagtaaagcagctcttttgctcaagtccagggagagaaaccaagacaattcccttggctggagatggtggtgggggtagatgaggctagcagttactggaggaggacagcattttaggattcgttctactggaacaggatccttgttgaaacacttcttctcacccatccagccatatcatttgaagaagagagttaacttgaaactcactttacctgtagaaagaagagacttgattagatttctcaaagactcttcagctccatagctctgtgaagcgttagctactgactgatcctgaatggcacagcctggatttctggtgtcaaagtaattttaaacatggttacaaaccttcccataattcccgtaagcctgaccctgagagaatgtgagcatggtggggccctttcatttgaggggaggctgcacgtcagctcctgactttgagtcaaagtgacttttagagtcaaccagcagaaactgtttacctgaaatagttgagtatcagaaagaagactgtgagaacacaatgcctgacagtacctggcagggctccttcccctgggatctttttataaactctggaaaaacaatatattgggaataggcttggctgtgcgtgacagaaagcctggacacataaaaaaggtagtccagggtggtgggcggcttcacgaagccaccaaggactcaggttcccctcttactgccctattgcattcagtgagtggtctgtaccttgtagttcatggtagtggccacaatccagccaccacatccacactgagcagcaggaaggaagattagtggagacctcccagggggatcacatgacacttccacttacatctcattgatccacattttgtcacatggccactccttgttgcaagggatatgatgggaaatgtctgtgtatagagggccatgtgcccaggtaagattcgggggttctattattgggaaagcagggaggacagatattgggagaagaaactagcagcatctgtcatagaaggtgtattttcaaagagcaagggctttggaatcaccagtgctgggtttaaatttcaacatctgcttactagctgtaagatctcggccaggccttttaacccctttaaactcttataatacatcctctgtaaaatcagcatgatactcagtttgtggggataaaatgcaagaatgaatgttcaatatttggcacaatagctattgttatacactagtccctaaaacaccagctttgacttcatttacttatcctgatatatggtattggttagctacagtgtatttaaattcctacttctttcatgttctaatggtgcactaatgagtctggcttggaccagtatagttggggatgtgataagctaatgcgtgtccaaggaggacacagcagcttggtggatgtttatgtgaccttcatctggcaaacctgacagtatggttaggggtaaagtcacaggaactatttgtgcttcagaaactcgtgaagaatagtattgtgtagaaacagagtttaagggagaaagctccaggctagatacatagctaaggggaatatctcaggtcaccagaagggggagctcagactgtaactctgagtccttggactcagggttccccactcacgagggagggtttctggagtgcgagggtcggttcctcaatgccgcaatgccgccctggatttactgcaagtcattcccagagatatctgtgcaaggagcagggaacaactcaaggtaaaagtggctgggaatttttcccctggattcattcacaactcctgccgtgggcaggcttttagtcataagtattccccggtatgttctagtgtgtgggccatgagggctgtgagcaagaccagggctctgccccaaggttgtcaccatccttgcggagccagaagagtcaggcatggcagctggcacgactgctcccacttccggccctgccgatggccgggtggggcattgacttgctgtgtcggatggaatgtgagcagacaagagtgagttagttcccagtgtggcctcgtgtgtgcttttggccgcatcgtttccagtttcgccatccccaaagaggatcatctcccaggaagcttactggtccaaggaggatgagacacccatggagcagacttggaccccatctgccgctcagagccaggcctaaccctgccaagtttaggttaaccaacttccatcttgcccacagacttgtgagcaagagtgaacgaccgttgtttcacaccattcagttctggggtcgttggtttgttaagcagcatcgttgtggccgtggttagcagacacagggaacacttgtgatagtgtgagaaggtcatcagggagacgaggagggcatctgacactccagtctttggggggcatgggggaggactgcttcataaacttgtacaagctatttctgttttggatttcttgttgcttttctccctgggatgctgtagaccagagtgttagcaggacaccaaatctcttggcgcatgtcagagttgtatgtaaaacaggagttaatccgtaggggatatagggaaaactctctgacaagtgaaatatgaggactcttgggctttgagtgatccattaactcactcattcattcattcaaaaaatgagagttagggacagaactgtgaataagataaagcagggttctgtcaaccaaaaagtatctgacagtcttaataatttagaagcttattttgccaagattaaggacaatgcccaggagaaaaaacatggaatcacagaaaaagcagtctgtggtctgtgcctttctccaaagatgattttgagggcttcaatatgtaaagtttttcccctattgaaaagcaggctggagggcagagagggagggtgcagtcattactgaatccatgtgttgcaagggaaaagaaataggtagggaatagtcaattatattcctcttatactcagtaaatctgctcttcacatatgataaggtaaacatagagtggctacctgtggagaatttttaaaatcttttatctgtacgctctctgcttaggaacaaaaggaaaggcagcttcttgcaggactcagacttcagcttatttttttccttttggcagagtgaattgggggtcccaagtttttattttcctttcacagtccttccatcagtggagcctgaattctggagaggggagacaaggctgatgatgaatgccacagagaatgacagggaagggaaggaaaacatggagtattgggattaaaggtggtgcaattttagatagggaggtgagggagacctcacgaagaaagtgaagtccgagcagaaagggcactggcagtggccttagctgaggaagcagcatctctggccaaggcgcaggaatggctaagggaggtctctgcagagacagcagcttatggggcagagcccctctgccaagcacgcctctaggtgctacaaggattcgactttagatatgttcagtgaatatagctgcagagaaacaaatccaaaaattttgagttttgttcttaaacagagtaggccaaaaggttcccattatccagtgaagcttccagaccctgcccctaccccgtcttcaagggattctctctgcagggttcttggttcctggtgacacctctgtttcctcccctaggccacgtgctgctgggtctcagtcctccacttcccgtgtcctctggaagttgtcaggagcaatgttgcgcttgtacgtgttggtaatgggagtttctgccttcacccttcagcctgcggcacacacaggttagaagtaaacctttcagatgcaaaaaggcttgcctgtagcttcgctggggaaagatgttatctagagaagtttccttgtcagaaagcaaagtgtgggccgagctcggtggctgccggctgtaatgttagtacttgagagccctaggcgggtggattgcttgagcccaggagtttgagaccagtttgggcaacatagagagacccacgtctctacaaaaaaaaaaaaaaaaaaagtagttgggcgtggtggtgcgtgcctgtagacctggctacttgggaggctgaggtgagaggagtgcttgaacccagggaggttgaggctgcagtgagtggagattgcatcactccactccagcagggcaacagagtgagaccctgtctcaaaaaaataaaaaaggaaaaattaaaaaaaagaaaaaagaaaagaaaaggaaagaatggtgcgaatgtgcttgtcaaagagcaaactgaagaagtgacgtgtttgcccttaacaaagttgcctttggagtttaaccatacgacgtgccagaactaaacttttaccatctaaactcagctcagatttacttttaatgatgagaaatcagccagtgaaaactatggccatagtttttaatctttaattttttgtcaccgtagaaacctgatttaactttcttcacaaaacataagttggaatggatagtagcactgaacttgttatttggaaattttgaaagtataataacggggtagggagggagtttaatagtaccccagggtgtaggtctttttgttagggacaaatgacatctttctcaaatgtgctccaggtttccctgccagaatcaggatcagtcccaggtgcagggaggttttatgatctgagcaagttttggacccaaagcctgaccatgggctctctgtccttcaggggctgccagaagctgccggtttcgtgggaggcattacaagcgggagttcaggctggaaggggagcctgtagccctgaggtgcccccaggtgccctactggttgtgggcctctgtcagcccccgcatcaacctgacatggcataaaaatgactctgctaggacggtcccaggagaagaagagacacggatgtgggcccaggacggtgctctgtggcttctgccagccttgcaggaggactctggcacctacgtctgcactactaggtaagtctccctgtgcggggctggggaggggatcctggcaggatggaggcttgtgagggtcttcagtcatgatccggatctcagaatccagtgtacaaaatacaaatccagtgaatccacattgcatcccgtttgctgttcctgacaccccccccaaccctacagtctcattctgtctccatttagtctttgctcaaatgccacctctttggagacaacgtccctagccattttagctgacaccgccctctgtcactctctccttaccctgctgtagtttccttgcgataagattttcccatctgacacatttgtgtgcgctactgtatttaatgtttgtctacccattagaatgtaaactctgcaagggcagggacttggtctatgttgttcactgttgaagccacatggtaaggaaccaagaaatagacatagaataggattttactctgaataggattttagagctgggtgagaccttaggattaaattagtccaacactttgggcggccgaagagggtggatcacgaggtcaggagatcacgaccatcctggctaacacagtgaaaccccgtctctactaaaaaaatacaaaaaaattagctgggcatggtggcgggcgcctgtagtcccagctactcaggaggctgaggcaggagaatggcgtgaacccaggagatggagcttgcagtgagcggagatcgagccactgcgctccaggctgggcgactgagcgagactctgtctaaaaaaaaaaaaaaaaaaaattagtccaactgctcgttgtaaggatgagggaaccaagctggcttggaaagttccccaggtggtgcgtggtagagctgactctggagcccgagtctcctgaccctgggtccagtcctcctccctctttgtcctgttgctttcttcccctttaactgtagaaaaaatacacataacaaaaaatttatcatcttaaacagtttttagtgtacagatcagtggcaccatcaccattatccatctttaggagtttttcatcctcacaaactgaaactctgaacccattaaacaataactcccctctcttcttccctccagcctcaggcaaccaccactgtactttccgactctatgattttgacgactctaggtacctcgtttaaatcgtttaagtgaaatcagtctttctgtgactgaattatttcacttagcatagtgttttcaaggttcgttcatgttgtagcatgagtcagagtttccttcctttatgaggtggaatattattattccgttttatgtatgtaccacattttgtttatctatttatccatccagggacacttgacttgcttcctcctttcagctattgtgaatccaatatgaacatggatgtgaagatatctgttcaaatctctgctttcagttcttctgggtatagaccccaaagaggaactgctggatcatctgttaattctatatttaattttgaggaactatcatactgttttccatagtggctgtaccatttttcattcccaacaacagtgccgacactcaatttctctacatactcaccaacacatgttattttctattatttttgataataatcatcctaatgggtgtgaaggggtctctcattgtggctttgatttccacgttcctaatgattagcgatgctgagcatctttttgtgtgcttattaaccatctgtgcatcttcgctggagacacagacatatctcctttatggactctaagtcctttgcccattttaaaaactgcattttgctgttgttgttgagttgtaggagttctttacatttcctggttattaaccccttgccttatcagatatatagttagaaatattttctcctgttctctaagttgcatattcattctgttcatagtgtcatttgttacacaaaaggttttaattttgatcaagtccagtttatctatttttttcttttgttgcctgtgcttttagtgttaagaaatcattgcccaatccaatgtcatgaaggttttcccctttgttttcttctaagaattttatagttttagctcttttgctttttgatccattttgagttaatttttgtatatggtgttaggtaagggtcctgcttcattcttttgcatgtggatatccattttctccagtactatttgctgaaaagactgtcctttccccattgaatggtcttgacatgtcctactccttcttgatggatgaagttttaggcctagtgttggtgatcttaaaaagtttcttggcttcgttcttctgaactaggacaaccctcagcttgattgggaactagtgttttggcctctctcttcagctgcttcatctgttcctccaataaaaacttccttggctttgttcttctgaactaagacaacctttggcttgattgggaactagtgttttggcctctctcttcagctgcttcttctgttcctccaaaggcactgcttgctccttccaccagctggcttcagagtctccagatttcataaactcatttgacttaagaaggactgtacccaggaatatgtacatttagaaaaagaaccggagaagtgagattcttagcacagtggaagtactggtgaatggaaaaatttcagaccacgtcatccccagtcctaggctgggtgtgtgtgtggcagggtatgtggggggtgggaggagatatgaggtagagggtgccctctgtgtgtgtgtgtgtgtgtgcatgtgcgtgcatgtgtgaaattaagaatcttttcaaattaaacccagcttgacactaccatccatatgtctagccccaactataagcaatttagggacaggtttaatcctgtcaatgaaccttgcctaagaagcaggcaaaccatcttctattcttatgctaggaaaatgtggatgcctggttttacaatagctataaatgcatatttcttctttcttttccacagtaaaaattctaattttctctaaggagtactactaggaaaacttcatagcatagtaagaaaacatgaaacctgaagtcagaaagaaagatgggaatcttagctctctcatttcctatctggtgggaccttgggcttatcacttgacttttatgggtgttagttttcctgtaaagaagtttgttgagagggttatgtgagatcacagaatgtgaaggaactagcgtggggtctgccatggtaggtggtcaatatatacataaaaattccctctccttcccaaaaggcaatcctcatgactactgaaagtgagactgtgcaaaaatcagggagatgtgagctgagttctgtttgtcttaaagtttgcttttatgatcaatttttgtaggaaaaaaaaagctgagattgagggggcagtggaaatcccagtgtatgtcaaactttctttgcatgatgggaaggtttacctggctgacctttaatactctttgtcaactgtaagattgggattctaattgagtgagaatcaccagcagttgccataatactctttagcgttgatagtcatgaggcaagagactgccctgttctcatgattgtttaagaccttgtgatctagaaccacgtggtgagtcagagtaggcaaggatgcaagccatcagagaggccaagatttgagcagtagctgcctgggcctccttgcttggtgctctgcaaataaatgccttactttctatcactgcaaaaaaaaaaaaaaaaaaaaaaaaaaaaggaaagaaagaaaagaaaagaaggaaaagaaaaagaaaaaaaaaaaaaaagagaaagagtaggcagtcaaggttatgctgctgtaacaaatagctcctaaatctcagtggcttaaaataacaagggcttatttcttacacatgcaacaggtccattgtgggtttgcagacagttagggacttaggctgaaggagcagtcacagtcactatttcaaatgttattggttggttgctagagcaggaagcctgctttggagggtctctcatggctgttacaactttcatgtagaagggccacacatataactcatgagctaggaagagtccccacagtggggacgaggacatgtgatacaccatgtgctcagaatagggagaactgggcctatttggtgagcagcactacgaatgactatcacgcctttgccatgggggtgccacactacatggggagtgcaagtggtgatcaaattgcccctcacccttctctttcttttgagttatttttatgaagtttcttgctcaaggggaattaccagatcaataatgtgaacagccttgtaactttcaatatgtctactaagcttggtttctgaagatagtacttatgggtactgaagatagatttatgggttttcccagagccttgctgggcttcccattttggtttgacctctttgtagctgtacagcccacttaatttctgtacacctacctttttcatataaaaatgatataatagtaattcctacttcatgggggctggactataagtgaaataacgtgtgcaaagtacacagcacagggtctggcctgcatctactcgctgctggctacctgctgtgtgactgttactcaagtaggcccaggtctttagatttgtcctcagttgcctttattcaacatgtagtgacattacgcatttttcaaggtgagagttaacattctgtatttctttatgcacaaaatataatatttgttcatctattttccctttttaagctaaatataaacagatattggcttcatatatttaaattaattcttcttactttcaagtggtaagcttttatcacatttctttcaccttttttttacattttgttacttgtttggatatggatggtttagattttgctgtgcaagtaatttttacccctatatgtaaaactcgtccttattgtctctgtcaaagtctcatgtgttttaggtagccagaaatttagctgagataattatatttttatatttttctacttaaaagagtagttttaattactgttttctgtcctccatccatttcccacaagtttccagcaaggttttcctcttccctttttccagctctaaggtcttgatagaattatggcagtgaaataatgattaggctagtaaaataataataataataataataataataatcatataataataaagcaaacttaccaagttaatttccccatgcagtattacaaaaatcttttatgggtcttacactaagtttccagcagttttctaaaactagacttcagttggtaaatcattccccaaaggagcaaagggaatattcctttttacggaaacaatggctcttgggaaacaatctctgcatgtggatatggtttcctggatcatgaagttggagtatgcgggggctgggctcaaggagctccagaacctggaaggcataagcccttttgaagaggacttggggatttcttaatgaaccttggtggcattagaatcgggcttgtagacagtcctttgtgaaaaacacagaatatgctttttctgtacaattatgttacgacacttgttgccccccaagtgttcgaaaagatcagggacagaagtattgcaatatagatgttcctcgacttacaatggggtaaataccaataaacccattgtaagttggaaatagcgttgtcacttaacttaccacttaacacttaacttacccaacatcacaacttagcctagtcttccttaaatgggctgagaatgcttacattagcctacagctgggcaaagtcatctaacacaaaacgtattttgtaataaagcgttgaatatctcatgtgatttattgaatactatactgaagtagggtttctattgaatgcttgttgtgtttgcagcattgtaaagtcaaaaaatcctaagttgaaccatcttatgtcgggaaaccatctgtactaatccagaaaatgcagatgcagattttaatagagttggggaaatgatgcttaatttcatttagctttacttttattttgccttgccatttatcttttttttcccttttaaatcagaaatgcttcttactgtgacaaaatgtccattgagctcagagtttttgagaatacagatgctttcctgccgttcatctcatacccgcaaattttaaccttgtcaacctctggggtattagtatgccctgacctgagtgaattcacccgtgacaaaactgacgtgaagattcaatggtacaaggtacggctttaaaaaatgccattttactaaaatgtgttttctttttttactagccataaaagaaagacttaaaatatcgattttctgaagacagtgcacacacacacacgcacaaacacacacatggtttgcctttcatatctgtgagttccacatcctgggattcaaccaacctgggattgaaaatataaacaaataaacaaataaaataacagtacaatacaaataatacaaataagaaaccaacacagtgcatcatctactgtcacatgctgcatgacaaagtttcagtcaacagtaggctgcatgtacaatggtggtcttgtaagattataatggagctgagaaatttctattgcctagtgacatcatagctgtctcaacatcatagtgcaaaatattaccttttctatgtttagatatgtttatatgtacaaaaactgaccactgtgctccaattgcctacagtattcaggacagtaacatgctgtacaggtttgtcgcctaggagcagcaggctgtatcatgtcacttaggtgtgtaggaggctctaccatctaggcctgtgcgagtactctctatgacgttcacacaacaaagaaatcacttaaactgtttctcagaattatcccattgttaagtgacacatgactgtatttacacagggcatttacattgtattagtaatctacaagtaatctagagatgatttaaagtatatgggaggatatccgtaggttatatgcaaagatgacacccctttatataaaccacttacgcatctgtgttttggcacctgtggggaatgtttgctgaaaccaatcccccaaagaaactgagggatgactgtattttaaagaatttaaaagggccgtaattaatatgttctattagtccttatgtgggttgagtaaaggtacttgaaatagtgatttgtgaagacagagtacataacagctgaaggaaataactttttactgtaatttgtctacaaaaatgtagaaaaaagcttacataacaattttatagacatattaaaggagtttttttaaaaagtacatgacagctgggcgtggtggctcacacctataatcccagcactctggcaggccaaggcaggtagatcacctgaggtcaggagtttgagaccagcctggccaacatgtcaaaaccccatctctactaaaaataaaaaattagctgggcgtggtagtgggtgccagtaatcctggtgactcgggaggctgaagcaggagaatcacttgagccctggaggtggaggttgcagtgagccaagatcacgccattgcactccagcctgggaaacacagtgagactccatctcagaaaaaaaaaaaaaaaagcacatgatagcaaacttttgggttaagggagcaaatatgaacacaatttattcccttgtctggttgaatagatgttatttgatgtgctcattgctcctagtgagaacatcagatattgtcattagatattgcttatgtagaccggggttggaaaaccatggttgggccctggaatcaagttgtctcctggatttgaatggctcacaagccaacgatagttgtcacttttttaaatgttggaaaaaaagtaaaagaaggatattttatgatgtgaaaatcacataaaattaaaatttcagggtcggtaaattaagtttcactggacacagccacatcctcttgttgtagtactgtctgtagccgctttcacatggcctagttgtgatggagaccctgcagactccaagatccaaaatacttcctatttggccctttcctgaaaacattggtcaactcctgatagagaccctagattgatactgaaaagtacagttattggcttaatcattaatgagaattaaccctttaattgataataggttaagtagttggctggtttgtaactacagcatctctatataggatattgatttaatattagaaactttgaaatgattttctgaaagtagaggaaagtagccagctcctatgaataagctggctgagctctagaatgcattctctctctctctctctttttaatagagatagggtctcaccatgttggccaggctggcctcgaactcctgggttcaagtgatccttccacctcagcttcccacagtgctgagattataggtgcaagcccccaagcccagcctagaatgcattctcttttggtttgggaaaagcataaagaggacaaatgaaagtttttacctggagaggaaagagcacaggctctggcgtcaatgggtctgggtttgaaactctgttccttctctgatctgttgtgcagccgtggccgagtgactccacctctcgaacctgtttcctctgtaaagtggcaattaataactttcaccacctgggattgtttcaaagattaaatggaatcatgtgtatgaagcacccggtgcagtgcttgacatataaatggtgctcaataaatgtgcatggacaaagatgtcatggtgatgcttagtaatatttattcccttcataataatgatacctattactgcgcatgtactatatccaagcctgttctaaactccctgacatgcaacccgatgaagtaggaactgtaaatatcccccctttttacagttaaggacccataaggatgttcccaagatcacacagccagtagatggtgaagtcaaaactcaaacccaggaggccagttcccatacaccactggaatgactgtggtgctgggctctatttggcatttttcatatttgactactcatgcttagaacaatgaaatatctcctttcaattaaatatgttctaaagtggtacttcatgagccatgtggcaatttcaattttatctgtgttctcgttcggagtaagattctgaagtgactcaaggttatatttgactgttgcaaacgttgaataatcatgattttgaaagtgatgtccctgagaacattgtgtgctcattagggtgtttttagaaatcccattccgctctttctatttcctggaggccttgatcttgaggattctattctgcagagaccccagagaaccttgtgtccatataaaaagtgtggactcgtttcccctatttagtttttcttataacagagatttttctgttactgactcacaaaattgaaatgctttttaaagtaattactgcaacgtcatctcttctgagcattgttgtccaggtcatcatgacgatttatagtgctcttcccagatacttcctaaggcctgaaggtagcagtcaggacataaacatatttgtattttagatggcttactttgtcaaagaagagttcgtctcttttttttccccttggacaaatatgctctaactattgtagttaaccaaatctagcaattttatttgtttatatgttaacaaattccttcccctaataatacagtcaaacgtatgcccaaagtacaaaattggcaaagtaaataccaggacaattcttggattgcaaatcccacattggttgataatgatgatgtaattcatagcctttgagatgtatattggtataatgtcaacttaaaaaaacattttcccttaaggattctcttcttttggataaagacaatgagaaatttctaagtgtgagggggaccactcacttactcgtacacgatgtggccctggaagatgctggctattaccgctgtgtcctgacatttgcccatgaaggccagcaatacaacatcactaggagtattgagctacgcatcaagagtaagtacttgccattgaggcacctatctatcctggttcaataacaagcatgcagagaacaaatgacggtgcacgtagaattccttgcaggtctttggaatgaaggataacggaaaacagatccatcagctctcctgaagcatcaggttaataagacgtgtgtgatactttgaaaggtataaatcagggtgttgttctgagaacaggtgaacgaattgggaaggttatagggttgcaagatgaaggctaaaacacaccactcaagagagtcaaacagtggcttctgtagaaggtacccttggaaagtgtcctgtgaagctttgcacctatagggctagaggtcaccacatgctgtaactttatgttcaattttaggatacttcaattttattgggtattctaaccagagagctagccttgcacatccagtggaaattgccttttatttgtcttccctaaggtgggtctagctgcccttaatagcaatatttcaaatagtcagagctgccattgattaaaaggagtttcgtttgaaaatgctgttttgagcagtattggctattgtttcacatttgttcaacatttactccgtaccaactgtgtgccggacatggagacaggtgtaaccatgtgtaaatcctggactttgccttggagagtgggccacacttctttgttttttatactgaataatgatcacaactggggtcttttgaggggatttcagagagcttcagagacacgctaagtttaaataattggtctataaggggaaaatatatttttctcacagagcatccagagattcagttgcaccgcattttcccacggactgaggtgtcctgattgtgtttgttttacagtcctgtgaggattcgttcatatcagctccttgcttctggacaggccactgactcaggtctcctgaggctttccgtggaccggcacggtcctgtctctgcgatactgtgcatgaacactagggggcagccgccctacatgcctgtctgtgttgtgatcctcccaggatctcagtggctctcaaggggtggtcctgggccagcagcgcctcatcacctgggtactcaacagacatgcaaatctcgggtcccgtggagacctactgattgaaactggagtctgggggctgtcatctgtgtctcacaagcccccgggtgatgctggggaccctcaagtctaagaagcactgagatcctggaggcttctttctctccctggatgccccagctccatagggcagcgcgtgacttggaggaggggaggaaaaggcgtctggccgtggtcgaaaagccgtctgcccctcaggctgtcctgccatgctgtctaatgtgtactcatgtcaggatttcaaaatgctgtttcgtggaagtgaggatgatgaggcccgtcgtggagacaactcacagccctcaccccccaggtgtcctttttgctcatttcaggggcctcgtttctttctttcttttcttttctttttttttttttttttggtttttttttgaggcggagtctcgctctgccacccaggctggagtgcaatggcgcgatctcggctcactgcgacctctacctcccgggttcaagcgattatcctgtctcagcctcctgagtagctgggattacaggcttacgccaccaagcccagctaatttttgtatttttagtagagacaggggttcaccatgttggtcaggctggtctcgaactcctgacctgttgatccacctgcctcggcctcccaaagtgccgggattacaggcgtgagccactgcacccggccacctcctttctttacgttggctctaatcccttggagatccacttctgcctctccagagagtttatctcttcaattaacaaggcctctgtggccgaggccaggttacacactagccttccaaataggtgtttcttgagccctgtgccttttctagaagaactgagtcttgagtattttgtggcaggcactttggagaggtggagaaggtattttaggtcaggtcaagtttcggggaaaatctatctcgtggacctcataaacatgattgttttcaggaagtctgggagggaaatggttaattgtttatcatagagcaaggactgaagacctcctgtcagcggaatgtgtgtttggctgtggcctcttccagtaattgctctgctgggaaagtcattggccaaggatgctcgattttgtagagagcctgtttcctttgccagacaaagcctgactctcataatgactggccatactggaaaggataacttagttgattagccaaacaatgacttgaaccacagcgtcaaatgaaggctttcctaacggaatctcttttccttacatctttctcagaaaaaaaagaagagaccattcctgtgatcatttcccccctcaagaccatatcagcttctctgggtaaggcccacaaggaccatgcattccacgcacctgtgggggtgcctggtatcccaatgcagggggcttgggacccttgcgtctgctgatcatacctgctccttgggtgcaatgtgcctgggtggagaccttagaactccagtgtgtgaggctggaataacaagtgtgaggaaatatttccctttggccagtttggttagaaatggcataatctgaaaacaggtatactttgcttcatgcaaagcctacctataaaaatctgaatgtgaaaatctgaacgttctggcagcagttatcaactgcatgagaagatgaacagcatgaaccccaggcagagccagcaccctcagtgtatttaaaataattcacatcaccaaaacttggctggcgctctgcctctctctaagactccatttgtaaagtgggctcagctgtggtcagtttcttgttgccagaagagctggtaagctggttgaatggtgccatgaaaatgaccaatggggctttctgcttttcactccatgtggtacagtccatcctggccagcacaggtccacactagtggccagtgagggtacgtaagtgtactgtactaacaaccaactgatgctagtggtggggcggaattgatgtttattgaggatccactatgtccaatgggatcccattcaatctcaacatagaccctgtaggttttattctctcaattttccaaaaggaaaaagccacccagggcatcacgttggctcagtggaggccaaaaggccatgctcagagtcaggctggagttcagattcaggtctgtgtgcctataaaacctgcatccttttatgtgtttgtttctgggtagtgtttttgtaggtctgttactcatttatgaaaccctggctgcacagtcttttaaaaaacaatttatttgctttttccttttgtttagtgctggtttaaattttaaatttgaattggaggccatagaggaggagggcttttgtgcagttgctgggactgctggctggcacttgggttgccactgccacagtgcagtccccatggctgcagctctaggaacaaccacctggaaatctggggcaatgggcacatgggtgatacctactggagccccagtgttctggctccctggggcttcccagccaagttccaggcccagttcccaatcagttgctttggatgcactggaatgggtggtggggccacgtgacactgattagtaggttgttacggctgaggaagatctttaaggtcataggagtggcataggatggagaacggctggcattctcaacccgtggtggggccaggtgcattaaaagacacaccacagggagccatatcacccacgaggaaaaaacaagtgagaaggttttcttcttcttttccttctactcttctttgtgaatgaaaaaaaaaataatttcctatgattgaggcagggggacccagtacatcacactgcacaactgcagagggcaccatctatagaaaacacagagtttttggctgggcgtggtggctcatggctgtaatcccagcactttgggaggccgaggcaggtggatcacgaggttaggagatcgagaccatcctggctaacacggtgaaaccccatctctactaaaaaatacaaaaaaaattagccgggcgtggtggcgggtgcccgggtcccagctcctcggggcgccgaggcaggagaatggcgtgaaccggggaggcggagcttgcagtgagccgagatcgccccaccgcactccagcctgggcgacagagcgagactccatctcaaaaacaaaacaaaacaaaacaaaaaaaacacgagtttttaaagaagggttgatccccagtcagagtcatctgggaatggagagttcccaggagaaacattagagccaagaccagcctcaggcaaagagaaagaatccacacattgatctggattttctgaggtaactgaagtgaggggcagaggaagtcggcttgaatttagcatgtcccgtgggagcgcaggggccctggtgaagccatttaacttcaggtgcctcttggtttttgcctgccatgaagaccagttgtaggaaccagaggtacttcgtaaacagtaaagctctgtgtgaacagaatcatttgagaaaactaaattttctaccaaggaaagaattgggtggtgaggggtgtttgagaagccgaggagggactcagggctcaggtttgctggtgggtgggaggtgctggttctgcagttgacgtgctgtgccttgccatccacagggtcaagactgacaatcccgtgtaaggtgtttctgggaaccggcacacccttaaccaccatgctgtggtggacggccaatgacacccacatagagagcgcctacccgggaggccgcgtgaccgaggggccacgccagtaagtgggccagggtcttctgttgagaactctgtgggtttcgctcttccttttggagacagttatcactatgacccacataccacattaaaagttactttttttgattccaaactgttggatgtttagaatttaaaaaattgtattttgctaaaaattatcttgagaatcaaactttctctgtaaatacttaaaagttgagttgcagttgacatgttggtattgatgttgcattttgtagctgtttcattaaacattgatccttttattttcgcaagttaaaaaatattttggagttcatatctttccattttccactctgcaacctgactatcaaacattttcataaacccttaaaaagaccctgagacctagccacagtatctatagtacctcttctgtttctcagggagctgtgggctgccacaatctctaagggaggttaataattaaaaaaaagaaagaattcagttctcataagcagtcatctctagaaaatgttttcttactctgagactcgaacaatcagaccttttgtaagtgggaacttgttgcctgtgagggagaccattcaacattccaaattgtaactctttttaaaattacagttttgatactttgaattagcctgagcttttgcttgccaaatggttgtgttttttgaaagacttatcacaaaagatctttctggatgtaatttagtggataaaaactatgtgtgggtagcacaatcatgtgcttgcaagttctcattgcaaaagacctggccacaactaaatgcccatctcagcttactcatatgatccacttacttaaaggaacctatattccccctacaaatagaacaaaaatattcctagtggatccactcatctgtgtttttattcacactaacagttagtagtgaggtgtctacagattcctctaacactataaatggcagctatcctggccacagccattcccctgggctgtctgcaggtttccagagtgagagtcagcagtagagatgagaagagacggcaccactgagggctggagtcctggaaactccctgcccttcaatatacaagtgatttaatggtgagggactcaagtttcctcaaactagacgtttctgttcccatgactgtttttttttgttgttgttgttcattaagagacttaaaagatgaacttccccattatctaaccctgtagtgtaacaactgtttgatgccagtgaccgccaacttcagtgacactaaggccttcagggacaggcttagaaactgtcccaaatgaatcacaagtatggtggcaagagctcctaactttatgaaacttgaaaacaataaaagcgcaatgggtacttctaaaggagagtgtttagatgtctacattgtgaaagacaagcttgcattcgatacaatcataattaagtgaatgtttttttaactcagggaatattcagaaaataatgagaactacattgaagtgccattgatttttgatcctgtcacaagagaggatttgcacatggattttaaatgtgttgtccataataccctgagttttcagacactacgcaccacagtcaaggaaggtatgtatgtattttggggagcactataggagaatataacatgttgaatgttccatggatactagacaaatctacttgttctccaaatgattccatagaaattcccttgcattgtctgctagtggagagctgaaaagaaacctcccatttttaaagagttttggtagggtggaggctggactttgggagattatactcaaatgaaaaatttaaatagcaagctgatttttggaaaatggatgaaatggttctacagtaaacttcgaaatactctgtctgcatgtggctctgccttgggtcactaatcagctgtcttcgcatggcctctagaagagggtggattgttctttatcctgaagatgagaaacttcatcctctaagagctggggattgggagctacccagggttcagggcagctttagggtcaaagtcattatatgaccggaaataggtacaaggctacagccaaatcaacccagtgttcatttaaggacatttaaaaagaagaagaggaaaacccacattatcatttttgattaaattgatttcatatcaatgtttaattgttgagcaggagggagagctgccttgaatgtagtctctgttgacagcctgtagctaatggcaggcaagccaaagtgattcccagcatctcagtgatggctcgtggacaatcttacagcaataacataaatacaaattgctccaggtctccatgttttgctggggaggcagccacaaacacagtgtaaactggaaagccaatgatgtgttccagcctcaggacagggaatggcacccaactttcctccaactgtgcgctgtgcaccaccagcctcacactcacctgagccactggtcacaaacacagatctcaggacttactccagatccaccctgtcaaatattcctagggagaggctgcagcctgtgacacaaaaagctcctttcacagtgaagtttgagaatgagggcacacatgtgaagggtggcgtttcagatcatttccagatgagcaggctgggagagatggtggttgtacacatttacccacaaaaatcagaatgttccctctcggggtcagattagtgagcccaaggaacctgtggtttgtctggccctgatgctgggaacctttaaaattttccataacatgagccttgtccctgcatgtggctggccgtgactgatccagggaacacaggctgtaagtctttcaccaggactgagaggtgtattcaaacagctgcccagaatattacagctgaacttatttctaatctttgtggggttttaaaatgtgagaatcctctggagcaacaggctgaggtcatgtcgattcctggatgactaaacagactgtgatagataatagcttaaaaatgcaggattctagtctcatcaacaatgtgtctgataacactctgttctcacatttgctttttaactttttattcagagtctcttcctgtatttccataacacagagacgccaaggagcagaacataaaatagctggacccaagcaatcgtgttggcccctgcagctccattattcaaaatttattttcctttgctacttcctttgatcctcatgacacccatgctcattagaaaagggcagattgttcctggctctgtcacagttggccaactgtgacataaacagacagcatcttaaacgcacagtgtcccactgttggaacaaagttaaaccctcagcacttgcccacttaccctacgatgtttctaacagattttgccctatcacgctcgtttctctaatgccacagacatcactctcaaatatcctccatgttggtgtgagggatgtgctttctgaaaatcaatgcacatttatcaagaaaaacaaactccaatttctttcttatcttgtacacctgcattgccctgtcctcttgtacagtgagagactgttcagctcctgatgtgactctgttcttcccacagcctcctccacgttctcctggggcattgtgctggccccactttcactggccttcttggttttggggggaatatggatgcacagacggtgcaaacacagaactggaaaagcagatggtctgactgtgctatggcctcatcatcaagactttcaatcctatcccaagtgaaataaatggaatgaaataattcaaacac

SEQ ID NO: 84 - DNA, 53147 bp, Homo sapiens
agctcagctaggtccgagttgtcttatgcaggaagaattaggcacacagacactggagagtgagtggagtagaatttattaagtgaaaggaaaactctcagcaaagagagaggccctgaaagcaggttgcagattgccacttcacagttgaataccaggacttttatagaaaagctgatgaggctgggatacttatttgcataaggcgtgaattcctggtgtttccaccccttccttccattgcgcgtgtgggctcttagtctaagccactccatattgatttatttcccttcctgcgcatgtgttaaaggtaggaatttttcactgtgggcatatttaggcaagctccctgtgcaagttcccttatctgcacaaaacatctagtgtaagtacttggggtttttgtggattgggcaatgacctggaagggttggaggttctctggggacccttcccttactgcctgcctaatgcaagctggctaactcctctcaataggataaacattattttatgtacaaggaatataatacacagattgccctcaaagtcatatttccaactgctcatcaatctaaaaatccaaaattttgaataattttttgatgaaataatttatttcattgtttctcaattttggctgcacagtggaaccacctgggctgtttgaaaaaacctaggcctagccaggcacggtggctcatgcctgtaatcccagcacttagggagaccagcctggccaacatggtgaaaccctgtctctgctaaaaatacaaaatcacctgggcgtagttgtgcattcctgtaatcccagccacgccagaagctgaggcagaatcgttcgaatccaggaagtggaggctgcagtgagttgagatcttgccattgcactccagcctgggcaacaagagcgaaactccatctcaaggaaaaacaacaacaacaacaacaaaatcctgggctctgcttcagactagttaaaccagaatctccagggtggggcaccggaaagaacaagaaaaaagaacaccttatttttatcttcttcagtgagccaatgttcattcaaaagagagattaaagtgctttttgctgactagtcacagtcagagtcagaatcacaggtggattagtagggagtgttataaaagccttgaagtgaaagcccgcagttgtcttactaagaagagaagccttcaatggatccagctgtggctctggtgctctgtctctcctgtttgtttctcctttcactctggaggcagagctctggaagagggaggctcccgtctggccccactcctctcccgattattggaaatatcctgcagttagatgttaaggacatgagcaaatccttaaccaatgtaagtatgctttatgttcctccagtaatgtacaaggtgtatttaacctcacaattcttaaagttttatttcattttaaagtgataaatgataattgtatatattaatggggtacaatattacattttgatacatgtatagattgtgaattgatcatatcagggtaattagcatatccatcatctcaaatatttgtcatttctttgtagtgagaacatttaaaatcctcttttttagctgttttgaaatatacagtacattaatattaattatagtcaccttgctgtccaatagaacacccgagcttattcctcctatctaagtgtaactctgtacctgttgaccaacgtatccccttatttggcccatctccacctgccagcctctggtagccaccattctaatctctacttctctgagtttaactttttaagattccacatagaagtgagatcatatatgatatttgcctctctctgcctggcttatttaattaatatgatgttctgtagattcatccatgccgtcataaataagaatattttttcctctttaaaaggctgaatagcatttcattgtacatatatgtcacatacaaaatccattaatttattgatgaacacttaggttgtttccatatcttggctattgtcaatagcactgcaataaacatggaagtacagacatgtcttccacatactgacttcaattcctttgggtatatactggtagtgggattgctggatcatctgatagttctatttttgttttttttaggaacatccatactgttttctcaaatcacaatgctaatttacatacccaaggttcactttattccacatctttgtcaacacttgttatctttttatctttttgataataataatatcttatctatgagttgtgatgagttatctcattgtggttttaatttgcatttctctgatgattaaatttgttgagtatttaaaaaatatatcttggccatttgtatgtctttttttgaaaaatgtctactcaaatcctttgcccatttaattaattaattaattaattaattaatagagacagggttttgctctgttgtaggatggagtgtagtgatgggatcatggtccctgcagccttgagctcctgggctcaagccatccttctaccttagacccccaagtagctggggctacaggtgtatgccaccatgcctggataattttttaatgctttgtagagatgtggtctcattatgttgtccaggctggtcttgaactcttgggctcaagcaatccacccacctttgtctctcaaagtgctggaattacagacatgagccattgcacttgacccctttgctcgttttaaatagaattatttatttgttattgagtaatttgagtttctaagtattttgggtggtcagaatctcatttgtctagttttgctttcatggcctgtacttttaggatcatatccaagaaatcattgcctagaccaatgtcatggagtttttctatatggtttctttcagtagtttttagtttcaggtcttatgcttaaggctttaattcattttgagttaattcttgtataagggtgagattaggattctcttttattctttgcatatgaatatccagttttcccaacaccttttgctgaagagtgctttccccattgtatgttcttggcacctttgtcaaaaatcaattgattatagatgtgtgggcttatttcagggttctctacgcttttcctttaatcagtgtgtctatttttatgctaatgctatgcagttttgcttactatagctttgtaacatattttgcagttcagtggtgtgatgcctccagctttattctttttgattaatttgctttagttatttggggtcttttgtggttccatacaaattttaagattttttttctatttctgtgaagaatgagattaaaattttgatagggattgcactgaatctgtatattgctttgggtaatatggacatttttccactattagtttttccaatccatgaacatgggatatctttgcctttatttgtgtcatcttcaatttctttcatcaatgatttgtagttttcagtatatagatctttctcttccttgattaaatttattcataagtattttattttttgatgctactataaattaattgttctcttaatttcttttttagatattttgttgctagtgtataaaaatgccactgatttttgcatgttgattttttatccttcaagtttactgaatttgtttatcagttctagcacttttgtactgaagtctttagattttctacatataagattatttcatcaggaaacagacaatttcacttcatcctttcctacatgaatacatcctttcctatacgaatattcctatatgaatattttctgtctttagtctaattgctctgactaggacttccagtactctgttgaacagaaatggtcagagggggcattcttctcttatttctgatcttagaggaaaagcttttagcttttcaccattaaatatgatgttagctgtgggcttgccacatataaccgttaatgtcacatagaaacttctgtattactggaggccagttattaaaggttatatgttataggaacattcctcagcattcctcctgtaccagcagaggctgattattaaagtatgctattgtaaagcaaatacttcctgtggagtatgtttttcttttttgtcattgtcagaaatagtggaataaaataatgcattttgccagaagagaaacatttcaagtggtaaggtagaatcaaaatgataaaggcctgctgctttctttgcttcacagtcatttgctatatttttttgcctgaaggaaaatggtagtggaagtgttttgtgattaaagattttgagaagtcagtcactgtatatgctatgtattttgcttagattagccatgatcattaaacgtcttaaaaaagcaaatcatgcctgatgtcaaagaaatatctatgagttcatcataaacataaacgaatgaaagaaagaattaattagtcagggccatctgggtggtaacagaatatttatggcctctgtacaaagctgctgtctgtgacctatgagtgtatagcatggaaaacatttttcctctgtgagatgccacacatcctgatactatctctgttggatccactctccttctgtggtgattataccagtggatctcaaagtgggctgggcagtagaatcatttgggtgatttaaaaaggtgtagattttttagtattgatgacaggactcctgcatcaggatccctatgggatgagctttgcaggagatcctgaagcagtgtcccagcagctgattattggtcaaaatatggacattaggaactgataaactgctcaggctcacagcttgactaagcaggcttcaaatttggaccttctgtttatcagctgtgggacactggcagtgaatttgaaattctttaaaatacaatctgtcttatctgtaaaatagagtaaacaaggtgttgatgtgatgattaagtttaatagcctgcatactacttgcttggcacattgaaggcactgtatatgtgcagctaaaacaataatcatcatctttgtctaaaatatacaaatatttgaagctgtatttgacagaataatcataacaacattatgatgataatatcagtctgaatcacggacaatatatagaccaaatactgagttttgctactatttgaacctccttttctatgtttagttctcaaaagtctatggccctgtgttcactgtgtattttggcctgaagcccattgtggtgttgcatggatatgaagcagtgaaggaggccctgattgatcatggagaggagttttctggaagaggaagttttccagtggctgaaaaagttaacaaaggacttggtaaatgtgcatgtatcgtgtgtatgtgtacatgtgtatgtactgggcagtggctatagggatggggaggatggaaaacaggcttgaagagctcctgggacagaacttgacctgtccacgtggctgccgagtgtcagctctcttgtccttgtttggattctccctcgtagcttctgttttctgttctgctaggaatccttttcagcaatggaaagagatggaaggagatccggcgtttctgcctcatgactctgcggaattttgggatggggaagaggagcatcgaggaccgtgttcaagaggaagcccgctgccttgtggaggagttgagaaaaaccaatggtgggtgacttttttttttcctgaaaaatgttttctaaaatttattttaatttatttttagattgatacataacttttatgcatatttatggggtacatgtaatattttgttacatgcacagaatgtgtaatgatcaagttaggtgtttaggatatgcatcactttgagcatttatcatttctatattttgagaacagacctgtgttctagctatcttgaaatacgcaatactttgacattaacacactgctatgttctctaatgacatccctggaaacctcctaggggcagccagatctttcatgatagtggttgtcagtcctcatatggagggtggaggtttgaagcagagagccaagggaggttttgtgcacctatgcttgttgtgtttgtacacaatgactatgcatacgctgtgagtataaaaggctcatttaatcctattgtgtcccaggcttggtttgttttcaaatcattacagcatgaatttagaaggttttgtctcatttttttcaaattattaaagagcaatgtttttcccaaagtgtaattgtgggttatctattctagaacatttcaccaggaatacttgtggcacagacatagtgggaatgacttctttacatcttttgggcatggaacaactgacatgtactttcatttgtttggtctatatttgtacagtcagtctcactaacatgtctgggggtttattctaaggtctgtgtctacaatttctaccataatgatgcttatctatggttttaagagactaggcatctttagtgtagcttttatcaattttaatttccctgttaattaagaagtaattaaaattatcagctggtgttatttaatgttactatttactgtaatgttttatatattttaagaaaatatatgctatagcatagtctttcaatttaaacaaatgccaagttataaaatgtttatttaaataaattttaagtattattaataactctttatcctaccttccctagttgtccattagctctgtattcagctttctttatattttccttcatctttacttgtgtattaatcatgttttttattttctatatttttatgaaatcttcaacatcttggggattttgtggtcctagaagggactgctgctcccaaagtcagacagttcctagagatagcaaatgtcttgtccacagcatgtctctgatttacaaagcacactctccagagccagagtcccatccaccttctttaccaaactctcacacatgaatccaatacagttgtccctccttatcagtaaggcattggttctaggactcctcttggataccaaaatccacatatgctcaagtcccttagatatggcataatatttgccatatattggagaatattgacaatattatttataatatttcccaatattagagaatattgacaagaaaaaaggtccgtacatgttctgtacagatgcttgtttttgctctgaatattttttatttggggttggttgaatccatgatacaccatggatacagagtgctgactatattctccttgtcttaaattattatagggccagttatgggacaactatggccacccctatatcccagagcccacagaaattgttcaaactatctattcccaggcttactcagtctaccctccctatctcactcatttcttcctgtgaaaaccccaatgaaggctcagccccatggtttctttttgctcttgctgcctcctgaccaaccctggtacttccccatgtggctccccgcactccatggtgtggagtgcccctcctttaggaaccgtgagtaatgaactatcttttcaagggaagtctgttttggggcaacctgatcggttgacctcaccatatctaaatggatacaaaatcctcggtgaattttaaaacaactggatttgggagtaaaagtttatttatcctctccccatccaagttggactcacctataaagttcttgtcataatgagtctggttttcagcttggattacaaattaccctgatttttattatctccctgatatagtttggatgtgtgttcccattcaaatctaatattgaaatgtaacaaactaccaacagagaatactataaacacctctatgcaaataaactaggaaatctagaagaaatggataaatttctcgacacatacactctcccaagactaaaccaggaagaagttgaatctctgaatagaccaataacagtctctgaaattgaggcaataattaatagcttaccaaccaaaaaaagtccaggaccagatggattcacagccgaattctatcagagctacaaggtaccattccttctgaaactattccaatcaatagaaaaagagggaatcctctctaactcattttatgagggcagcatcatcctgataccaaagcctggcagagacacaacaaaaaaagagaattttagaccaatatccttggtgaacattgatgcaaaaatcctcaataaaatactggcaaactgaatccagcaacacacaaaaagcttatccaccataatcaagtaggcttcatccctgggatgcaaggctggtccaacatatgaaaatcaataaaagtaatccagtatataaacagaaccaaagacaaaaaccacatgattatctcaacagatgcagaaaaggcctttgacaaaattcaacaacccttcatgctaaaaactcaataaattaggtattgataggacgtatctcaaaataataagagctatctatgacaagcccacagccaatatcatactgaatggacaaaaactggaagcattccctttgaaaactggcacaagacaaggatgccctctctcaccactcccgttcaacatagtgtcggaagttctggacagggcaatcaggcaggagaaggaaataaagggcattcaattaggaaaagaggaagtcaaattttcgctgtttgcagataacatgattgtatatctagaaaaccccatcatctcagcccaaaatctccttaagctgataagcaacttcagtaaagtctcaggatacaaaataaatgtgcaaaattcacaagcattcttatacaccaatagcagacaaacagagagccaaatcatgagtgaactcccattcacaattgcttcaaagagaataaaatacctaggaatccaacttacaagggatgtgaaggacctcttcaaggagaactacaaaccactgctcactgaaataaaagaggacacaaacaaatggaagaacattccatgctcatgggtaggaagaatgaatatcatgaaaatggccataccacccaaggtaatttatagattcaatgtcatccccatcaagctaacaatgactttcttcacagaattggaaaaaactactttaaagttcatatggaaccaaaaaagagcccgcattgccaagtcaatcctaagccaaaagaacaaagctggaggcatcacaccacctgacttcaaactatactacaaggctacagtaaccaaaacagcatggtactggtaccaaaacagagatatagaccaatggaacagaacagagccctcagaagtaatgctgcatatctacaactatctgatctttgtcaaacctgacaaaaacaagcaatggggaaaggattccctatttaataaatggtgctgggaaaactggctagccatatgtagaaagctgaaactggatcccttccttacacttgatacaaaaattaattcaagatggattaaagacttaaatgttagacgtaaaaccataaaaatcctagaagaaaacctaggcaataccatttaggacataggcatgggcaaggacttcatgtctaaaacaccaaaaacaatggcaacaaaagccaaaattgacaaatgggatctaattaaactaaagagcttctgcacagcaaaagaaaccaccatgagaatgaacaagcaacctactgaatgggagaaaaattttgcaacctactcatctgacaaagggctaatatccagaatcacaatgaactcaaacaaatttacaagaaaaaaaaaagatccccatcaaaaagtgggcaaaggatatgagcagacaattctcaaaagaagacatttatgcagccaaaaacacatgaaaaatgctcatcatcactggccatcagagaaatgcaaatcaaaaccacaatgagatatcatctcacaccagttagaatggcgatcattaaaaagtcaggaagcaacaggtgctggagaggatgtggagaaataggaacacttttacactgttggtgggactgtaaactagtttaaccattgtggaagtcagtgtggcgattcctcagggatctagaactagaaatgccatatgacccagccatcccattactgggtatatacccaaaggattataaattatgctgctataaagacacatgcacaggtatgtttattgcggcactattcacaataacaaagacttggaaccaacccaagtgtccaacaacgatagactggattaagaaaatgtggcacatatacaccatggaatactatgcagccataaaaaatgatgagttcatgtcctttgtaaggacatgaatgaagctggaaaccatcattctgagcaaactatcgcaagaccaaacatcacatgttctcactcataggtgggaattgaacaatgagaacacatggacacaggaaggggaacatcacacaccagggcctgttgtggggtgggggaaggggggagggatagcattaggagatatatctaatgctaaatgacgagttaatgggtgcagcacaccaacatggcacacgtatacatatgtaacaaacctgcacgttgtgcacatgtaccctaaaatttaaagtatataaaaaaaagtgtaatcccccatattggaggtggggccttgtgagaggtgattggatcatgggggtggatttttcatgaatagtttagtaccatcccttttggtactgtcctcatgatagcaagtgagttttcatgaaatctaaagtgtgtagcacctcccacctcccttttttgctttgacttttgccatgtgagtgaaagctcctgttttgccttctgccgtgattgcatcacgcttcctgtacagcctgcagaactaggagccaattaaacctcttttcttataaattacctagtctcaggtatttctttatagcaatgcaagaacagcctaatatacttccccacatgaagtgaaaggaaagaccagaaaccagattttcactacatcatgttcatatgcatgcacaaacacacttgcatgcatgcatgcacacacacacagaaatctctaactaataatccaaaattatcccctgccttccaggctaaaataaaagattttctgaaaacttcatcccttggcatgtttcagctgaaaagaagcctggcataggagcagttaactaaacagggtcccattatttaattccccatcattaccgcacaacatttttgttcaagtcactcttaattacattcatgatactctcacatgtaaagttcattgatgatttgattataacaattttatttaaaaattgccctttcctcttattgcccttacatttcagtatgagatttgaagggaacacacatccaaactgtatcagggagataataaaaatcagggtaatttgtaatccaagctgaaaatcagctttcctctatagtaatttattgatttgtaatatgatggaattacctaaatgatgatcaaattaaaaagtttataataacataaggtatttttttgatggctagatagaacaataaccgaggattctataagaggtcaggctttgttcaaataaattgaagatagtgcctggtgataatagacaccatttcttagagcaggaaattccttttttttctttgaatattgaaataaggaaataaaaggactccatctgtcaatttaactttttctgtctgctctatttgtagtttaggtttgaaatgaaagtttcttattacttttattttaggcaaaccaatctatcttcttatttgtgttaatttgtgttagattttttcttgtataacatagatgacttttgcctgtttacatttgttccatcaacctgaattttcccataccctttctgtctttagtctccccctctgctggtactacacacagttactttaactactcgttatatagaagatgttttctggttcctattttctcccttcctctatcaatcaattgtctacaagcttttcagacagatgttattttgcactgatgacctgaattattaggtggttttaaatgtggcctctttaattttttttgttttctcttcaaaataacaggcatcttgggtcagaattgtgtaaagaaaggcagtgcggtaaatgcagtatttggaaaaccattattaaacaagctagggtggaatgattaattcagttttaaggaaaaagtgaggtattaaatttcaatatgctgtagtttgtgttgataagagaatttctaggtaggtattggtttagagtttctaaaaatactttttcctgtatcaaagacaaagtattttatatgtatattttaatggtaatttaaaatatttccaatcctttagcctcaccctgtgatcccactttcatcctgggctgtgctccctgcaatgtgatctgctctgttattttccatgatcgatttgattataaagatcagaggtttcttaacttgatggaaaaattcaatgaaaacctcaggattctgagctctccatggatccaggtgagatcaagagcttctcttcctgagatattatttttgttattttatcagacagtccaatttttttaattttttaaaattatactttaagttctgggatatgtgtgcagaatgggcaggtttgtcacatgggtatacatgtgccatggtggtttgctgcacccattaacccgtcatctatattaggtatttctcctaatgctatccctccctttacccccaatcacccaacaggccctggtgtgtgatgttcccctccctgtgcccatgtgttctcattgttcacctcccacttaagagtgaaaacatgcagtgtttggttttctgttcctgtgttagtttgctgagaatgatggtttccagcttcatccatgtcccggccaaggacatgaactctctcagcatttgcttgtctgtaaaggattttatttccccttcacttatgaagcttagtttggctggatgtgaaatgctgggttgaggcagaagacagatgatttctgcatttccaactgaggtactgggttcatctcactaggcagtgtcaaacagtgggtacaggacagtgggtgcagcacaatgagcatgagccaaagcagggtgaggcattgcctcacccgggaagcacaaggggtcagggaattccctttcctagtcaaagaaaggggtgacagatggcacctggaaaatcgggtcactcccaccctaatatggtgcttttccaatgatcttagcaaatggcacaccaggagattatatcctttgcatagctcagagggtcctacacccatgaaacctcactcattgatagcacagcagtctgagatcaaactgcaagatggcaatgaggctgggggaggggggcctgccattactgaggcttgagtaggtaaacaaagtggccgggaagctggaactgggtggagcccaccgcagctcaaggaggcctgcctgcctctgtagactccacctctgggggcagggcatagccaaacaaaaggcagcagaaaactctgcagacttaaatgtccctgtctgacagctttgaagagagtagtggttctcccagcacacagctggagatctgagaacggacagactgcgtcttaagtgggtccctgaccccccagtagcctaactgggaggcacaccccagtaggggcagactgacacctcacatggctgggtactcctctgagacaaaacttccagaggaacgatcaggtagcaacatttgctgttcaccaatatctgctattctgcaacctctgctgctgatacctgggcaaacaggtctggagtggatctccagcaaactccaacagacctgcagctgagggtcttgactgttagaaggaaaactaacaaatagaaaggacatccacaccaaaaccccatctgtacgtcaccatcatcaaagaccaaaggtagataaaaccacaaagatggggaaaaaacagagccgaaaaactggaaactctaaaaatcagagtgcctctcctcccccaaaggaatgcagctcctcaccagcaacagaacaaagctggacagagaatgactttgacgagttgagagaagaagacttcagacgatcaaactactccaagctaaagcaggaagttcaaacccatggcaaagaagttaaaaaccttgaaaaaaaattagatgaatggctaactagaataaccaatgcagaaaagtccttaaaggacctgatggagctgaaaaccacggcccgagaattatgtgatgaatgcacaagcctcagtagccgatttgatcaactggaagaaagggtatcagtggtggaagatcaaattaatgaaatgaagtgagaagagaagtttagcaaaaaaagaataagaagaaatgaacaaagcctccaagaaatataggactatgtgaaaagaccaaatctatgtctgattggtgtacctgaaagtgacggggagaatggaaccaagttggaaaacactctgcacgatattatccaggagaacttccccaatctagcaaggcaggccaatattcaaattcaggaaatacagagaatgccacaaagatactcctcgggaagagcaactccaagacacataattgtcagattcaccgaagttgaaatgaaggaaaaaatgttaagggcagccagagagaaagcttgggttacccacaaagggaagcccatcagactaacagctgatctctcagcagaaactctacaagctagaagagaatgggggccaatattcaacattcttaaagaaaagaattttcaacccagaatttcatatccagccaaactaagcttcataagtgaaggagaaataaaatcatttatagacaagcaaatgctgagagattttgtcaccaccacgcctgccctacaagagctcctgaaggaagcactaaacatggaaaggaacaaacagtaccagccactgcaaaaacataccaaattgtaaagaccatcgaggctgggaagaaactgcatcaactaacgagcaaaataaccaactaacatcataatgacaggatcaaattcacacataacaatattaaccttaaatgtaaatgggttaaatgctccaattaaaagacacagactggcaaattggataaagagtcaagatccatcagtgtgctgtattcaggagaacaatctcatgtacagagacatacataggctcaaaataaagggatggaggaagatctaccaagcaaatggaaaacaaggaaaggcaggggttgcaatcctagtctctgataaaacagactttaaaccaacaaagatcaaaagagacaaacaaggccattacataatggtaaagggatcaattcaacaagaagagctaacgatcctaaatatatatgcacccaatacaggagcatccagattcataaagcaagtccttagagacctacgaagagacttagactcccacacaataataatgggagactttaacaccccactgtcaacattagacagatcaaggagacagaaggttaacaaggatatccaggaactgaactcagctctgcaccaagcagacctaatagacatctgcagaactctccaccccaaatcaacagaatatacattcttttcagcaccacaccacacttattccaaaattgaccacatagttggaagtaaagcactcctcagcaaatgtaagagaacagaaattataacaaactgtctctcagaccatggtgcaatcaaactagaactcaggattaagaaactcactcaaaacccctcaactacatggaaactgaacaaactgctcctgaatgactactggtacataatgaaatgaaggcagaaataaaaatgttctttgaaaccaatgagaacaaagacacaacataccagaatctctgggacatattcaaagcagtgtgtagagggaaatgtatagcactaaatgcccacaagagaaagcaggaaagatctaaaaatgacatgctaacatcacaatttaaaaaactagagaagcaagagcaaacacattcaaaagctagcagaaggcaagaaataactaagatcagagcagaactgaaggagatagagatgcaaaaaacccttcaaaaaatcaatgaatccaggagctggtttttttaaaagatcaacaaaattgatagaccactagcaagactaataaagaagaaaagagaagaatcagttagatgcaataaaaaatgataaaggggatatcaccaccaatcccacagaaacacaaactaccatcagagaatactacaaacacctctatgcaaatacactagaaaatctagaagaaaagaataaattcctcgacacatacaccctcccaaaaataaaccaggaagaagttgaatccctgaatagaccaataacaggctctgaaattgaggcaatagttaataacttaccaaccaaaaaaagttcaggaccagatggactcacagctgaattctatcataggtacaaggaggagctggtaccattccttctgaaactattccaatcaatagaaaaagagggaatcctccctaatgcatttggtgaggccagcatcatactgataccaaagcctggcagagacacaacaaaaaaagagaactttagaccaatatccctgatgaacatcgatgcaaaaatcctcaacaaaatactggcaaaccgaatccagcagcacatcaaaaagcttatccactatgatgaagtgggcttcatccctgggatgcaaggctggttcaacatacacaaatcaataaacgtaatccagcatataaatagaaccaaagacaaaaaccacatgattacctcaatagatgcagaaaaggcctttgacaaaattcaacaacccttcatgctaaaaactttcaataaattaggtattgatgggatgtatctgaaaataataagagctatctatgacaaacccaaagctgatcataccgaatgggcacaaactggaagcattccctttgaaaacaggcacaagacagggatgccctctctcatcactcctattcaactagtgttggaggttctggccagggcaatcaggcaggagaaggaaataaaaaatattcaattagtaaaggaggaagtaaaattttccctgtttgcagatgacatgattgtatatttagaaaaccccattgtctcagcccaaaatctccttaagctgacaagcaacttcagcaaggtctcaggatacaaaataaatgtgcaaaattcacaagcattcttatacaccaataacagagaaacagagagccaaatcatgagtgaactcccattcaaaattgcttcaaagagaataaaacacctaggaatccaacttccaagggatgtgaaggacctcttcaaggagaaccagaaaccactcctcaatgaaataaaagaggacacaaacaaatggaggaacatttcttgctcatgggtaggaagaatcaatatcatgaagacggccatactgcccaaggtaatttatagattcaatgtcatttccatcaatctaccaatgactttctgcacagaattggaaaaaactactttaaagttcatatggaaccaaaaaagagcccgcattgccaagtcaatcctaagccgaaagaacaaagctggaggcatcacactacctgacttcaaactatactacaaggctacagtaagcaaaacagcatggtactgctaccaaaacagagatatagaccaatggaacagaacagagccctcagaaataatgccacatatctacaaccatctgatctttgacaaacctgacaaaaacaagcaatggggagaggattccctatttaataaatggtgctggtaaaactggctagccatatgtagaaagctgaaactggatgccttccttacaccttatagaacaattcaagatggattcaatacttaaatgttagacctaaaaccataaaaaccgtagaagaaaacctaggcaataccattcaggacagaggcatgggcaaggacttcatgtctggaataccaaaagcaatggcaacaaaagccaaatttgacaaatggatctaattaaactaaagagcttctgcacagcaaaacaaaccaccatcagagtgaacaggcaacctacagaatgggagaaaatttttgcaatctactcatctgacaaaaggctaatatccagaatctacaatgaactcaaactaatttacaagaaaaaaagaaccccatcaaaaagtgggcaaaggttatgaacagacacttctcaaaagaagacagttatgcagccaaaggacacatgaaaaaatgctcatcatcactggccatcagagaaatgcaaatcaaaccacaatgagataccatctcacaccaattagaatggtgatcattaaaaagtcaggaaacaacaggtgctggagaggatatggagaaataggtacagttttacactgttggtgggactgtaaactagttcaaccattgtggaagtcagtgtgatgattcctcagtgatctagaaatagaagtaccatttgacccagccttcccattactgggtatatacccaaaggattataaaacatgctactataaagacacatgcacacatatgtttattgtggcattattcacaatagcaaagacttggaaccacaccaaatatccaacaatgatagattggattaagaaaatatggcacatatacaccatggaatactatgcagccataaaaaatgatgagttcatgtcctttgtaaggacatggatgaagctggaaaccataattctcagcaaactatcgcaaggacaaaaaaccaaacactgcatgttctcacttataggtgggaattgaacagtgagaacacacggacacgggaaggggaacatcacacactggggcctgttgtggggcggggaaagggggagggatagcattaggagatacacctaatgttaaatgaagagttaatgggtgcagcacaccaacatggcacatgtatacatatgtaacaaacctgcacgttgtgcacatgtaccctaaaacttaaagtataataaaaaataattaaaaaaagaaattcctctccacctctaccacacagtctcagagtgtacacagttgttcccagtttcccatgattgggaaggactcaaacactatgatggcaggtcaactttctgtcatcttgtccaagggaaaagcacactaagctgggagtgaatgagcctgacctaaacagcagcagagagaatgaggtggagaggagaaggaagaggatagttaggagaagtctgaagcctatagcttagagagtgtcttcctcatgaaaaattgcactcactgggcagtggcattacagaaacaggcttaatttggattaatctttctgtaaatctgtattgagaattgtttcataaaacaatgtcactggtaaaaaaaaaataaaaaagaaattcttggttgaaaattcttttctttaaaaatgttgaatagtggcccccactctcttctggcttgtctggtgtctgcacagagatctgctgttagtctaatgggcttccctttgtgggcaacctaacctttctctctggctgccctcaatattttttccgtcatttcaaccttggtgcatatgatgattgtgtgtcttggggttgctattctcgaggagtatctttgtgatgttcctgtatttcctgaatttgaatgttggcctgtcttgctaggttggggaagttctcctggatagtatcctgaagcgtgttttccaacttggttccattctccccgtcactttcagatacaccaatcaaacatatgtttggtcttttcacttagtcccatatttcctggaggctttgttcgctccttttcattcttttttctctaatcttgtattctcactttatttcattaagttgatcttcaatgtctgttatcctttcttctgcttgatcaatttggctattgatagttgtgtatgcttcatgaagttcttgtgctttgtttttcaactccatcaggtcatttatgttcttcttgaaactggttattctagttagcaattcctctttttatcaaggttcttagttcccttgcattgagttagaacatactccttgagcttggaggagtttgttattacacatcttctgaagcctacttctgtcagtttgtcaaactcattctccatccagttttgttcccttgctgttgaggagttgtgatcctttggaggagaagaggcattctggtttttggaatttttagtctttttgtgctggtttttcctcatcttcatggatttatctacctttggtctttgctgttggtgaccttcggatggagtttttgcatggtcgtccattttgttgattttgatgttattgctttctgtttgttagttttcctcctaacagtcaggcccctcttctgcaggtctgctggagtttgctgggggtccactccagaccctgtttgcctgggtatcaccagcagcggctgcagaacagcaaagattgctgcctgctccttcctctggaagcttcatcctggtggggcaccagccagatgccacccagagttctcctgtatgacatatctgtcaaaccgtgctgggaggtgtctccctctcaggaggctcaggggtcagggacccacttgaggaggcagtctgtcccttagcagagcttgagggctaggctgggagatctgctgctctcttcagggccatcaggcagaaacgtttaagtctgctgaagctgggcccacagccaccccttcctccaggtgctctgtcctaggaagaggtggttttatctatagtcccctactggggctgctgcctttatttcacagatgccatgcccagagaggaggagtctagagagacagtctggctacaggggctttgtggtgctgcggtgggcactgcccagactcatcttcccagaggttttgtttacactgtgaggggaaaaccgcctactcacacctcagtaatggtggactcccctccctcccatcaagcttgagcatccgaggtcgacttcagactgctgtgctggcagtgagaatttcaagctagtggatcttagcttgctgggccccatgagggtgggatcctgtgagctagaccacttggctccctggcttcagccccctttccaggggagtgaatggttctgtctcactggaattcaggtgccactggggtatgaaaaaaagacttttgtagctagcttggtgtctggccaagtggccacccagttttgtgcttgaaacccagggcccttgtggtgtaggcatctgaaggaatctcctagtttgtgggttgcgacaggttgcgaagaccgtgggaaaattgtagtatctgggctggatagcactgtccctcatggcttcccttggctaggggagggagttccccaacccgttgtgcttcctgggtgagccaattccctaccctgcttctgtttgccatccgtgggctgcacccactgtctaactagtcccagtgagatgaaccgggcacctcagttggaaatgcagaaatcacgggccttctgcattggtctcgttgggaaccacagactggagctgttcttatttggccatcttgccccaatcccagtccagaactttgtatgtaccaagctgtgaagtgaatgtttgaaaactggaaattttggatactcttatatagtagctctggaaatcagagtctttcctctctttagggtgttttgttgcctgctatagtttttattttttttcttctgaaggctatagcttcctttagtgacttttcaaaactatttttgcaagtcatgtgtggtttctgaagtcttttctttagcgtatgttcagctaattttgacagaaattttcttgaatgtggagaggcaaaaaagagacatagaaaaaatatatgtatttatatatataaatagcagaagaaagatggaaggaagtaaggaaaggaaggaaggaggaaaggaatgaaggaagaaaggaaggaaggaaggtctttcagattggctggagcactccttgtcatagccttcacttactgcttaagttgagcctggatatcagccagaggtgaaagttcaggatcttctcacatttttctaactagcctgtcccgctctgggcatgttgataactttctaaatttcttagtatacataggcacttttgaacatcccattttccaaagaaactgtctcccagcttttattctcaggattttagtgctctactgtgtgccttaactataatcgtttgccctaggtagctttgggttgttcatttgtcttaggagatttttgagaaatgtccattgcttttccatcctgagtgagttttgaatcaggtgaaacaaagatgactgcctcgtgttagcccgtgttagtcctcagacaggtgagaaagagaaacataattttttgcaagtaaggtcttctgtggtccctctgtaaataggaaccagggccttccactgcgagcagggctgcccttgacaagatcactgccaagctgatgagggaggtggtacaagtgcaaataaacataccacaaagcttacatatgcatcatggaatactatgtagccataaaaaggaatgagattatgtcctttgcagggacacagatggagctggaagccattatcatcagcaaactaatgcaggagcagaaaaccaagcaccacatgttctcattcataagtgggagctgaacaaggagaacacatggacccagggaggggaacaacacacactagggcctgtccggggtgttggtggagggagagcattaggaaaaatagctaatgtgtgcggggcttaatacctaggtgaagagtttataggtgcagtaaaccaccatggcacacatttacctatgtaacaaacctgcacatcctgcacgtgcaccttggagcttaaaataaaaataaaaacccacaaagcttttctactgtttttaagttgccattttttttattcagttctcccttgtttgctataaacctttgactgatttccagagttctgttagagttgattctgacttttttgtttgaatttttgggtgtttttatggagagatgggcccatggaactgtctattgtgccaattttgcgggcattattctgtgaagtgagtggttgaacactacagcttgcccatatcttagcattgtggcattaacatctgggaaagatagatgatttctttattttacagatgagaaaagaaatgcctgaatatagagctggaattcaagcccattagctggtggtttttcccaccaaacccccaaatccagtttctggcagtactttggtgactgcccaaaagcacacactcaatggaaatccaagtcccttgttgaaaagctggcattactcacaggcttttcctctaattcacacctagagacctcttcatcacattatttggcaaaaggggaggaggttttggagaacagatgctaccaggaagttctgaataggataggggtgtttgctgcttcagcaaggtaattaaggttaagatgacaaaatgattggattttggggtgtatgaaccattaaaaaattacagttttggctgtgctgagctagcatgtcctgaactctgtctaaaggataattgtgtgattatctcaactactcacggaagtatcttaactactctggtgtatgggtacttatccataaaatgctgagttacattttatggtatctttgtacccctcccagttataaaagagtgattctatttctgaggcttcctgctaggagtagaaatagcagggaatggctttgtgatctatttcatgttgttcaaatttccttaccctctgttcttatctgtaaaatgggaattaaagcaattcatggcattctatatttcaaggctatggagaagaattaatgtacaaaaatgagataattgacatgaagctattttaatattctgaaaataatatatgagtatagaaaattatcatctttgatcccttgttcagaattttctaacttaaatctttctatcagtatagaggactactttgtacgtataatcaaatgctcctcttacagagggagataatttttaaaaattcactccagttttaaaccagcagttgacttatggcatatgtcttcaatacatgtgtttaatttaattaatttttaaaaatctttaaggtctgcaataatttccctgctctcatcgattatctcccaggaagtcataataaaatagctgaaaattttgcttacattaaaagttatgtattggagagaataaaagaacatcaagaatccctggacatgaacagtgctcgggactttattgattgtttcctgatcaaaatggaacaggtaaaatgttatttgtttgcctgcatcttgtggttcattgattagttctataacgattgcttaaatagtgaggcaagaaacacttcatgagcactttatgtacttaccatgtgtatagatctggatgaagcaccatggagaatttataattgaattgttaaacaattatatgtgagcaccattgttaggtactaagaatttatctgagaaaagacagaatgcatgccttagatgaaagggaaatacaaataagatagaaaatgcaaaatatagcatcataaattgaaggtggacatggtcatatcacacagcatatgggagagtgaggtgaaagggtttaacctaagtgggcctcctgcatgtcctgatgtttggtgtaaatgttaaaatatttacaatgaataacggggcagtcaattttttggtgtgcagaacagtgtgatgacaggttcagaggtgtgtggtggcaaagagatggaaaagggaggccttaactgaatggaaccaaaagtaaatccggacaaatatggaattggaggtgtctgtaagctgcagacctgaatgctggcatggagagttttgatgtgatcaggtatatgtgtgagccctaacaagagtgggatgcgtataattattagagaaaataatcctaggaattgtgtagaaggatatgtacaatgagaatggaggtcaaaaacttgctacaagacatttcatatatttgaagttcagcttgctgaaagtgtgggctacagaaacagattctgaaataaaatcaagttgtccattttgtcatattgccaaaaatctatggatattagtttcagttagaggatcagataggagccaaatgataggacctgtgtgggaaatttcagtaatgagagcagacattctctttgataactttaactgaggagggaaagattcagatggtgaatttgaatagtggtagggtcaatatggaaactgtgaggaaggtaatatagatgcttcaggacactaaggtgcaaagtactctttgaactgagaagaggcccaatccagaacaaactgaaaagagttaactctagagaataaaatctttcctctgaagccaccattattttattcaaccgctttacagcactaggtggaaatgcagaatcagtcagtaggtgaaaatgggacagagtcaaagatgctgatgaaggtgacttccatgaaattgcccatggaatgttagcaggactgctcgaataatgtgttctagatggagtgaagtgaagaagatgagatactttgaggaaactggagaagggaagaaacaaattatttgtactctccaccttctctactgctaggtcaattgttctgaggtctaattaatttaagaatctcattaaaatatggacactgccagaaaaatgacactatatgagttctccatttttgtacacatttaggggggtttccttaatgctatgaattgtctccattaattccaggttaaggagaattgtaaggtctatggtgtttcagtgaccagtggctatgtcctcattactatatttaaaaagtgcattgttcctttgacctcactataatatttagaatctagcttattttatttttcacagcatttttattgagtttaattcacatattgtaccctcatacattttaaatacaattcaacagttttagtatttttcacagagctgtgcagccaccaccacaaccaatttcagaacatttccatcatcctgaaaagacaaccatatgcttaacagtcaccctgtattggggtggctctagtcaacactaatatactgtctgtctctataggtttgctattgtagacatttcatgtaaatgaaattacacagtatgtggtctttgtttgtctgacttctgtcacttagcacaatgttttcaaggttcattgacatagcatgtatcagtacctcattcctttatgtggtcaaataatatttgggtgtggctatatcatattttatatttccattcattagttgttggttttgattgtttctgttttggctgttatgaataatgctggtatggacatttgtgtacaagtttttgtgtatagataagtttttatttctcttgggtatatacttggctgcagaattgctggattatacagcaactgtatgcttaatctttggagaaaccgtggctggatcaaagacctaaatgtaagagctaaaaatataaaactctcagaagaaaacctaggcatgaaatttgctgcaccatttcgtattctcactacaatgttttgaggattccactttctccacaaccttgctaatgtttcttatctttttgattccagccatcccagtggggttgaggtggttccatgtggtttggtttgcattttcctgacatcaaataattttctcttgtgcttactggtcatttgtgtatctctttggataaaagtatattcagaccttttgtccgtttttaaattaggttattatatttttaaaattattgagatggaaaagtttttatatattctagataaaagtcccatatcagatgttattaaagatattttctcccattttgtcaagtgtctttcactttcttaacagtgtcttttgaaatacaagtttttagtttttgtgaaatccaatttatttatttatttgcatggtttcttgcaatttttttgtcacgtttaagaaatgatttcttagtccaatatcacaaagattcaccccaagttttcttcaaatggttttataattttaactattacatttaggtctaagatccactctgagtcaatttttgattatagtgtgaggtatgggtacaacttcattctttgcatgtgcattcagttgtcctagtaccatttgttgaaaagactattcattccccattgagtgatcgtggtacatttgttgaaattcagttgactacaaacacgaggatttatttttagactctaaattctatttcattgatctatatagctttctttatgccagtatgacagtactttttttttttgagacagggtctcgctctggttgcctaggctatagtgcaatggtgtgatcttggcctctacctcccgggctcaggtgattctcccacctcagcctcctgaatagctgggattacaggcatgtgccactatggccagataatttattgtatttttagcagagacagcctttcgctattttgcacaggctggcctccaactgctggcctcaagcagtccacccaccctggcctcccagattgctgggatcacaggagtgaaccacgcacctgggtgatggtagcttttatgtaagttttgaaattggaaagtgtcagttctccagttttgttctttcccaagattgttttggttcttagctattttggttgtgtagagttccccatgaattttatggtaatcttgtccatttctattaaaaaggtaacagatattttgatatggatcactttgaatctgtagatcaatttgggaagtaatgccattttaacgatattaagtcttccaatagatgaacatgggatgtctttccatttatttagatcttctttaatttctttcaacaatgttttgtgtcagctagcttaattttgataggctatttgtacataaccactgatttttcaaattcacttaaacagaaggaaatattagtattggtttataagtgctctactctccttcctggctttggtgtaattttgagttgataagcttagaaaactgtgttaagttgatgttaccaatgggcatgatgacctttgtctagcaagtacatctgttgagaggactaggtttgtcttactgtggttgattacataatattaggcatgccacaggtcacatggagattataacagccttattaaattaatgctgttctagaggattgaataggaagaaatctttttttgtatgttaattactccctatagtcaataatttagactgtcccattgttatggtcaattttgtgttacatatttccctcatcttaaaccagccttagttgccttgtgaagtgctttgttcttccactctccattttattattaatggcataaactgcaattactttttcaccaactgaatataagaactcagttcattcagtcccttgtcctaagcatctccattgcccttactctctccttcatcctgtataggtggttaatgtccaaactctctgtcttcatgtctgtagtgtctcttcaatttctatattcttattcattcctgtgcttgtttactagatcaagttgactattacctcacatctggaatataataatggctggccccatcttgtcttgtcaatctgttctctttctccataatcttggatatgttaccatgttatcttttgcacatttccgagttcataatgagtctgcaggcaatattgagtgtgactaaattcttttttttttctcagacagagtcttactctgtcacccaggctggaatgcattggcatgattgtggctcactttagctcgaccttctggactcaagtgatcctcccacctcagcctccccagtagttgggactgcaggtgcacatcaccatgcccagataattaaaaatttgtttttatagagatagggtctcactgtgtttgcccaggctggagtggacctcctgaactcaagtattcctcctgcctcagcttccgacagtgctgggatttaaggcatgagccactgtgcccagtctaaattacctataattccttatacaatgtaaatgccatgtaagtggttgttatactgtattttttagggaataatgacaagaaaaagaagtctgtacatgtccaatatgaacacttttttttttctgaattttattcttttttgttttagaggcagaatcttgccccattgcccaggctgttgtgaagtggtatgaccatagctcactgcagccttgaactcctgggctcaagcaattcttccacctcagcctcctaagtatatgggacaacaggtgcatgccaccatgcccaactaattttttttttttttttttttgtagagatagggtctttccaggttgcctaggctagtcttgaacttctgggctcaagcgatcctcccatcttggcctcccaaagtgctgggattacaggcatgagccacctcacctggcctctttttccaatttttttttttttttatttaaggttggttgaatcaatggatgtggaatccatggataggaaggtggattgtactctattattagctatattcaactggctgtgcaatttattattttttaaaaaagagatcagatttactcctccattctaacaggctttataccctttgactatcatctccccctttccccccgcccccaagccctctggcaatcagcattctactctcttctatgagttcggttgttttagattccacatataagtgagaatatatagtatttgttttcctgttcctgacctgactttacttagcataatgttctccagttccatccctgttatcacaaataacagaatttcttcatttttaaggctgaatagtattctattgtgtatatataccacattttctttatccatttatctgttgatgggcacttaggctgattctatatattagctattgggaatagtgctgcaatttacatgggagtgcagacattgctttgacatactgatttcaaatcttttgagtaaatgcccataagccgaatcactggatcatgttgtaattctatttttagttttttgaggaaccttttactgttttccataatggttgcactaacttacattcccatcaacagtacacaagtgttcccctttttccacatcttcaccaacacttgttttttctctctttgataatagccattctaacagatgtgaggtgatagctcattgtgtttttaatttgtaactttttaatgattagtgttgttaagcatctttttatgtatctcttaatcatttgtatgtcttctttttagaaatattcattcaggctatttgcccatttcttaattggattatttgttttctttctatagagttgtttaagttccacatatatgtgcatgcatgtctgtgtgtatatagtttttaattttaattttaattttaaaagaagtatagaaatttaatatgtttttcttccaatgttattttttctcatatttttttctttttttaattatactttaagttctagggtacatgtgcacaatgtgcaggtttgttacatatgtatacatgtgccatgtaggtgtgctgcacccattaactcatcatttacattaggtatatctcttaatgctatccctccccgctccccccaccccacaatagtcccccgtgtgtgatgttccccttcctgtgtccatgtgttctcattgttcaaatcccacctatgagtgagaacatgcggtgtttggttttttgtctttgtgatagtttgctgagaatgatggcttccagcttcatccatgtccctacaagggatacgaactcatccttttttatggctgcatatattccatggtgtatatgtgccacattttcttaatccagtctatcactgatggacatttgggttggttccaagtctttgttattgtgaataatgccacaataaacatacgtgtgcatgtgtctttatggcagcatgatttataatcctttgggtatatacccagtaatgggatggctgggtccaatgatatttctagttctagatccttgaggaattgccacactgtcttccacagtggttgaactagtttaaagtcccaccaacagtgtgtaaaagtgttcctatttctccacatcctctccagcacctgtttcctgactttttaatgatcgccattctaactggtgtgagatggtatctcattgtggttttgatttgcatttctctgatgaccagtgatgatgaacattttttcatgtgtctgttggctgcataaatgtcttcttttgagaagtgtctgttcatatacttcacccactttgtgatggggttgttttttttcttgtaaatttgtttgagttctttgtagattctggatattagccctttgtcagatgagtagattgcaaaaattttctctcattctttaggttgcctattcactctgatggtagtttcttttgctgtgcagaagctctttagtttaattagatcccatttgtcaattttgtcttttgttgccattgcttttggtgttttagacatgaagtccttgcccatgcctatgtcctgaatggtattgcctaggttttcttctagggtttttatggttttagatctgacatttatgtctttaatccatgttgaattaatttttgtataagatgtaaggaagggatccagtttcagctttctacatatggctagccagttttcccagtaccatttattaaatagggaatcctttcctcatttcttgtttttgtcaggtttgtcaaagatcagatggttgtagatgtgcggtattatttctgatggctctgttctgttccattggtctatatctctgtgtcagtaccagtaccatgctgttttggttactgtagccttgtagtatagtttgaagtcaggtagcatgatgcctccagctttgttcttttgactcaggattgacttggcaatgtgggctcttttttggttccatatgaactttaaagtagttttttccaattctgtgaagaaagtcattggtagcttgatggggatggcattgaatctataaattaccttgggaagtatggccattttcacaaaattgtttcttcctatccgtaagcatggaatgttcttccatttgtttgtgtcctcttttatttcattgagcagtggtttgtagttcttcttgaagaggtccttcatatcccttggaagttggattcctgggtattttattctctttgaagcaattgtgaatgggagttcactcatgatttggcactctgtttgtctgttattggtgtataagaatacttgtgatttttgcacacttattttgtatcctgagactttgctgaagtttcttatcagctttttggagattttgggctgaggcaatggggttttctaaatatacaatcatgtcatctacaaacaggaacaatttgacttcctcttttcctaattgaataccctttatttctttctcctgcctgattactctggccagaacttccaacagtatgttgaatagaagtggtgagagagggcatccctgtcttgtgccagttttcaaagggaatgcttccagtttgtgcccattcagtatgatattggctttgggtttgtcataaatagctcttattattttgagatgtgtcccatcaataccgaatttattgagagtttttagcatgaaggtttttgaattttgtcaaaggccttttctgcatgtagtattgagataatcatgtggtttttgtctttggttctgtttatatgctggattacatttattgatttgcatatattgaaccagccttgcatcccagggatgaagccaacttgatcatggtagataagctttttaatgtgctgctggaatcagtttgtcagtattttattgaggatttttgtatcgatgtgcatcaggaattttggtctaaaattctctttttctgttgtgtctctgtcaggctttggtattacgatgatgctggcctcatcaaatgcattagggaggattccctctttttctattgattggaatagtttcagaaggaatggtaccacctcctccttgtacctctggtagaatttggctgtgaatccatctggtcctggactttttttttgttggtaggctcttaattattgcctgaatttcagagcctgtgattggtctattcagggattcagcttcttcctggtttagtcttgggagagtgtatgtgtcgagaaatttatccatttcttctagattttctaatttatttgcgtagaggtgtttatagtatgctctgatggtagtttgcatttctgtgggatcagtggtgatatcccctttaacattttttattgcatctatttgatttttctctcttttcttctttattagtcttgctagtggtctatcaattttgttgatcttttcaaaaaaccagctcctggattcattgattttttgaagggtttttgtgtctctatctccttcagttctgctctgatcttagttatttcttgccttctgctagcttttgaatgggtttgctcttgcttctctagttcttttaattgtgatgttagggtgtcaattttagatctttcctcctttctcttgtgggcatttagtgctatacatttccctctacacactgctttaaatgtgtcccagagattctggtatgttgtgtctttgttctcattggtttcaagaacatctttatttctgccttcatttcattatgtacccagtagtcattcaggagcaggttgttcagtttgcatgtaattgagtggttttgggtgagtttcttaattgtagttctagtttgattgtactgtggtctgagagacagtttgttataatttctgtttttttacatttgctgaggagtgctttaattccaactatgtggtcagttttggaatacgtgcgatatggtgctgagaagaatgtaaattctgttgatttggggtggagagttctgtagatgtctattagatctgcttggtgcagagctgagttcaattcctggatatccttgttaactttctgtctccttgatctgtctaatgttgacagtggggtgttaaagtctcccattattgttgtgtaggagtctaattatcttcgtaggtctctaaggacttgctttatgaatctgggtgctcctgtattgggtgcatatatatttaggatagttagctcttcttgttgaattgatccctttaccattatgtaatggccttgtttgtgtctttcgatctttgttggtttaaagtctgttttatcagagactaggattgcaacccctgcctttttttgttttccatttgcttggtagatcttcctccttccctttattttgagtctgtgtgtgtctctgtatgtgagacaggtctcctgaatacagcacactgaggagtcttgactctttatccagtttgctagtctgtgtcttttaatcagtgcatttagtccatttatatttaaggttaatattgttatgtgtgaatttcatcctgtcattatgatgttagctggttattttgctcattagtttatgcagtttcttcctagcatcaatggtctttacaatttagcatgtttttgcagtggctggtagcggtttttgctttccatgtttagtgcttccttctggtgctcttgtagggcaggcatggtggtgacaaaatctctcagggtttgcttgtctgtaaaggattttatttctccttcacttatgaagtttagtttggctggatatgaaattctgggttgaaaattcttttctttaagaatgttgaatatcggcccccactctcttctggcttgtattgcccagatcaatgtcctgtagtttttcctcaatcttgtcttctagtagtttacagtatctggtgttatgtttaagtctttaatccatgttgagttgcttgagtatatggtgtgagatcagtgttcaattttattctttagcatttggatatccagttttctcaccatttatttaagagactgtcccctttccattgcatattcttggtacctttgtctaaaatcaattgtagttgcatgggttcttttccagctctctgttatattctgttggttgatgtgtccatttttatgccagtaccatgctgttttaattactattaatttgtagtatagcttgaaatcaggtaatgtgatgcctccagctttcttctttctgctaattattgccttggctatttgggtatttttgtggttctatatgaattttttggggatgacttttcctatttctaagagagataacattggaattttgatagggatttcaatgaaaccataaatttctttagatagtatggacattttaacaatatcaactcttccaatccatgcatatggtatctcttttttatttgtgtcttcttcatttttttaattaatattttatattttttggtgactttcacttttttggttaaatgtactcctaaatactttatttctttgatgctattgtaaatgggtttatttttaaaatttctttttcatatcatttgttgttaatgtgttgaaacactattaatttttgtgtgttgattttgtatcctgcaactttactgaatttaattatcagttctaagagttttttggtgatgtgtttaaggttttctgtatgtaagatcatgccatcagcaaacagagacaattttacttcttttcttctttggatgtctttcatttatttttcttgtctcattgctctggctagtacttctcatactatgttgaattgaagtactgagagtgggcatccatatctttttcctgatcttatgggaaaatccttcaactttccactattgaatatgaggttagccatgcacttgtcatatatggacttgtgttgaggctagttattagctccactatcaggagcagcaatttgcaggacatgctaacaagtctcatccaggcagaaacttggacttttgagtttcatccctttctctgccatgatcccagaggattaaacctctggaagtgcttgtgcactaatataatactggtactttttccagtggtctagagagagactcctgtatacttagtcctctctgctcccagaattggtaagttaagtagatagctgtggggaaccttagagttagggtgttaatgtgtggtctaaatcctcctttccacagggagaagctggatgttggggattcattctcaattgtatggtgtagtgcctgggtgaggttggtgctgtagctttttcttcccagtctatgtggatattttctttgttgctcagtacatagaagtctctcaacttgtttctgactttctctcacagggaattgatctgtgaatagatatttatttggtgtatccttgggtggaagaagagactggagcctcctattctgcaatgtccctattgtgacactgagaattgcaaacccttgattcttgcttataatgtatttatgtctctaatttacttatttctatttctatcaattaagattgtatatatacaaataagaaaaaaaattaacatggcttaaacaaataatgtgtttatttatttcacatacagggtgtcatgttgggcagtgcagaactagtactgtagctctgaagcatcctagaactaggtgcctgccatttttgatccccacgcttacaacatgaaccttcatcttgattatttttttttttgagacaggatctctctttgtcatccaagctggagtgcagtggcatgaacatgcttcactgcagccttgacctcctgggctcatgtgtttctctgtgtcagcctcccatgtagctgggaccacagatatgtgcaattcacctggttaattttttgatttttatttttttttttgagaggagtttcactctgtcacccaggatagagtgcagtggtgtgatctcggctcactgcaacctccgtctcctgggttcaagtgattcttatgcctcagccttccgagtagctgagattacaggcgcatgccatcacgcccggctaatttttgtgtttttagtagagatgagatttcaccatgttgcccaggctggtctcgaactcctgacctcaggtgactgcctgtcttggcctcccaaagtgctgggattacaggcatgtgccaccatgcctggccaagtttttgattttttttttagagacagggggtctcacttgttgcccaggctggtgtcaaactccagaactcaagtgatcctcctgccttggcatcccaaagtgttgggattacaggcatgagccaccacagatggacttgttatattcttaaatattcatgttccaaggtgatatctatatcacctctaccttcatatatgtgttttgagtaaaaaggagagaaagtgccatcaacaggtacctgcttatatgtcatagacaagaaatatgtttcatggccaacacagctccaaaagatattcagaaatagaatttttaggcaagcaatggataagtaggaatgggaaatgaactattttacattctctgccacaccgtgcaattgttgtagttttaatactgcactctgtacagtttccaaacttccttatctttagaacaacctgatatattttggattttttgtaatttaatatgctggcaaactaccaaataattaaattatgaaataattttttaggaaaagcacaatcaacagtctgaatttactgttgaaagcttgatagccactgtaactgatatgtttggggctggaacagagacaacgagcaccactctgagatatggactcctgctcctgctgaagtacccagaggtcacaggtatgatgataccataggtgagcagggtgattttcagaaaagatgttgggaagacactgctattgtcctcaatcttgtttctcttagagaagcttcattattgaaatttctgtgccattggctctaagttgtctaaatatgatgaagggataagaatgagacaaatttgcacaatagggaagagggactgagagaggtgaagacagtgtgatcagtagcaaaagtaataaagccctggattttagtgactaaatacttttaataaagtgtctagatttcatgggagacgatttgtagcaggcacaggcatgatgaattggcctaggattgtatgttggttttctaaagaacagaccactttgttgcagtttcttttttgaaatgagtagaaattttatttcactaaaagccatgtctacaaaattccattttccagcagaacagaccactttgagtaatagatatgctctttctttctttctttctttttttttgagacagagtctcactgtgtcacccaggctggagtgcagtggtgcaatcttggctcactgcaacctccgcctcccgggttcaagtgattctcctgcctcagcctcctgagtagctgggattacaggtgtacccaccacacctggctaattattttgtatttttagtagagacggggtttcaccatgttggtcaggctaggctcaaactcctgatctcaaatgatctgcccaccttggcctcccaaagttcttggattacaggcatatgccactgtgcccagccaggtatgcttctatagatcttcccttattctgaaaatgtagtgttttaatgctgggacagtaaagacagaaactctttttatttttaatttttattattggcaattcttttgtggttggtttgatgccattttttaatgttttggtaaatttctatttttatagacttaggggtacaagtgcaattgtgttcatgaatatattccctagtggtgaagtctgggctttcagtgtacccttcacctgaatagtgtacattgttcccaataggtagcatttcatccctcacctccctcccacctttccaccttttggactctccagtgtctattattccactctgtatgtctctgtgtacccattgtttagctcccatttataagtgagaacatgtggtttttgactttctattttgagcatttgcacttaggataatggcttctagttccatccatgttgccacaaaagacacgatttcgttcttttacatggctgagtagtagtgcatggtgtgtgtgtgtgtgtgacacaccatagaatactagatgcagatttttaaatcccacacataacaattttaatccattcatctgttgatggatgcttgggttgattttatgaatttgccttggtgaatagtgctgcagtaaacatatgaatgcagatgtcttttcgataaaatgatttcttttattttggatagatacccagtagtgggattgctggatcaaagggtagttctatttttgattctttgggaaatactatttattgaagtgtatagtggatattctagaaatgtcatgagatagcctgagaaaatctgtatagtctgggaagtattttaaacacttaggtgtataataaaggtgtatgatatttaagcagaaaatgtgcctgaggaattttatgattatcaaaatctgcatctagaaaaatggtacttgtcaatattttttcttagggtcaatagttttatcttttacaagcaacttttttttttcttcaacttttatatttatctatgagcagattctggctctgcataacatattagccacacacttgtttttctggggtcagaatcacactgaagtgatgataaacatattacaaatgagaattactcctgttaaagttggagtataaccatcaagtctttaacaaacttctcagacacagagagcagatagaaggatgataaccaatttggcagagagattgaagttgcaacctaagggtcataagaatttctgttgctatagtccccataaggctgagtattcaaaagaaccaagacccaaagaacatagagggagaatgaggcagaaaacagaaaattctccctgcctagtttccctccacaactccatttgtcaactaattgtttttctccacagaaaagggaggttcactctctagagaaactgaacctaagaggctcactcatggacaacagacagagactgggaaagagtgaggggttaagtaagagtccacttgaattctaaggcctttagcgcctttttctatcttgttcctaaaatacagcagccaggtgtaaactccagaggacaagtagcaccagtggaaagacctccatttttcaccatttagatagaaaattcttaccaaatgtccagcaaagtgaatgaaatggaaaatattcatccaagacaccagaccatggggaattttagaacatcagagttaaagggaaagtcataaaaacattcagagataaattaggtcacctgtgaaggatcaggaatcagaatggcattagaattctcaagagcagctgtcatcttgtgtatttgtagataaagaatattttcagatctgcatttggcaaaaaatttttgccctttgtgtttattttcttagaaagatactagagaatattttccatccaaatgtctgaaaccaattcaggggaaatcatgggctgcagggatcaggagatctcatgtaggaggatggaagtgtcagggaggctgctggataccaggtctagaaaacaaatgctttagaatggaccaggtggatcatggaggtgtgagggaagacattaagggcaaagaaaagttgattgattatttgattatttttagtgtttagaaaattattagtaagagtttgaaacatttctgagcatttgcagtaattctaaattggcatatgaaaattagaattgaaatggacacacaagtccaagaatatacaaaaaagagacataattacagctgtcccacttgtggtcaatgtttatgaaataataatggtgtgaacatgagtattaatataataaaaatgtgatataaatacattggggaaactagagtgggggaagtgtgaatgtgtgtgcatgtttctgtttgtgggtgtgtgtctatttgttatggggtgatgatggagatataagtcctcatctttcttaccatgaggttttagaaattttcaaagataaattaaaaaataaaaagagagtcagtatttagaaatatgaatataaacttcagaagaaacttctagaatgtttcaacatagtcacctttgtggagtgtgaggatgagagagaatatcatttcaagtttcaaataaacatatgcacacaatacacaaatccatccatacatatagatctgttagtagaattaaagttttaaaacattatatgttattctgatacaacattaatttgatttttttctttcttcaagaacagtaatttcttgagtttataatgtactaaatatttatattttgaagtattttatcatttatatttgtactgattatcttgtatgctaatatgtaggtggttacagatttatcttaatacttagcttgtaggagagttggatgtatctataatgtagtaatttcttccctaagtctaggtgtactttcagtcctataagtttataatgatgttgggaccccttccttatgcttcttgtaacctgaattgctacaacaaatgtgccattttcctccttttccatcatttcttacttgtgtcttatcagctaaagtccaggaagagattgaatgtgtagttggcagaaaccggagcccctgtatgcaggacaggagtcacatgccctacacagatgctgtggtgcacgagatccagagatacattgacctcctccccaccaacctgccccatgcagtgacctgtgatgttaaattcaaaaactacctcatccccaaggtaagcttgtttctcctacactacatctccatgctcttcaagtccccaaattcatagtatagtcccaatcctctaacaacacatgatgagagaagtgtaaaattcatacgtggggcagctttctggactctgctgtttccattccagtttgggcctatgaaggtttataacaggtctcagtatctagcagtgtatgtcttccaaatttgttctgcttctttagtattttttttttgtggctattctcaggttgtttacatttccaagtaagtgttgaaagtatcattttgtcaatttcccaaaacactgtgctgggatttttatcatgatgacattaaatctttagatcaatttagaaataattgatgtcctgacaggttgaatctttcaattcatggatatgattatgctctttatttatttgggctttcttctattgtgtcagtaatgttttgtcttcagttcagtggctttctcatgtattacgttttttttctgaaatgatatttctatgtaattgtaagttgtgtatttaatatataatataaaatatatataatatgaaataaatatatataatattaaaaatatattttcaaaacagagtcttgctatgttgcacagattgatcttctgggctcaagcaatcctccacctcttcctcctgagtagctgggattagagatgtgtgccactgcacctggcttttaaataatatactttaaaaaaaatgccttttccatttctttgtttctggtacatggaaatataattgactttattattttgatgaccttacatcaagcaaatttacttggcattgctaattttttgtttgtaaatttatttgtaatttctatgtattctgtgttctcttttaatatttattttatttcttatttttcaattcttataactcagttttctctttattgttttatttcactggttaggatttccaggacagcgttgaataaatcatgatggtgggcatccttgtttcatatatgatgttcaggatgggtggagatttaacatctcaccagtgagaatgatgttttatgtatattttcataagtaaaaaatcagattagagaaggttgccttctacttttgatgactttttttggtcttgaatgtgtatacaatttgatcaaatggagtctctgcatcaatcgatatggccatatattttgtcctgtctatagatataatatatatattagttaaaatacacacaaatgtgcacacagagacatacacagctgggttttatttgctatgattttcaggatgtttgaacttatatttacaagagacattggtttgcaatttttcttcctcaaaattttcttgtcagatttctgatattgaggaaatgttggcttcataaaataaggaagataatgttctgtattgtggttgtttttataatcttttctcccttctctattctttttgtgctcacttagttctgtctttggagtgactcataaattttggttaagtgccagttatgatgtatgaaaaaatgcagaatgtcagatgaggttcatcttcttccagaaagggttcatccctcccatgctaggcagacagaattatgcaacaccttctaccttcattcagaattagatatcaacacagtcaaaaaaaattttttttcaattttttttttattatactttaagttctgggatacatgtgcagaatgtgcagttttgttacataggtatacacgtgccatggtggttcgctgcacccatcaacctgtcacctacattaggtatttctcctaatgttatccctcccctagccccaacatcccccacaggccctggtgtgtgatgttaccctccctgtgtccttattgttcaactcccacttataagtgagaacatgcggtgtttggttttctgatcttgtgatagtttgctgagaatgatggtttccagcttcatcaatgtccctgcaaaggacatgaagtcatcattttttatggttgcatagtattccatggtgtatatgtgtcatattttcttaatctagtctatcattgatggacatttgggttggttccaagtctttgctattgtgaatagtgccacaataaacatacgaaacacagtcaaaaattgactgtagccatcaaaaattgactgtaacctctctgagttcccccatgcctgcaagcctgagtaatttttgtctcaacatcttttccagtgccttctaacacatggtttctgtgtttattgagactttttagttgctattctgcaagctgctccattccacttgaagcgagtacatattgccattataaagaaataaaataatgaaaatttaactttgagaggaaaaaggattggagtttgataaggttgaaatcactattgccatcttatagggaagagggaattctgaatgtctgtattgtgccatatggaatccactagccacaggtacctattgagcaccggaagtgtaatgaatgcaactgaggaaatgaatttaaaattttatttacttttcattactttaaatttaaatacaaatagccatggatcattcatggctaccgtgctacagaacacatatctgattgtttaattttctgtaatacagggttagaaatatctcattctcaattatgtaatattaaaagcctgagtagttaaaaaccatttaaggtgggtgtaatttcatttggctaaacatttacttgcgtggagtgaatgtatttattttccttatttatcatactttgtataaatattaatgttttgctaaagaaaaggccaggtgtggagattcccatttgtaatcccagctctttgggaggccaaagtggaaggatcatttgcacccaggagctggaggccagcctgagcaacatagtgaaactctatctctacaaaaaataaaaaaattagctgggtgtagtggcatgtgcctgtagtcccagctacttgggaggctgaagtgggaggattgctggtgtccaagaggttgacgctgctgtgagctatggtcgtaccactgtactccagcctgggtgacagagcaaggccctgtctcaaaaaaaacaaaaaaaaaagaggaaagaaaagaaatatcatgtattcaattatatggtatctccccactctccacattactgggagtgttagaaaatctgtagcaactattatgtagcataatatctttctagaatgaatatatgtgtgtgtaggtatatagtatacatataatatatggaaatgtgcatacatctacattttaatctatacatttatctgcatttatctatcatctatctacctatgtaatctaatctgtcacatttaacacctaagtacttcagtatataattcccaaaaacaaggactttctcctacataataataataacattcacactcaaggaattattatcaatacattaatattatctaatatcttataactacattttcccagttatactaaaatatctcttatagcttttttttgatggacttcctgtagtccagtcaaggaacaagcttttaatttggttatcttgttttgttaatccttcttcatcacgaacagttttttttagtttgtttcactttaatacactgacagtttttaaaagtcctgtccccttgttatgtaaaatgttgctcagtctggttttgttagaatttttttttgacaattagattccagttatgtgtttttggcaagaaagttacataggtgatgttatatacgtgccattgcatcatatgtgcggtccacattttgtaagcctgtatctgctaggtctctccattgttggggttctgtttttcatatgcagttaataaaaagatggcatggtactttaagatcctgtgaatattactttcccaaataatttacccagtagttttaaagttaattgatgatccttgcccgaatctatggtcctacctgaatggctgcaaaaatgatgatttttctaaatttatccttccttctgtgttttttaggttggattcatctctgatgaagagttcccccacgtgttttaactaaaagaaacatatagcatttctgtgatcaacccctcaataaattttagtgtacttgttgatatcatctcagaagtcatttttaattagatcagacctccattttaaaaaaccctatgaacagattccaaattctcctcacttttttttttttaacaaaagttttattggagatagaaccaccatgtacacagggaaaagagcacaaaaattcaactgatacagaacaacaactgaaagtcacaattacccaatgtagtttgcaattacttttcagtttcttaaacagctcccctcaacttgtttttttaacagtcttgctaatttttcagctgaaacagcatcaagttttccaaaaattaagagcctcgggaggggacccgctttcaagatactgaaggtgacatcaagagtctcctcctaacaggaccaactctatctaaaagttgcttacgagtaacttgaatcttgtgtaatagtctgcatctcacagaccatcatggatgagttagaacactgttgttgatggtccagtatgaagagagggcaaccaaatagctgtattcgcttgtcagctgagctcatataaagaagtcagtgaggagctgagaaaatataggcaatggctgctcaataagaattttaagttccgaataccacatataggtagacaccagtgtgcaagttgatgcaactagaaagaaacagatgactttttaaaatacctggccacaggtctttgagaactcaagaaaataatcaacagtagacacaagagtcaaaaatcttctcaggttgaagattaggacatgggtaatcttcctaacagctccaacaggcaaggaaatatgctgtggcaaaaagcattaagtagttctgatttttaaaaaacaaaaacaaaattttctgcttctcctcccttcaaagcttcaaggaaatagaaacaaggaaacaaaacaaaaacaaaaaaaaccagtgatggtaaagagaagccttttgcttgaattatcaattcgaaaaacagtaattttgccattttgtatatataaacaatcttgggacattcttctgaaaactaggtgtccagtggctaagagaactcaatttcaagcacttctgaaaggaacaccagcatgacccagaatctcaaattcccaaacaggggctgcgtgggaaaaatgagggaggacttttgtatctagggttttagcaagttaaaatgaagatgacaggaaaggcttatttatcaacaaagagaagagttgggatgcttctaaaaaaactttggtagagaaaataggaatgctaaatcctaggaagcctgtaacaatctacaactggtccaagttgaagacaaaactgtccaaacaacatttaaatctaaagtatgttgaaaactagttgagaagtttttgctcctgtaacaatttacaaaacacgttcattttggtctcttttgcagttttcttattgtattcatttttaatataaagagttggatttttctcttctatgatgttcctctagtacaactgatcattaattttctattttagctatttttataagtacttgttaatcagcacagttaacttggggctaagtcatatatacacatcccatactcataaatgaaaatttttaggatgtgaatatacaagatattatgtaagcaactgtccccctacttgaaaacttgtttccaaataatgttttttaaaaacatccctttcagtgtaacagaacattacctagtaaaatatcaatagctatgacaattcatttctcttttcaagggaaatcacaaaacaggtgaacaaccaagtcaagggtggtttttctgtttgataaatacatccagaactctgtacagtaaataaagtttgcatgcagtttaagtatctttaaatgacattttaagtaaataaaccttttgcttcataattagtggtgtataagaaccctccccactttttaatagccacagggatctctttcccagttccaaagaggaattaatgaagaccaggtatgtttagaggcttctatttaaaaactgtcttctggaagtcctagccagagcaatcaggcaagaggaagaaagaaaacgtattcaaataggaaaagaataaatcgaaatatctctcttcactgatgatatgattctacacctagaaaactctgaagactcttccaaaagggcctctggaagggataaatgaccagtaaagtttcaggatacaaaataaatgcacaaaaatcaatagcatttttgtatatcaataatgttcaagctgagagccaaatcaagaacgcaatcccatttacaatagccacaaaatattaaatccctaggaatacatctaaccaaggaagtgaaagatctctttaaggaaaactgcaaaacactactgaaagaaatcatagatgacaaaaacaaatggaaaagcattccattctcatggattggaagaatcaatactgttaaaatggccatactgggccaggtgcggtggctcatgcccataatcccagcactttgggaggccaaggccagcggatcacaaggtcatgagatcaagaacatcctggctaacatggtgaaaccccatctctactaaaaatacaaaaagttagccaggcaaggtggcaagtgcctgtagtcccagctacttgggaggctgaggcaggagaatggcgtgaacccggaaggtggagcttgcagtgagcagagatcacactattgtactccaggctgggtgacagagtgagactctgtctcaaaaaaaaaataaaataaaaaaataaaggccatactgcccaaagcaatctactgattcaatgctattcctatccgactaccagtgtctcttctaaaatttatatggaaacaaaaaagcctgaatagccaaaacaaacctaagcaaaaagaacaaagctggagtcgtcacgctaccagacttcaaactatgctataaggctacagtaaccaaaatagcgtagtactggtacaaaaacagacacacagaccaatggaacagaatagagaacccagaaataaagcagcatacctacagccatctaatcttaaacaatgctgacaaaaaacaggcaatgggaaaagactccctattcaataaatgatgctgggatggcaggctagccatatgcagaatgaaactggaccccatcctttcaccatatataaatatgcactcaagatggattaaagttttaaatgtaagacatcaaactataagaattgcaaaagaaatacctaggaaacaccatcctgggcattggccttgggaaagaattcatgactaagtcctcaaaagcaatcacaatgaaaaaaaattgatatgttacttaaaattgataatttagttacaaattaaactaaagagcttctgcataacaaaagtaactattaacaaagtaaacagacaacctacagaatgggaggaaatatttgcaaactatgcatctgacaaaggtctaatatcctataaggtaattaaacaattgaacaaacagaaaacaaataatgccattaaaaagtaaaatacatgaacagacactgctcaaaagacatacaagtggccaataaacatatgaaaaaatgtttcacatcactaaacatcagagaaatgcaaatcaaaaccaaaatgggataccatctcacatcagtcagaatggctatgattaagaagtcaaaaaacaatgcatgatggcaaggctgtggagaaaagggaacacttataggctcttggtgggaatgtaaattagtccagctactgtggaaagcagtttggaggtttctcaaagaacttaaaagagaactacaatttgatccagcaatcccattactggatatatttccaaaagaaaataaatcattctactaaaaagacatgtgaacttgtatattcattacaacactattcacaatggcaaaggattggaatcatcccaaatgcccatccacagtggactggataaagaaaaggtggtacaaatacaccaggaaaccctatgcagccataaaaaagaatgaaatcttgtcctttgtagcaacatagatgcagctggagtgaattaacgcaggaacagaaaaccaaatattgtacgttctcacaaggaggagttaaacatcagtactcatggacataaagatggcaacaataggcactggggactactagatgggggctgaaggggaggaagggttgaaaaactacctgttggatactgtgctctctactcgggtgatggaattatttgtaccctaaacctcagcatcacacaatatacccatgtaacagtcctgcaaacaacaacaaaaaaggtaatccatgtgtgaggtgtgtgaaaactgaagtgatgaaatacagcagcaagtggggatgtacaccagggtccaagcttgatgataaaccgggattcagaaggctgcccccgagtactcaaatgctcaggacttcaagtgcaattaattggaggggacttcagcaaagtcactgccacttgccttaaagtcatactgcttcttactaggtctgtctgggtgggaatgtaacttctttggacctcaattttcttatctattgataaaagagattggactaggtgatttccatcacttcttcccactctttgacttctttataacttagtttgtctgttttgctattttcagggcacgaccataataacatccctgacttctgtgctgcacaatgacaaagaattccccaacccagagatgtttgaccctggccactttctggataagagtggcaactttaagaaaagtgactacttcatgcctttctcagcaggtaatagatattcatttccatctgtccttcagggcacatgatacctttttgggatcagttgactcttacatgatgccacctctgaggtttggctgaattgctttgcagatcattagcaccattccctatgcccatgcgatttccctgctgatgaacatccccattattgggccaggttagtggggctttggggagttgatccagtttttcaaactgaaaaagctagaatgtaggttaatttaattctgcctctagatacatcactgagctacccaagagctcttcttaatgggtgaaacttatttagacatttctcatctgccatgagaaaagtatctaattccacaactttgaatatcttccctgtggtgtccctagctccctagactgagctctggagatacaagtatctgagagcagagaatgggctcttaagaggctcactcctgatttagagaagtagacaagtaaacagatcattgtaatctagtaggaggaaggctgccagaggggaaagcgcaggatgttggggagctcagtgggggaatctgcctgcttcctgctcattcataggccataccacttccaagaggaaggaaacttaagctgcctcattgcagcaggaaacaggacaagaagagaaggcaaggcacttttacagaggtaatggaccatagtagcaggacattttctgtagatctagggggtcagaacctaccaacaaatttcagggtcaggaaaaccctgggaatgtggaaggatagtctgcaataattccagagcaccttgatctccctccactcatgatcatacatcttggatattcaatctctacagctaaagtgtgtggtgagtctgtggacatagagttcccttcattttttcctctggcttttgatccctgctttggatctggcactgtatacactgagatgtcaagaactaaggccttcttttaaggatttcacgttttagcaagatagaaaagtaaatacacagataatagaattcccggtgatctatgctccagtggaagcatgaatatgatgaggaaacctagagagggtgagtttctattgactagggatcacagaaatcataaagaggaaatgacatggggcatagcttctgaaggaagcataggagtagagctttttaggcagatgtgacagcaagagataaagcttgaaactttgtggtgtgttggaaattgatgaagaatggatatgcctagagctgagagtggaggagatgaagaatggaaggagtgatatagaacatcagactgggaacagaatgtgaagagtcaggtcaagccatttggcctttatcccataggacagatgggtgttgtttaaagttgtaaaatgagagactgacatgtttagacatgtacttttgaaagtacactaggaaaaaaaatctttggctaaacattgtgccagaagtacaaaggggaacacactatatgagccttctcttttcagcccatcttccctgtgaatgcatttctagaaaaagactgatggaaacttgtagtgtcaaaagagcagttataacgtgggaacacttagtgaagtgcatggcatagagctgatactccataaatatttgttgagtgaagggtgcctagtaaaataagatattaagtagataggaagtgtattcatttttgtttttctgtgtatccagccatccttccagtcattctgccttcgatccatccatctatttaatcatttatcaaatagttactgcatactctttgtgactgttcatgacctaatgttcaaggaacaaatcccctatgtctcttattttcaggaaaacggatgtgtatgggagagggcctggcccgcatggagctgtttttattcctgaccaccattttgcagaactttaacctgaaatctcaggttgacccaaaggatattgacatcacccccattgccaatgcatttggtcgtgtgccacccttgtaccagctctgcttcattcctgtctgaagaagggcagatagtttggctgctcctgtgctgtcacctgcaattctcccttatcagggccattggcctctcccttctctctgtgagggatattttctctgacttgtcaatccacatcttcccattccctcaagatccaatgaacatccaacctccattaaagagagtttcttgggtcacttcctaaatatatctgctattctccatactctgtatcacttgtattgaccaccacatatgctaatacctatctactgctgagttgtcagtatgttatcactagaaaacaaagaaaaatgattaataaatgacaattcagagcc

SEQ ID NO: 85 - DNA, 53779 bp, Homo sapiens
aaaacaaaaaaaaaataccataaaagaatacttacattaacaaatgggaagaaaaaagccacatataagtatgtacattgggctatcgttttattaaaaaagaatactccaaaatatagtagtgtttatttttggataatgagactacaggtgatttttgttttttcttttggtacttcccatgtttcccaaactttctgtattgagcatgaattactctcttaagttactttacaaacatctcaagtttggtgccaactctgtgttcccatatatggtgttgttgctggacaccacgtatgactccaacgtgtccagaaaccaccggggtcccccaatagggctagtagcaatctagcagcaactccaggcctgtaaggggttagtgctagaacattacccacctcagtggctctgatcagtttgggaaaacctcaataattatccaacttggtaaaatactttaggtgtcccctttgaaccaaaagagatctctgaaaaggcccaaggaactactttatacatcctctacacgtttaagataatctgaacacatagtagagatctgccagactatggacatgggagctgtaatcctcacaagccgggagagccggggagagggtccgagtgggccggcgcggggggcgccaggttgccagccccagacccgaaatcccaggcaggcccagggagaggggactctcgggtggcttctccttacttcgtgtctttgcctttgctcttgcctttctttttgtcctttcccttcgacggcatcttggcttccccaggggctccgctgtcgtagttgcccagccgcggccgccctggccagctctgtctccaagggaaccgggacgccgagctggcaatgccccacccgcgccgctgacggcgcgcggagagcgcacgcgcccgtgacgtagcccaggcgccgcggcgcgcggggtggggcggaggtcgcgccgagggcggcgggctgccgcgcaagggtggcgcgcgcgcggtgagtgtgcgagtgtcggcggcgccggatcctctacgtggggcccgggctctgcgggcgggaggcgggagctggcagccccaggcggtagcgcttcgtcctgcggcctgggtgtgtcaggagtcgctgcggtcggggcgcccttgcctcaggagacttagatccccgctgatccgcccgtcccgccgcagtggtctgagccgcagccctttcccgtgccgcccgcgggtcccgttcctcccgtgtctccatgccgcagccagcgtggccgcggctaccttgccctcgcccccgctccgcttctgccgctcccggcactgccttactcctttgggttgcatctctttcctggcttttcacccttgctgattctgtaagggatagtgcagccagcggacgtcccaggccaaatgttttttgataggcagtcgaggactttcccgagggcggtggttgagggcgaggctgccagcctccgaagagcagcggcacgccagggagccgggcggggaggggagtgctgccaccgaggtcgggagcagggtcctcggcctcactaggtcctgtgtggccgatacttcctgcccacgaccgccccccggatttccatttgctaataccggtccgcagccttctttcctgaaagttgcataaagttggaagctcttcaacttgcctccccgactcctgaaatcccgaatacacctctgaaaaggagtgtactcacaagtattctcatttttcaatgagagtcagtcagtgagtcattaaggaaggtacggtattctgagtgccaagccaatagttaggagacttgtggttgaagctctgctctgttatactccatttcaaattaaaaagtttattttaaatgtggttgtagatccttcgtcaccatttctctagggaggacttaatccgtacactccttcccgatgtctttgacctctaattactcccctccgccttgtttcccacttgcatagtttctgtttctgaatttctgtttcttctgagggaacatgccgatttggtaatgataagccttgtaaacttttttttttttttttctgagagagagtcttctgtcacccaggctggagtgcagtggggcatctcggctccctgcaacctccacctccttggttcaagcgattctcctgcctcagcctccccagtaagtgggactacaggtgcatgccaccacacccggctaatttttgtatttttggtagagatggagtttcaccatgctggccaggctggtctcgaactcctggcctcaggtgatccacctgcctcggcctcccaaagtgttgagattacaggcgtgggccaccgccccggctgtaaaccttttttttgagacaagagttttgctcttgttgcctaggctggagtgcaatggcgcaatctcggctcaccacaacctctgcctcccgggttcaagcaattctcctgcctcagcctccccagtaacagactataggtgcgtgccaccatgccaggctaatttttgtatttttggtagagacagagtttcaccatgctagccaggctggtcttgaactcctggcctcaggtgatccacccgccttggtctcccaaagtgttgagatttacaggcatgagccaccgcccccggctgtaaaattttttttttttttttttgagacagagttttgctcttgttgcccaggctggagtgcaatggcacgatctcggctcaccgcaacctccacctcccagttcaagcgattctcctgcctcagcctcccgagtagctgggattacaggcacacaccaccatccctggctaattttgtatttttagtagagacagggtttctccatgttggtcaggctggcgtaaaccttattatacataccatctgccagcatgatcatggctttttcttttctttttttttgagatggagtttcgctcttgtttcccaggctggagtgcaatagcacgatctcggcccaccgcagcctccacctcccaggttcaagcaattctcctgcctcagcctcccgagtagctgggaatccaggcatgcgccaccatgcccggctacttttgtaattttagtagacacggggtttctccattttggtcaggctagtctcgaacttccaacctcaggtgatccgcccgcctcggcctaccaaagtactgggattacaggcgtgagccaccacgcctggccgatcatagctttttctgagtgtatttctggtatactttcacactcccgtgagtccataggcggaatcgccatatattgaagagtttatctctgatgtaaaatctataaagttaccattaattttgtatgtgtaaggttctgaaaaagcacactgttgataagctgcagaaaagagagtagggcatcttctgtcacaggctgtatatttggaatttattctagaaattggtaactttataatatgaaagtcagtccaagactcctcatttgaacataggcttacagattaatgtatgaacataaaaatttgactataacaagattattaatgtatgcgtagtaccttagttatagtactttatagtttcttttattggtttttgggttttttgatggtttttttgagatagggtcttactcttaaccatgctggagtacagtggcaggatcatggctcattacagcttcgacctcctggacttaagtgatcctcccacctcagcctctggcatagctgggactgtaggcatgcaccaccatgcctggctaattttgtattttttgtagagacagggttttgccatgttgcctaggctggtcttgaactcctgagctcaggtgatcctcctgccttggcctcccaaagtgctgggattacaggcatgagtcgccacacttggcctagtttattttattgtattatatatattttttattgactaagtttgattttgtagataaagctgttgtgacatgaatatggctcagggaaatgccaagatttcatactctggtagaggtggatatagagtctacattcttctgaatcccctcattttctaccaaagaactggatgttgttactgtcatctgctggtgagcaacaactgatagtacagatagtagagtaggaagttgctatttagtagtttatctggtagcatttccttccacagttactggtaggtgcctttactatgaagttccaggaattattactaaataaattttccttgtttcattgtttagaacactaatgcttttaaacttggaataagccacttcatgttttgttgacttggttttgtaattctttttctgtccagttttccttgttcctggtcaacaaagaaatgtggagtgtcttggctgaatcctcatacagacaagatcattatggtgctgttaggtaggacttgtatccagatgtaaggtaatatctccactagcttaaatttataaatgtatttcaaatgttcctgaatggtggttttctttttttcctgaatttaattctctgttttttgccaagtgatgttaattttgtccaacaagccatatataaaatttagaactattatgtatcaaaatagatagaatttctggctggtcatggtggttcatgcctgtaatcctaacactttgggaggccaaggcagacggattgcttaagcccaggagttcaagaccagtctggacaacatggcaaaaccctgtctttacaaaaaatacaaaaattagctgggtgtggtggccatgtacctgtagttccagctactcaggaggctgagttcagaggatcacctgagcccagggagatcatggctgcagtgagccgtgccactgtattccagcctgagcaatggtgtgactgtttctcaaaaaaaaaagggggggcggggggtgggtagtacttctgcttttttcttctagtaggtccaaaactgggtttactttataaattcatctataactttattcgggtttaccttagaggccatgtttcccttcataaatcattcttgagatcaccttatagcagatggtactttataggtggatcagtctaagtgaacaactttagattttgtttctacatagcctttagaatcctgaataaatatattattatccaaactgtttcttatgggagttactttctttttttttttttttgagaggtagtcttgctctgtcgcccaggctggagtgcagtggcacaatcttgtctcacttcaactctgcctcccaggttcaagcaattctcctgcctcagcctcccgagtagctgggattacagatgcctgccaccatgcccggctaatttttgtattttagtagagacagggtttcacccccatgttggccaggccggtcttgaactcctcacttcaagtgatctgcctgcctcggcttcccaaagtgctgagattacaggcttgagccaccacacctggccaggagttactttcatcctgcttttttattgcatgtgctgcaaatatagaattctactaaattgacattttctcgtgatattaagactagttcacatctctgcaggggcattttaagaaatcctggcggtcaaggatttaatcttatcacttttagataaatttttaaaaatttaaaacattcaatgttttacttatatacaagatatgttaccacagataattatttgtttatttatttgttaatgaatgacagggtctcactatgtcacccaggctggagtgcagtggtgcaatcatgactcactgcagccttaaccttctggggtcaagcaattctcccatgtcagtctcctgagtagctaggagcacaggcttgtgccaccatgcccagctaacttttttttgtggggggggggagtaaagactggatctcactctgttgctactgggctcaaatggttctcctacctcaggcccccaaagtgctggaattatagttgtgagccactatgcttggccatatatttttgaaatggggttttgttatgttgtccaggctgaacttaagctcctgagctcaagagatcctcctacttcagcttcccaagtagttgggactacaggcgtgcaccactatgcctacaaataatcattaactactgttcctttatttgcaaaatatcccatttttattagttgtccatcccaacagagccacagactaaaagttctctaagaaaacttacctggactgggcacagtgactcacatctataatcctagcattttgggaggccgaggtaggaggattgcttgagcctaggattttgagaccggcctggacaacataacaagaccctgtctctattttttaaaaaaagcaatgaaaaattacctaagttttaggcccacttgtctgcatttttatgtcatggatctgtcaaatgttcattcatttaagaaacatttaatgaataccaactgtataacagcctgtctgataacttcatgggtacagtaaggaacaagagaaggcccttgccctcaaattgtttacagtcagatgtataaagctctgacctggatgttgatctctgagaatatacaaccttattgtcacccatacacaaacacttaacagtaaacagtaccaagcagggattgataaaggagagatggtgtagaccaggggtgttcaatcttttggcttccttgggctacattggaagaagaagaattgtcttgggtcacacataaaatatactaacactaatgatggctgatgagcttaaaaaaaaatcacaaaaaaagatctcataatattttaagaaagtttacaaatttgtgttgggctgcattcaaaaccatcctgggctacatgcggcccatgggctgtgggttttgactaagcttggcccaaaccctaggtgctatagaatttggaggcatttaagactgtcgtagtcagggaaagtttatagaaggagatggactgaaaggagagggaagttcctctgggaagttagaacaatgtgagcacaattcagagtatgcttaaaatagggagtagtttaactctagcattggttcctaaagtgtggtccacagaccggtaacatcagcttcacctggtaacttattagaactacagtttcacaggccccacctgagacctactgattcagaaatactggcaatgaggcccagcagtctatgccctccaggtggttctgatgcgtgctaaagtttcagaaccactagactagagcagagggttattgtatggaacaagtaggcaaaacactctaaaaaggtaggctgggaactcattgtgaatgacttagaatgtcagacagggagtttgtcttttatcctgcagactagaggccccagcttgtgacttgagggctggacttggctcatagaatgtgtttcgtttggcctgaatggtaggtttttgggggtttttaaatggaattagttgtcatcatttaaaaatcagcagattttacaaagaaatctgtgctttcagcttaccttgaaaaatcagaagacctggcagtatggagcctacattccattatggtagcagttggtgggaatagcaagaagctgcccctttagatgggacacatgctctccagtttactgcaatccccaccggttccttttgtcttacacacacctttactcatttatatttcctgcctggtgcctgtaggtgtttgagtttgtaacttctgttgtggacagtgggacattaatgaaaattttgagaagcagagtgatgagatttatgtatttgttaatttatttaacaaacattaattaaacatatatgccagattgtactctgttaagtaatcagtgttcaaagatgaatgagtcccagctgggaccggtggctcatgcctataatcccagcactttaggaggcgaagtctggtggatcacttgaggtcaggagttcaagaccagcctggccaacataatgaaacccccccctctctactaaaaataaaaaattagccggggatggtggtgggcacgtgtaatcccagctacttgggaggctgaggtgggagaattgcttgaacccaggaggcggaggttgcagtgagccgagatcatgccattgcactccagcctggatgacagagtgagactccatctcaaaaaaataaaaataaataaaatacatgtttactttggagaccttatagttagaatttataacatgggttgcgtgagtcaaatccataattcaaatcctgtcttgaatgtgtaatcttcagatttatgttgcataggtaagtttaacttttttgttcctgagggaatagaaaataatatataaactcaaattcttaagtgattctttcacctcagcctcccaaagtgctgggagtataggcatgagccaccaagcccccatctgcttggtcccttttaaccacatactcgtgcatgtaatagtaagtagccactcattgatcatactgtggaacatatggctgacattttaacagcaaaaaaagacctcacatctcggctcactgcaacctcgacttcccatattcaagcaatcctcctgtctcagcctcccaagtagctgggactacaggcacatgccaccacacctggctaattttttttatattttgtagagatggagtttcgccacattgcccaggttggtcacaaactcctgagctcaagctgtctgcctgccttgacttcccaaaatgctaggattataggcgtgagttgctgcgcccagtctgtgtactttacttatgaattagctccttggtcattgccttctccacctttacacacacatatacaccagcttctagagggagtgtgacttgcttctcttgctgttggtgactttttaaatgagctggatgtgtggtaaagtggctgaggttgtagtttgagtgagaagaaagtgtaggggagcagaaagagctgaagggcattagactacaactcaggagatgagcttggtgatctgggttccaaagcctgaaaagattagaaatgaaaatgtggaagagataactgagtcaaaagtaggcatactgacagcagagaaaaagaggaaactgttcttataattattcatgtccatcttacacaggttgaaaaagtgatataataaaggaaccaaggagaaaattcagaaggaaagaaaaaattggtaagtaacatatataagtaatacttcactttttcataggtcagatttctgcaaattctgctttgttgttcctagctgagagctcacagtagatggaaaagggtccataaggcactgaaagagctgtcacaaagtgcagtacccttattctgttggagaggtcttcatttgcttatgttgacatgaaattctaataattatggcttcctgatttacatcctacaacagatttaaaaagaaaattaggaggtaatggtggtttattgaaggagctgggcacatgacagtactgatcagtgaaaatatatagcatgatgtcagaaaaaactagctcaaaaaggatagcaatctgggaccatttggtgacagaagggcaaacagtcctgtagacctactgtagcccttggaggcatctcaggtttacaggaaaatataactgataatcataatcatgactttgaactataaataaaagtggttttccctgtaggaaattatataattcacaatggaaacactttttattttttttttttgagatagagtttcgctcttgttgcccaggctggagtgcaatggcttgatcacggcttactgcaacctctgcctcctgggttcaagcgattctcctgcctcagcctcccgagtagttgggattacaagcatggggcaccatgcctgactaattttgtatttttagtagagacagggtttctccatgttggtcaggctggtctcaaactcccgacctcaggtgatctgcccaccttggcctcccaaagtgctgggattacaggcgtgagccactgcgcctggccgaaaacacttttaccaaacactaagtgttatagtggagccaggtgcagtggctcacacttgtaatcccttgagaggtttgggacttgggaggctgaggctggtggatcatttgaggccaggagtttgagactgtcctgggcaacatagcgagactcctttctctataaaaaaattgaaaacacggctgggtgcggtggcttacgcctgtaatcccagcactttgagaggccgaggcaggcggatcacgagatcaggagatcgagaccatcctggctaacacggtgaaaccctgtctccctaaaaatacaaaaaattagctgggcgtggtggcgggcacctgtagtccctgctactcaggaggctgtggcaggagaatggcttgaacccaggaggtggagcttgcaatgagccgagatcatgccactgcactccatccagcctgagcgacagagcgagactccgtctcaaaaaaaaaaaatcgaaaacatgcaaaaattatctgggtgcagtggttcatgcctgaagtcccagccctctgggaggttgaggcaggaggattgcaggagtttaaggccgcagtgagctgtgattgctccactgcagcctgggtgacagagcaagaccttgtcaataaaattaaatttttttaaaaaccccaagtttttttggtatttagaaggaaagcattttaaagccacatttggtgggggaaagacaaatttgggaaaatgtaattatggggaacccctattccttcctttatacatgaaactatcattgtaatatttttatctttggcatgtttttcattttgatttaacatgtttgaagcagtagctatttttcagttgataacaagaaagggaaaatgtttttattctcttcccacagttaaaatccaatataaacggtgcccagtggcactgatcctagtggcagttactcttctgtaaatagtgcctcccacaatggatatgggtttggaggcagacagagcttatcacctcagattttcattctgatttttcattggggcaatatgaaccccctcctgaatgacagtatcttcttatctaaaggactttgattcttaatgaatgggcaagaaaagaccttctggtttgtgaagaaaaagaggcaacaatagcaacagctttcctccaagtgattattgtagcaaagtcaagcctgaaacaatggagaatgaagttatgcctgactcattttgttattacacccaaatgagttcattgtacagaatgggcctttttgacacgtgtctaatgatattttgatgcaaatgaaataatacacataaaaaatgacctgtttacaggaaagactgatgtatttgttgataactaccagtgacatcaattctcatttctttattggcagttacagtatttgaatttagggttagaccttaaaggatatatccagccaggcatggtggtataagcctataattccagctactcagaaggctgaggcaggaggatcactagaactcaggagtttgagaccagtctgggcacaagaagaccctgtcttaagaaagaaaaaataaaagtctaggccaggcgcagtggctcatgcctgtaatcccagcactttgggaggccgaggcgggtggatcatgaggtcaggagatcgagaccctcctggctaacactgtgaaaccccgtctctactaaaaatacacaaaaagttagccgggcatggtggcaggcacccatcgtcctagctacttgggaggctgaggcaggagaatggtggcgtgaacctgcgggaggcggaggttgcagtgagccaagatcgtgccactgcactccagcctgggcgacagagcgagactccgtctcaaaaaaaaaaaaagaaaaaagaaaaaataaataataaaaaataaaaggctatatcatttgacaagccgtctgatcagtgaatctgttctggaaacatgatcagatttggagcaaagacccttccctccctaccagtttgagacagctcatattgttggaacttaattctgttcaatccctcccccaggaggttccatgctcactggtcttattatatgtaagtctttgacaatgatctaagaaaagctgagttaaaaaattttttttttctttgtctgggggtggtggcttatgcttgtaatcccagcactttggaaggctaaggtggacgcatcacttgaggtcaggagttcaaaaccagtgtggccaacatagtgaaaccccatctttactaaaaaatacaaaaaaattagctgagcatggtggcgggtgcctataatcccagcttctggagaggctgaggcaggataatcacttgaacctgggaggtgcaggttgcagtgagccaagatcacaccagtgcactccagcctcagtgacagagtgagactccatctcaaaaaaaaaaaaaaaatttttttttttcaacacaaggtctcactctgtcaccgaggctggagtacagtggtgcaatcacagctcacggcagcttcaaactcctgggctcaagcgatcctcctgcctcaccctcccgagtagctgagactacaggtatgtgtcaccatgctcagctcaaaagctgacttttaaataaacctttttattagttttattgacttgaaaaatattgctataaaatttttctatggttttcaaatctgttccagttgtcagtcttgtcccttttcaccaaatacctcttcagtacctaatttttttttttccaaggtggagtcttgctctgtcacctagactggagtgcagtggcgtgatctcagctcactgcaacctctgcctcttgggttcaagcaatttcttctgccacggcctcctgagtagctgagactacaggcatgcgccagcatgcccagctaattttttatatttttagtagagacggggtttcaccgtgttagccaggatggtcttgatttcctgacctcgtgatccgccctccttgacctcccaaagtgctgggattacaggcgtgagccaccgcgcccggccatacctaatttttttctaagagacaggatcttgctatgttagcttggctggccttgaacttctaggctcaagtgatcctcctgagtagctgggactacaggtgtgtgccaccatgcccagctagtacctaattgttaatgctacctgatatgattggaagtttttttctgtatgtagcataaagtttctattctgccaatacaagtattttctttcattctgtatctttgttgatttagtgtttaatttcagatttattatttaattcttaactgatatgtatcttcaaaacaaatacagtgactcatttattttcttcctactctttcttaactatatctgacttttagttgaataataggtggggtagctcaggcctgtaatcctaatgctttgggagactgaggtgggaggatctcatgaagccaggggtttgagaccagcctgggcaacatagcaagactccatctctataaaaaatttgaaaattcactgggcatggtggctcattcctgtagtctagctagtcaggaggctaaggcaagaggatcatttgagctcaggaggtgaaggttgcagtgagctgtgtctgcaccactgcacttgagcctaggtgataaagcaagacatcttctcatttaaaaaaaaaaaaaaaagggccgggtgtggtggctcacacctgtaatatcagcactttgggaggccgaggcgggcggatcacgaggtcaggagatcgagaccatcctggctaacacagtgaaaccccgtctctgctaaaaatacaaaaaattagccgggcgtggcggcgggcacctgtagtcccagctactcgggaggctgaggcaggagaatggtgtgaacccgggaagcggagcttgcagtgagccgagattgtgccactgcactcctgcctgggcagcagagcgagactccgtctcaaaaaaaaaaaaaaaaaggcttggcgaggtggctaatgcctgtaatcccagcactttgggagtccaaggtaggtggatcacctgagatgatcaccagcctgactaacatggagaaaccccgctttgtctctactaaaaatacaaaatttgctgggcttggtggtgtatgcctgtaatcccagctactttggaggctgaggcaggagaatctcttgaacctgggaggcagaggttgtggtgagccaagatcatgccattgcactccagcctggggaacaagagtaaaactccatctcaaaaaaaacaaaaaggtatttaaatttcttttcacctttagaaacaagaagtacattgtgtgagttgtagtttttctgactttaattcttttccttaagtaaaatattaggactataacagaagatggaagttaaaagtcaagtcagcattgttgttcattttgtttgtttatttgttttgttttttatttatttttttgaaatggagtcctgctctgtctcccaggctggagtgcagtggcatgatctcagcttaccgcaacctctgcctcctgggttctagcgatcctcctacctcagcctcccaagtagctgggattacaggcgtgcaccacacacccagctaatttttgtatttttagtagagatggggattcaccatgttggccagactggtcttgaactcctgacctcaggtgatccactcccctcagcctcccgaagtgctgggattacaggcgtgagccaccgcacctggccagttgttcatttttaagagttaatagcagccgatgtgatggctcacacctgtaatcctagcatgttgagaggccaaggtggaggattgcttgaggccaggagtttgagagcaatctgacaaacatagtgaaaccctgcctatatttcttttctttttttttgagaccgagtcttgctctctcacccaggcaggcatgagccaccacgcctggtttatttctttttttctttttttctttttttcttttttttttttttttgagactgagtctcaccctatcgcccaggctggagtgcaatggtgcgatctcagctcactgcaacctccatctcccgggttcaagcaattctcctgcctcagcctcccgagtagctgggattacaggcatgtcccatcatgcccagctaacctggcttatttctatatattatttttttctaagaataaacaaatgaacaaaaacagttaatatcattggaataacatgcaggtcctaaaataagaagtatgtaagatgtgtttattgaaatatatatatggtatactggaaaaaaaaccccacaaaatattacacaaatactggttacagcttacagtagccagcctccaagatgccccccagtgatgctcacctcctaatattcatgcctttgtgtagtccccttttacagttcgtcagggttggtctgtatgagcattagaatatagggatatgatagtgtatgacttccaaaacaaagtcataaaagacattactgcttctgccctgctcttcttggattgactgctctggaggaagccagccactgggttataaagacattcaagcagccctatggaggatctacacggggagctactgagacttcctgcccacagctggcatcaacttgccaaccattgagtgagccatcttggaggtgggtcttccaggcctagtcaagccttcagattgactgcagccccagcctacatcttgactgcaatctcatgagagcctcagagccaaaactgtctaattaaaccactctcagagtcccaaaccacagaaataatgagataggccgggcgcaatggctcacacctgtaatctcagcactttgggaggccaacgcaggtggatcacctgaggtcaggagtttgagcctggccaatatggcgaaaccccgtctctactagaaatacaaaaattagccgggtgtggtggggggtgcctgtagtcccagctacttcggaggctgtgacaggagaatcacttgaacccaggaggcagaggttgcagtgagccaagatcacgccactgcactgcaacctgggcaatagagggagactctgtctcaaaaaaataaaaaagggatgagataataaatatttttattgcttaatacatgtatttatttacttaattaatttattttttgagacagggtcttgctctgtcacccatgctggagtgcagtggcatgattctagctcactgcagcttcgaactcctgggcttaagtgatccttctgcctcagcctcccaagtagctgggactgcaagtgtgcactgccatgcctggctaattttttcattaaaaaaaaattttttttaatagggttttgctgtgttgcccaggctggtctcaaactcctgggctccagtgatcctcctgccttagcctcccaagtgttgggatttacaggcatgaggcaccatgcccagccaattttttttttctttttttctttttctttttttttgattcttcagctaagacagcagaagagatgatttatcgtatggttgttatactcggccacaagtaaacacagaaatagtccagaatgtcccaggtccagggcagaggaccaacatgggcagttttggttatgagcaaggtgggtctcagaggtgatcagcgatcagagggcggtgaagttctggatccattgagacaagctctacacaatagcatgcagtcccacaacttgtaccagcatccccagcatctggcattccatgtttctgctcctgtgtggcctccacggtgcaacaagctagcggtttacttggacctctgcctcatctttcttcttttgtgcttcagactgcacattcgctttttcctccacttagctctcatgatgcagaggtttccaagaaaatggcgctaaggctgagagaaaccctagcccatttctattgtcagtttttattgaattccaccttggacgctcttctaggttcttgggttacaccagtaaacaaaaagatttctgctcttgaggagcttatattctatcagaggaacacagacaataaatatcagtaagctttccagtatgttagaatgtgataagtggtgtggaaaaaagaaaagtggatcagagtaaggggagttgagaaagcaggtagaggtgggagcatgtgaaggtgagaggttatagtattaagtagatctcaataagaaagtgatttttaaacaagtatttgaaggagttgcaggaattcatcaagtggatatataggaaaagaatttctaggcagtggggacagcttagagcgaaggccctaaggcaggggcatgagtgaataagcgcagaggtcagtgttgggggagagtaaggtgaaaactattagtagatggggtcagagatgtagtggggatggaagcagaaggctattttcaggaccttgtttctctgaaatggggagccagtgctggattttgcataaaacagagacatactctaatttatattaaaggatgactttggttgtttgttaaaaggagacaaactccaggggagtgaggataaaagcaggaagatctgttaggacaatattagcaaatcacatgaaagatgatagtggcttgggcgaaggtggtagcaatggaagtggtcagaaatggtcggattctggaaatgtattcaacagcaggaaattaagatcttcaaaatctcttgattagctgggcacagtggctcaaccctgttatcccagctattcaggaggctgaggctagaggattgcatgaggccaggagttcaagaccagcctgggtaacatagtgagactccatctctacataaataaataaataagctcttgattttatgtaagaaggtcagactgctgtaagactttcacatcctgatggaagtctcactttccagcctcatctcagaccattctctgctctacactcgcctccccactcccatatctgtcttttccaagagccctgttagataatccttcttgggtggcctactagttaagactgtggctctggaattaaaccatctgggtttgatttctggctcatttcatttaactacgatgtggtcttaagatacttagtttctctaagctcagttttctcatttataaaatgggaatcttaataatagcacctaactcacagagcagtaatgtgagattaaatgagctaatctatgtagaatacttaacatcatgcttggcatctactaagatctccgtaaatattggttactatttttttaaaatctcagattatgtttctttgaccacaatctttatcctctgcattaaatgctaaccctcttcttctatatcctctttcactagttttctactttttgtttctcaaattcatataaaaaattcttgaggacattggcttttaattattattatttgagacagggtctcactctgtcgcataggctggagtacagtggtgccgtgcaatcacagttcacctcagcctccacttctcaggctcaaatgatcctcatacctcagcctcctgaatagttgagactacaggtgtgtaccaccatgcctggctttttttttttttttttttttttttttttttttttgagatgaggtcttgctctctcgccaggctggagtgtagtggcatgatctcggctcactgcaacctccgcctcccaggttcaagcgattctcctgcctcagcctcccgagtagctcggactacaggtgcccgccaccatgcctggctaatttttttctttttttttgggatggagtcttgctctgttgcccaggctggagtgcagtggtgcaatctcggctcactgcaagctcggcctcccaggttcacgtcattctcctgcctaaccctcccgagtagctgggactataggcacccgccatcacacccagctaattttttgtatttttagtagagacgggatttcaccgtgttaaccaggatggtctcgatctcttgacctcgtgatccgcttgccttggcctcccaaagtgctgggattacaggcatgagccactgcgcccagacacaccctgctaattttttaatattttgtagagatagcatttcactatgttgcccaggctagtctcaaactcttggggtcaagcaatcctcccactttggcctcccaaagtgctaggattacaggcatgagtcatcatacctggcctcgctatttttaatttttatacggatagggtctcactgtgttgtccaagctggacttgcactccttggctgaagtgaccctctttcctcagcctcctgagtacctgggactatggtcacgtgccactccatatggctcttgaggaaatttttaaatgaaatcaaacgatacttttcctatcatctttttctaatctctctggtctttatacacatctggtctctattatttctgtagttatttctgtccatttttcatgattgcttacatgtcatttcattttttttgttgttgttttgagacaggttcttgctctgttgcccaggctggagtgcagtggcatgatctcggctccctgcagcctcgcctcccaggttcaagcaattctcccacctcagcctcctgagtagctgggattacaggcacaccaccacgcctggacaatttttgtatttttagtagagatggggtttcaccatattggccaggctggtcctgaactcttgacctcaggtgatccaccctcctcggcctcccaaagtgttgggattacaggcgtgagccactgtgcccagccatttcttttatatatgcttatatatatattttttaaattgagacggggttcagtcttgtcacccaggctggagtacagtggtgcgatctcaactcacagcaacctccacctcccagggggctcaagcaatcctcccacctcagcctcccaaatagctgggactacaggtgcattccaccatgcctgactagtttttgtatttttggtggagatgaggtttcatcatgttgcccaggctggtctcgaactcctgagctcaagcaatctgcctgccttggcctcccaaagtgctaggattacagacgtgagccactgtgcctggtctcaaatgtcttttcttgatgcgtttccaaatcctctagggagttagtcctgtgtttttgttcctttaccttttttttttttttttttgagatggagtctcgctctgtcgcccaggctggagtgcagtgacgcgacctcggctaactgcaacctccgccccctgggttcaagtgattctcctgcctcagacccctgaatagctgggattacaggtgcatgccaccatgcctggctaatttttaaatttttggtagagatggggtttcatcatgttggtcaggctggtctggaactcctgacctcatgatccgcccgccttggcctccccaagtgctgggattacaggtgtaagctactgcgcccggccctttacctttttttttgagacggagtctcgccctgttgcccagtctagagtgcagtggcttgatcttggctcactgcaacctccgcctgccaggttcaagcaattctcctgcctcaccctcctgagtagctgggattacaggcacgcgccactgcgcctggctaatttttgtatatttagtagagacggttttaccatgttggtcagtctggtctcaaactcctgacctcatgatccgcccaccttggcctcccaaagtgctgggattacaggagtgagccaccgtgcccggcctacctttgttttttttgggggggtggggggcagagtcttactctgtcacccaggctggggtgcaatcctgtgatcttggctcactgcaacctctgcgtcctgagttcaagcaattctcgttcctcagtctcctgagtagttgggattacaggcgcatgccaccacacctggctaatttttgtatttttagtagatatggggtttcaccacgttggccaggctggtcacgaactcctaacttgaggtaatccacccactttggcctcccaaagtgctgggattacaggcgtgagctactgcgcctagcttctttaccatttttatgcttagtttaaaaagttacggttatttttatatatgtctgccacctctgccagactcagcatcttgaataaaaagatctgttttcctcacctttacttttctggcacctagcagttagtaggcatcagtaagcattagtagaattaagcaattgagtggtcctgacaaggctcctgactgcagtccttacatgtaactaccagattcgtatttggatactccctagttcaatatcttcagtggcttcctatcacctgcagagtaaagtccaaactccttagctgagtatttggtgtcctctactatgtgacctcaatctatctcttcaactttattttctactatagttggtcaaactgatccattcactgttcctcaggggcccccatcccttttccacatccgtgtcttgattcatggttttattcctgaaaagcactccttgcctgtcctaattcatttccctcctcaggaccctcctcagatacgacctttttcacagagccttctccatcatcccagctttgaagtttcagagcatagtaactgtgctgcttgacacattttcactttatagaggtaatttatggacatgtattttttttttccaacttagtatagtttcttagggtttcttaaagtttctaagatgatttatctttgtgtgctgtacttgtaagcagcagtaagaaattgctaatttctggaatggctgtcactgtcggttactacaggttgaatgaaggggacaaacgcagaaatgaagacaaagacaaaaggatctgtttcgaaagaaggggtcagggagctccttgcttctagtgagcaaaggcagccctgagcttctaccgcccttcgtatttattagatagaaagagcagggagggagaggtaacagttggtcagctgctagatttatcacaggtacacataattgctttctttgtacaacaggcttcagatgctcctatagataattgcaaggaacactgcgctgggggtgtgactgccctcagcaccccttctggtggcagacgcagtttgtcagttttccaacatcctgctttcatgagaacagttttctgtttgctcatataacctccaatggcatactgagttggtcacgaccctcattctttctgcctgtaacacatggccaaatgaatgaatgaatataggaacaaataggcttcacatgccctatccatggtctagtttggaggggaattgggagttggacatgtaatacctaggccgtagtggaacactgggaaagggggtactccttgccctattgcttctgcctgcatattccattagcctaattgtaccaagtccatttgggattcaattactggtgtccagcatgttccaggcctaatattaatacctgtctttggtaatacaaaagataccatgcaccacccaccttagacatccttcagatagcaaggtgtgtcagggctgtggccctttgtattataagttatatcctcaaataaggcattgctcactttgctgcagcctgtcctgaacttagcttattagacctaccttggttttgcttggcttggcttacttatgcactgggtggtttaactatattggttccatagttcagcttactgtttaaaaatttcattctagttacattttaaacttgccttatgtttaatttttaacttgttaaggctagctttgctgtggagctcagatgaattgtcagtgggagcttttacatttcactctttttggaccttttggtggacctttctaatcacctatccaattttccactgttgtgagatactgtattattttatccaagtcaatcaataatgatatttgcttagggagtcaacagaaagacataactaacaatcaatctcactatgggaaaggaaaacaagtccactccttttgaaatctgattctctgcttccagagccattttccctcactctggctgtctttattctggtacacctctatattccagctgtaccaagctgttaatacttgaagttctcagaatcctccttgtgtcattttcccaggataattcctacctctcatccctcaagaagcttcccagtcccatcccaccttcacctttccccttccaagccaagtttcttgtcccttatgtctgttcctagagcactttgtgtgcatttctgtcagagaacttatcacagtacattacagtcgttggtttgcttgtctgggttttgttagtttgttttttgagacaggttcttgctctgtagcccaggctggaatgcagtgatataatcatggttcatgcagccttgacctcttaggctcaagcgatcctcccaccttagccttctgagtagctgggactacaggtgcatgccaccatgcccagataatttttttatttttgtagagacagagcttcactgtgttgcccaaggtggtcttgaaatcctgacctcaagtaatcctcctgcctcgaccttccaaagtgctaagattacagacaagagccactgtgcccagccctgttttctccagtaagctgaaatttcttctatatcggattcctctgtatatatcaagaatctagcacagtgcctggtatatattagatactcagtacatgcttattaactagacaggtgaatgcccaggtttctaaagttttttttttttttttttaagagaccaagttatgttccatccaggtttctaaattctgtgtcagggatggaaggtattgagaagtgctattaacttttctatttggctaacaaaaacacagaaatgagttgctgagcagcttccgccctatgagcgataatcctactagttggaagttaactatgataaaagtagatgaacgaattgtgtactcagagaaaaagagagtaagggaggagggaaggatagagaagggagtgagttagcaaaatgccacactgttagttgcaaactggcacaaaggtgaatgcggttcatgaggctcgcttgattaagaagagctgaaacaggagcaaagagcaaaaggcaacctgcagcgaaagcaaggactcagggaaccggcagacacaagcaggtgagcacatgaatggggcccaggtcctctgggattgtggtctctcaggcttccggggacatggaagaagggaagccagagtgtgacgttctgggaaagctgagtggggaggattcatgtctactccaggtataaagagacacaaaagaccatagaaggagatggagatagtgacaaacactggctggcaccagagtctcaacaaaaagaattggaaacagggctttgttggggggtgaataagagatagtgagcaagagaaaatgagaagaccaactgtgaaaggagtagatttaaatgtactgacgtatacatacctccctagtctacaaaaagtacgcctatctgcactattttgagtagcatataaaacttgacacatttggataaatgtcacctttatataacaaatgtggggaaaaccttcactgaagcttggaattgtgatttttttcaggggctgggtaattttttggaaagcagtcagctattattattattattattattattattattatttgagatagagtctctctctatcactgaggctggagtgcagtggcacacttaacaggcgtgagccactgtgcccgatcagctgttacatttttattaaatgggtgagatctagtgcctgagttactgtattattgtttatccctttggagtattcattcaacatctactgtgtgctcacaccaccattccagcaccaggaacacataaaaaacaaaacagataaaaattcctgcttacgggccagccaaggtggctcatgcctataatcctagcattttgggaggctgaggcgggtggatcacttgagaccagaagtttgagaacagcctggccaacatggcaaaaccctgtctctattaaaaatacaaaattagccaggcgcggcggcacatgcttgtaatcctggctgcttgggaggctgaggcatgagaatcgcttgaacccgggaggcggaggttgcagtgaggtgagattgcacaactgcactccagcctgggtgatagagcaagactctgtatttaaaaaaaaaaaaaaaaattctgcctggctatgtatagttcacatagtgggtaaaggtggcaggaaacaggaaatatgaaaataaacaaaagtaaattatataatgtgttagatggtaaaaagtcctgtggagaaaaataaacagaaaaggaagataggaaaacatgatgtggtcagatgggttataattttaaataaggtagacaaggaaggtctcactgagaagctgacatatttgagcaaagattttaacatagtgaacgagcaagctgtgcagactcgggttctgtaaaataggatgtcattctataaatgtaagactttttttttttttttgagatggagtctcgctctgtcgcccaggctggagtgctggtgcaatcttatctcattgcaacctccgcctcccgggttcaagcgattctcctgactcagcctcccaagtagttgggattacaggtgcctgccaccacgcctggctaatttttgtgtttttagtagagatggggtgtcaccatgttgaccagtctggtttcgaactcctgacctcatgatccacccacctcggcctcccaaagtgctggattacaggcgtgagccactgcacctggcacattagttattttaaaatggcttacattgctcggtgcggaggcttgtgcctgttatcccaggactttgggaggctgaggcgagtggatcacctgaggtcaggagttcgaaaccagcctggccaacatggtgaaaccccatctttactaaaaatacaaaaaattagccaggtgtggtggtatgcgcctgtaatcctagcttctagggaggctgaggcaagagactttcttgattccaggaggcagaggttgcagtgagccaagattgcaccattgcactccagcctgggcaacagagtgaaactccatctcaaaataaataaataaagtttaaaaaaataagacaatgcctaatgccattttaaaataactaatcttaaaagtgcgattgcaagtggtttagaatgtagttactgagagctgaaaggggcattctatttgttcatcctttgctttctctaaaatctattgtttggttttacactgaacaactagtatgactctgcagggttttttgtttgtttttttttgtttgttttttcgtgaaaacagatacctaggatgttttttttcacctttgaaatctctggaagaaaaacaaatatttacttaatagaaatagaagctggagaagtttttcaaaaactacaatgatatattaatacaaaatttgggtgacccctgaagaaactgcagtcacacagaggaaggaaagctgctgcctagaatgccattaattcactttctgagggaaaagagggacccagagttggacaaagcaaggatctgttaacactcagagactctgaagagttgtttctgtttcgagttatttagtttgatctacatgtctagctcatttgctgtaaaagaatcagccagagtgtgaacctggccaggcagctatcctgtatcagtggttgatttcctgggatgaagtttcctttgtttgggattgtaaaaggtcaaacaattttgtctgttcctctcctaaccaatagctcttattcttaactacaggatagaagttcagccttgaatagtgttctaacggatggttccagctctgctttggtagtacctaagaccaaatctagttattttaaatattttatttattgagacagggtctcactctgtacctaggctgaagtgcagtagtgcagtcacagctcactgaacctcaacttcccgggatccagagatcctcccacctccagcttcccaagtagctaggaccacaggtgcatgccaccacgtccaactaatttttgtacttttggtagagatggggtttcatcatgttgcccaagctggtctcgaactcctgacctcaaacaatccactcaccttggcctgtcgaactgccgggattacaggcatgagccactttacccagcctaaatattttaaaattccaaatatagttaactttgttttatgtatttattttgagatagaatctcactctatctctcatgctggagtgcagtgacacagtctcagctcactgcaacctccgcctcccaggttcaagcgattctcgtacttcagcctcccaagtagctaggactacaggcctgtaccaccatgcccggctaatttttgtatttttagcagagacggggtttcgccttgttacccaggctggtctcgtactcctgacctcaagtgatccgcccgcctcggcctcccaaaatgctgagatgataggcgtgcgccaccacacccagctgcaattaactttaatttgcttttttttttttttttttgagacggagtcttgttccgtcgcctaggctggagttcagtggcacaatctccgcttgctgcagcctttgcctcccaggttcaagcaattctcctgcctcagcctccctagtaactggagcgacaggcatgcgccaccacgcctaatttttttttgtattttaatagagacagagtttcaccatgttggccaggctggtctcaaactcctgacctcaggtgatctactcacctcagcctcccaaagtgctgggattataggcgtgagccaccacgcctggcctaatttgctttattttgtgtaatatgtcacctgtggggagggagacattttgataaaccctagatactcaacaaagttgagatgattgagaatccttaatctgtactccaaatatacgaagtattttgttagagctgaagggcctgggaaatgggaactttagaatcagatcttgtcacttaaccagtaaactatgacttacataagagatccagagatgaaagctggatcagaagacccaaaactgtttggtgcaaagtacataaagtgcaagtcaggaagctttaccttagaggatagatacggcattattcattaataccggaagaaaatggcagagaaaacgtttatatacatacatatatatgaaaatattttatatatatatatactttttttttgtgagacggagtttcgctcttgttgcccacgctggagtgcaatggtgcaatctcagctcactgcacccttcacctcccgggttcaagtgattctcctgcctcaggctcccgagtagctgggattacaggctatttaaaaaaaaatttttaaataaacataaaattaaaatacatagaatatattttatatgtaaatatacagagcaggaaaattagccagcagacagctggcaatgtctggagacgtttttggttatcacaactggttgtgggtggaggggcgggatgtgctattgacctctagtggatagaggctggggatactgctaaacatcctaccttacacaggacagcgcccacatcaagccctaattgttttttttttttttttttggttattgtttttttttttttaagacagattcttgctctgtcctccaggctggagcacagtggtgcgatcttgactcactgcagcctccgcctcccgggttcaagtgatgttcctgcctcagcctcctgagtagctgggattacaagcatgcaccaccacaactaactaatttttgtattttagtagagacgggggtttcaccacgttggccaggctgatctcaaactcctaacctcaagtgatccgccagcattggcctcccaaagtgctgggattacaggtgtgaggcactgctcctggcccctaaatgtaaacagtgctaagattaagaaaccctgaccttgaggaactccagttttcctttacggatgagatcataggacacagtctgagctttgcaggaggccagatacaaatcaccaaaacaaaaagcacttaattgtttttgttggtttctcatttaatgtccatccagaaaaaaagagggggaaaaaagttgctagtaaagcaactgtgaagtatggatgccattattccattcaacactaccaagtgattttttgtttttgtttttgttttgagacacagtctcactctgtcgcccaggctggagtgcagtggcatggtttcggctcactgcaacctctgcttcccggtttcaagcaattctcctgtctcaacctcctgagtagctgggactactggcgcatgccaccatgcctggctcatttttgtatttttagtagagatggggttttaccatattggtcatgctggtctcgaactcctgaccttacatgatccacctgcctcggcctcccaaagtgctgagattacaggcatgagccactgcacccagccacaaatgttttttatcacaggtttcaataatattcaaactcatgataatggctttgttgcagaatgatggaaaaaaaccctatacatttaaaaaattattttccagtaaaacaaatccggctgggtgaagtggctcatgcctggaatcccagcactttgggaggctgaggcaggtggatctcaggctgagttcaagaccagccagggcaatatggcagaaccccatctctaccaaaataaaaaaaatagccaggtatggaggcacacacgtgtaatcccaactactcgggaggctaaggaggaaggatcacttgagcccgggaggtgatgattgcagtgaaccgtgattgtgccactgcactccagccggggtgacagagtgagaccctgtctcaaaaaaagatggggagtcagaaaagagggagggagaaacggatatttatgttctaaagggaaaatcatcaaaatggaaagaagaaattagactcaacaataggagcagagtggcagagagcctttgagtatgtgagagccaccctacaattattattttttatttttagagacagggtcttgctttgtcacccaggctggagtgcaatggcatgatcatagctcactgtaaccttgagctcctggactcaagtggtcttcctacctcagcctcccaagtacctgggactataggcatgtgccaccatacctggctaatttatttattatatttatttattttttttgagacgaagtcttgctctgttgcccaagctggaatgtagtggggcgatgtctgctcactggaaccttagcttcccaggttcaagtggttctcctgcctcagcctcctgagtagctgggattacaggcacctgccaccaagcccggctaatttttttttttttttttttttttttgagactgagtcttgctgtgtcgcccaggctggagtgcagtggcacgatctcggctcgctacaacctctgcctcccgggttcaagagattctcctgccttagcctccccagtagctgggattataggcacccgccatcatgcccagctaatttttgtatttttgtagaggcggggtttcaccatgttggccaggctggtcttgaactcctgacctcaggtgatccgcctgcctcggcctcccaaagtgctgggattacaggcatgagccaccgcgcctggcctaatttttgtatttttagtagatacagggtttcaccatgttggccaggctggtctcaaactcctgacctcaggtgatccgcccgcctcggcctcccaaagtactgggattacaggcatgagccaccgcgcccggcctaatttttgtatttttagtagatacagggtttcaccatgttggccaggctggtctcgaactcctgacctcacgtgatccacctgccttggcctcccaaagtgctgggattagaggcatgagccactgcgcctggcctgtgtatttttttgtagagacagggctctcgctatgttgccaaagctggtcgtgaactcctaggctcaagcaatcctcccacctgagcctcccaaagtgctggaattataggctggagccactgttcctggcccccaccctataattaaaagcaaagtggctgggcgtggtggcttatgcctgtaatcccagcactttgggaggccgaggcgggtggatcacgaggtcaggagttcgagaccagcctgaccaacatggtgaaaccccgtctgtactaaaaatacaaaaattagctgggcatggtggtgggtccctgtaatcccagctactcaggaggctgaggcaggagaatcacatgaacccgggaggcagaggtttcagtgagctgagattgcgccactgcattccagcctgggcgacagagtgagagtccgtctcaaaaaaaataaaataaaaaaaagcaaaggtcattatgttaagtgaaacacgccaggctcagaaagatatatactgcatgttctcactcatatatgggagctaaaaaagttgatttcatggaagtagaatagaatgacagttaccagaggggctgggaaggctagtggggtgtggagagattaggagaacttggttaatgggtacaaacttacaattaaatagaaggaataagttatagtgtttgatagttcagtagggtgactatagttaacaatattttattgtgtatttcaaagtagctagaagatttgaaatgtttccaacacaaacaatgataaatgttgtaatagatatcctagattctctgatttgatctttacacatcgtctgcatatatcaaaatatcacatgtattccataaatatgtacaattactctgtatttttaaaaaccaaagcatgggaaaatatatcttcaattccaatttccttttggaactagatacccttcggaaaaggtgctaagagcccacatcaccctggtttagcttgttgtacaggttattagaatagggaaggaacaccttgggcccaggagtgagtgtttcttcttttacaggtgtaactaaaaaagctagttggtctaacttgtgtgtctttgtcctataagcctctgcaggtgtgcgagcaggattgcttctgcaacaaaagcctccacccagccacatcttgggaaaagaatggccacttcttggggcacagtctttttcatgctggtggtatcctgtgtttgcagcgctgtctcccacaggaaccagcagacttggtttgagggtatcttcctgtcttccatgtgccccatcaatgtcagcgccagcaccttgtatggaattatgtttgatgcagggagcactggaactcgaattcatgtttacacctttgtgcagaaaatgccaggtaagtgcaactgggacccttagtagagtctgtaaatccacactttagcatctcctcccagaaacaaatatgctgagagtttattatgtgaattacagaatctcacacctagtggatgtctttcttcagagaactttggactacaattgaacatgtggtttatttatttatttttatttatttgttttgtttttattttttaactttttttttgagacaaggtcttgctttgttgcccggtctgtagtgcagtggcatgatgacacatcactgcaaccttgacctcctgggctcaagcagtccttccacctcagccccctgagttgttgagactacaggcttgtgccaccatgcccagctcatttttaaatttttttatagagacctgctcaggctggcctcaaactcctaggctcaattgatcctcccacctcagcctcccaaagtactgggattataggtgtaagtcaccatgcttggccagaacacatggtttaattcaatgtgaaattagaagagagctgggctgtctgtagtctgaaacccatgtgttcaaaaagaatagttataatttgttcttcctctttaaacatgggatactccagggatccataatattcagaatatggggagtggttttgggagaaggatcacatgagaatttcactgccatccttggacatgaggctaggaatccctgaagattaactttttctgaattgtcagtgttttttcctcaggtcacttatggagcctggggaaaggtggaggagttaggtgtccaccagagaaatggtagcagaaatggaccctcagaggttgctctagtccttctttccagtactcctgcaagacattcctcacaactaggatcatttgggataacttcagggaagtcataggaaaacttacagagacagagcccagcatctgaagcagcctaacttttggtaaccagctctctcttctgttttgttccatggacaaaataggacagcttccaattctagaaggggaagtttttgattctgtgaagccaggactttctgcttttgtagatcaacctaagcaggtgagtttcttatgatttgatgtttagattctcaatgccttgataacttgaccacaccactgctgttaaatatttcatgctattcactaatgagattgagatcatgtgtgagatcagctttctctcctcagctaatctcctggataaaattaattacatttcccacgctcatgagggctgggtggaagaaggctagaaaattggttgtggtaatgcaaggatgacactagcttttaagagattactccctatgtacttactgtttaaaattttgagttgaagccatcagttgtatttgttcatgtaagcgcagaagataaacatgaagttctgtagggtatgatgtataaacatggcagttgaaggcatggtgagcagtgaattccatttcagagtgccttgatgcaggatggaaccatatctatacttgagaaattaggcaacaacccatgatgacaaaaatctttggtggtagaagatgaatagagagtttgtggcgactatatttcacatttgagcatctacaacatactacatcctatgtgtctgaggccatgttgaaataaaatagaataatgcagaatgttaaacttggggagcaaatgtaaaggtatttattgttcattgtcacaagaataatcattacccaaatgcttgatgttaaaaatgatttgagtttggagaactgagaggatatatggatatatatacattttcttctttttcttttttttttttttttttgacggagtatcactctgttacccaggctggagtgcagtggcctgatctcggcttactacaacctctgcctcgcgggttcaagcaattcttctgcctcagcctcccgagtagctgggactacaggcatgtgccaccatgcccggctaatttttgtatttttagtagagacggggtttcactatgatggccaggctggtcttgaactcctgaccttgtgatccgcccatgtcagcctctcaaagtgctgggattacaggtgtgagccactgcacctggccccgagaggatatattttcttagttcagtagcacatggatagcaaatctactagaaaaatttggagctgttcaaaagaaactaccatcagagtaaacaggcaacctacagaacgggagaaaatttttacaatctacccacctgacaaagggctaatatccagaatctgcaaagaacttaacaaatttacaagaaaaaatcaaacaaccccatcaaaaagtgggcaaaggatatgaacagacacttctcaaaagaagacatttatgcagccaacggacacatgaaaaaatgctcatcatcactggccatcagagaaatgcaaatcaaaaccacaatgagacaccatctcacaccagttagaatggcggtcattaaaaagtcaggaaacaacaagtgctggagaggatgtggagaaataggaacactcttacactgttggtgggactgtaaactagttcaaccattgtggaagacagcgtggtgattcctcaaggatctaggaatagaaataccatttgacccagccatcccattactcggtatatacccaaaggattataaatcatgctgctataaagacacatgcacacatatgtttattgaggcatcattcacaatatcaaagacttggaacgaacccaaatgtccatcaatgatagactagattaagaaaatgtggcacatatacaccatggaatactatgtagccataaaaaaaggatgagttcatgtcctttgtaaggacatgtatgaagctggaaaccatcattctgagcaaactgtcgcaagaacagaaaaccaaacaccgcatgttctcactcataggtgggaattgaacaatgaggacacagggtggggaacatcacacaccggggcctgtcgtggggtggcgggagcagggagggaaagcattaggagatatacctaatgtaaatgatgagttaatgggtgcagcccaccaacgtggcacatgtatgcatatgtaacaaacaaacctgcacattgtgcacatgtaccctagaacttaaagtattaaaaaaaaataccagggtcaggggtatatttgaatagtaaataaataaattaattaattaaaaataaataattaaaaaagaaaaattaggagctgttgaaagcaactatattattagaaactgacttggcatttagaaaaggtgatcgtgttgtagttgctaacaataatgatcaaagggcagtcagatatcagaatagaagttcattcagggaaatagtggatttaaaataatggttttcatttattacaaattgagcatctactgtgtgccatatgatgatacaggaataagcctgacatgttctttaggagatcatcaaaagtatggcatcattactgccacagcttgtgtggtaaccacatgcactatgcctcatgcacacaacagtttagtggtggtaggcagcgtatctaccatcccacacttgaggaaaccaagtcccaacaaggccaagtgacctaagttaggccacagggctagcaagcaagtcttctgactctaactcctgttttcttcactctaccatcctaaagctgatttatatataagaaacatgaaataatcagccaggtgctgtggcgcatgcctgtaatcccagctactcaggaggctgaggcaggagaatcgcttgaacccgggaggcagaggttgcagtgagccgagattgtgccgttgcactccagcctgggtaacaagagcaaaattccgtcttaaaaaaaagaaaaagataatcaactaaaatgatcacaatataaaagaataatttggccaggcacggtggctcatgcttgtaatcccagcactttgggagggtgaggtgggtggatcacttgaggtcaggtattcgagaccagcctggccaagatggtgacaccctgtctctactaaaaatacaaaaattatctgggtgtggtggcatatgcctgtaatcccagctacttgggtgactgaggcacaagcatcgcttgaacctgggaggtggaggttgcagtgagccaagatcacaagatcatgccactgcactccagcctgggtgacagagcaagaatgtcccaaaaaaaataataataataataataattttttattaggactgtcaaaatgaaatggattctccttttttttttttttttgagatggagtgtcactctgttgcgcaggctgtagtgcagtggcataggcttgactcactgcaacctctgcctcccaggttcaagcaatgctcttgcctcagcctcccgagtagctgagactacaggtgtgtgccaccatgcctggcttatttttgtattttttagtggagatggggtttcaccatgttggtcaggctgatctcaaactcctgacctcaaatgatccacccaccttggcctcccaaagttctgggattacaggtgtgagacaccactgcgcctggcctggattctccttcaaagcggcccacttctctaggtttctcctgctacagagcagagagaggttggagccctatgccacctccctcttcttgctcccacaaagtatgttgacagaatagaccagtgccagccactaaatggatcgttcatcagatgaacgggttatctcttttgaagggtgctgagaccgttcaagggctcttagaggtggccaaagactcaatcccccgaagtcactggaaaaagaccccagtggtcctaaaggcaacagcaggactacgcttactgccagaacacaaagccaaggctctgctctttgaggtaagttttaaaactgcatcttggatcattctgcccttttccctatatgaatactttatgagtttttagccttttggaatgtgaccactaccttcagtattccaccactgccaaagcattgtgatgactctgaccacttgttatagctagttgtttacatttttaactatcactcttaaatgtatagagcttttcctaaaaaatttaaagtactttctatctaggatattcttcattctttttatttttatttttattttttgagatggagtctcactctgtcacccaggctggagtgcagtggcgccatcttggctcactgcaagctccacctcccaggttaatgccattctcctgcctcagcctccggagtagctgggactacaggcacctgccaccacacccgactaattttttgtatttttagtagagacggggtttcactgcgttagccaggatggtctcgatctcctgacctcgtgatctgcccgcctcagcctcccaaagtgctggaattacaggcatgagctgctgcacctggctgatattcttcattcttttagatttttaaagcagaatcagaagtcgtttctaatcaactttattaagataaacttacatacaataaaatatatctattttaggctgggcacggtggctcacacctgtaatcccagcactttgggaggctgaggcaggtggattgcctgaggtcaggagtttgagaccagcctggctaacatggtgaaacctcatctctactaaaaatacaaaaattagctgggcattgtggcgcacgcctgtagtcccagctactcaggaggctgaggcaggagaatcgcttcaacccaggaagcagaggttccactaagctgagatcacaccactgcactccagcctgcgcaacagagcgagactgcatctcaaaaaacaaacaaacaaaaaattatatattttaggtgtacagttaaatgagttttgacaagaaatagaaatttcctcatgctcttttatagtgagtttccctcacccctgaaaccaaccaatcactaatttgcttcctgtcactataagttttgcttattcttttcatataaatggaattatacagtttttatttttatttttgtatatctggcttttttcctctcagcataaagtttttgagaagaataatggaactttaaagtttgattttttttttttttttggaaacagagtctcactctgtcttccaagcttgagtgcagtggcacgatcttggctcactgcaacctccacctcccaggttcaagcaatcctcctgccttagcctcccagttaactgagattacagttatgtgccaccacacccggctaatttttataaatttttttgtagacatagggtttcaccatgttgcccaggcttggtttcaaactcctgagctcaggcagtccaccttccttggcctcccaaagtgctaggattataggaacaggcatgagccaccacgcctggtgaagtcatatatatatatatacattttttttttctgttacccagactggagtgcagtggcacaatgttggctcactgcaacctccgcctcccaggttcaagcaattcttctgccacagcctccagagtagttgggattataggcatgcaccaccacgcctggctaatttttgtatttttaatggagacagggtttcaccatgttggccaggctggtctcaaactcctggcctcaaactccacccaccccggcttcccaaagtgctgggattacagacgtgagccactgcacccggccctaagtcatatatttcaactcccttcttattcagatcaaaaatttaagtatagagagttttgttaaattcagtatttttatttttattcttatttatttatttatttatttattttttgagaggcggagacttgctctgtcgcccaggctggagtgcagtagtgcgacctcaggtcactacaacctctgcctcccagattcaagcgattctcctgcctcagcttcccgagtagctgggactacaggcgtgcgccaccactcccagctaatttttgtatattttagtagagatggggtttcgccatgttggtcaggctggtctcaaactcctgacctaaggtgatctgcccgcctcagcctcccaaagtactgggattacaggcatgagccattgtgcccagccaaactcagtatttttaaattttattgtatatatttgttatgcaataaacatgtaagttaataaaatttaaatttcatgttgtgaagaatataagcagaatctcattataacaaaaaatcaggctcggtgcagtggctcatgcctgtaatctcaacattttgggaggccaaagcaggaggattgcttgaggccaggaatttgagaccagtccagacaacaaagcaagacccctatttctacaaaaaaaattaagtcccggtgtggtagctcatgcccaaaatcccagctctatgggaggccaaggcgggcagatcacctgaggtcaggagtttgagaccagcctggccaacatggtgaaaccccgtctctactgaaaatacaaaaattagctgggcatggtggctcacgcctgttggtcaactactcaggaggctaaggcaggagaattgcttgaacttgggaggcggagcttgcagtgagccgagatcacgccactgcactccagcctgggcaacagagcgagactctgtctcaaaaaaaaaaaaagattgaaactgaaaatcatagtaggccaggcgcggtggctcatgcctgtaatcccaacactttgggaggccgaggcgggcggatcacctgaggtcaggagttcaagaccagcctggccaacatggtgaaaccctgtctctaataaaaatacaaaaattagctgggcatggtggcaggcatctgtaatcccagctactggggaggctgaggcaggagaattacttgaacctgggaggcagaggttgcagtgaaccaagatcgtgccattgcactccagcctgggtgacaagagtgaaactctgtctcaaaaaaaaaaaaaaaaaaaatcatggcaaaaaaggactctgtattacaggccctaaatccattttcctttgactgtcagtacagaggacttaagtcacttatccaaggatgagcagcctaatatgtctctgtgagaacctgaatcctgattcctgatttattcctcatttattcaacataagagtgcttactgggccaggtgcagtggcttacgcctgtaatcccagcactttgggaggccaaggcgggtggatcacgaggttaggagatcgagaccatcctggctaacacggtgaaaccccgtctctactaaaaatacacaaaattagccaggcgtggtggtaggcacctgtagtcccagctactcgggaggctgaggcaggagaatggtgtgaacccgggaggcagaggctgcagtgagctgagatggcgccactgcactccagcctgggtgacagagcaagattctgtctcaaaaaaaaaaaaaaaaagtgcttactatgtactgggtactggtgaagttactggaatacattcagcagggaaccaaaaatacaaaaatggtctttgcactcctgtagcttacattctacttcaggaagacagaaaataaacatctgaacaagtcaaaagaaagttatgttaggttctgcaggtgctatggagggaaaaaaaaaaagcagggaaaggcaggtagggaatctgttgatagtgtgggggaaatgctattttaaataggacagtcagggaagaagtctttgataaaattcagttgatcagagatcttagggggatgaagaagcaagttacacaagacatttgtgggaagaatattccaggctaaagaaacagcaggtgcaaaggccagaggcaggtatgtgcttggtatgttaggaacagcatccaggaggtcagcatagctggagaggaaagagcgatatgagaggtaaggaggcggtaacctcagagaggcagggttaaggggtgtttatcatgtaggatctcaaatgccagtgtaatcactttggctttttctttttcttttttctttttgagactgaattttgctcttgttgcccaggacggagtgcaatggcgctatctctgttcactgcaacctccacctcctgggttcaagtgattcttctgcctcagccacccaagtagctaggattacaggcatgcgccatcatgcccggctaatattctatttttagtatagatgggttttcaccatgttggtcaggctggtctcaaactcctgacttcaggtgatccgcccgcactttggctttttctataagaaggaagccactggaaggttttttgttttttggcgttttgttttgttttgttttgtttgagacagagtctcactcttgttacccaggctagagtgcaatggcgcgatctcggctcactgcaacctccacctcctgggttcaagcgattctcctacctcagcctcccaggtagctgggattacaggtgcccaccaccatgctaatttttttgtatttttagtagagatggggtttcatcatgttggccaggccggtctcgaactcctgacctcaggtgatccacctgcctcggcctccaaaagtgctgggatgagaggtatgagccaccatgcccggctgccactggaaggttttgagccaaggaaacacatgatttgacgtccatttttaaagcaccgttctggctgctgttttgagaacaaactgtaggatgggggagaaaagtggagaaggcaagagcagaagctctcttgctgtgcttcatcctgttcacttatctgtctttaaaagtttgtttatatataacttaactggtttttcctggttgaaacaggatccagaggtcattatgtggtatgtttcatccatcagaaatgagaacagcaaacagactagcgttcttcctatcctatttggagaattcttttttctttcccttgataattatataaacataagacattaacacccatatcaatggtctgtattatggagaggcaagatgtttttgcaagatcgtcattcccatctcctgaaacaggattccttaagtctagatctggagtctccccatgctctagagaccctagccatgtgccagaatctgacaggagctggtagcagagtacctcagcccttaggtgtgaacttcaccacagcaggttcatgtcagctcatctaaggaatggagtgggaaggctcctcctagtttccagtgtatgtccaggtagagtttatcaggtttaaaaagttacaggatcctgatttgagctggcagggttaaatatatgcctttccataggtccagttcacctatacatttagatggtttggtttagctttacttaaagtcaaaggaatctctgtgtttgtgtttttgcaagaaactggtaatggcttgcctagtttcttctctagtttcttagggcaaaggaatgagttttgccaaaattttatctaggaaaaatggagtagttttctaagtcttacaggacactgtcaaaatatggaaatctattttattgccttagggaattctttttttttttttttcctttttctctaggtaaaggagatcttcaggaagtcacctttcctggtaccaaagggcagtgttagcatcatggatggatccgacgaaggtgggagaggtgttgatatgcgttccagggggagaggggcaggatcagtgaaagatctaactaaaggaactggggccaggaataaacagaaggaatgagatagcaggaaatagaagacagggagaagggaacatgtgctctagacatggaatttagagaggaaaaaaaaaaaacaaggttggggccaggaaagagaaaaaatgctctgggatctaatccttgtctttctttctttttaggcatattagcttgggttactgtgaattttctgacaggtaatacatcctcaagtttatctttagagcttaactagcttttacatgcatagtcagaggagtaaaagccttttctttcattctgtattgtttcttcttctttaaaaaaggaaaagaggctgggtgtggcagttcatgcctgttaattccagcgctttgggaggctgagttgggcagatcacttgaggccaggagttcaagaccagcctggccaacatggcgaaactccgtctctaccaaaaatacaaaaatagctgggcatggtggtgtgtacctgtagtcccagctactcaggaggctggagaatcacttgaacccaggaggcagaggttgcagtgagctgagagccgagattgcgccactgcactccaggctggatgatagagcaagactctgtctccaaaaaggccttccaaaaaaaaaaaaaacacctgccttgaaggcctctgctgcaacaagagtccttccgagttgacattcacctgcagccttggggctggggagcagtggagtatgtatggaataccttcagtgtatgataagagcaagagagacaagtgttgggctgcccaggatgtcgaggctatttagagctggctctcatttgacaggtcagctgcatggccacagacaggagactgtggggaccttggacctagggggagcctccacccaaatcacgttcctgccccagtttgaggtgagtcatttaatgaagatctggttagaagtgcacttggcaggcgtatcatggtgccaagaaagaggcgccccattttcagccagcagctctaccacgcttaggcagagtcaagtcaattaataactaggtgaatgttcccttgccatctcactgttcagaatcccttcgtttcctcaagcctagtgagattagccccttaatctgtcttcatctctgattttttgctgggagggacgggtggtggtgtgaacatcttcaggtaattacagatcctgaatagtctttttgctttttctgatttgcagaaaactctggaacaaactcctaggggctacctcacttcctttgagatgtttaacagcacttataagctctatacacataggtgaggacggggacagggaagaagaatatttcatgttgtatgattctcctaactttccaaagcattctcaaatctgttattgtatctgattagcaaaaacaaagtctgtgccaattccctaaggcctatcaactgaaacccggtccacttacaaagccggaggagcctaagaggcttctccattcttggcctcaaaagcattaatatatgacttaagagtcaaaagttttcggctgggtgcagtggcttcatgcctgtaatccctgcactttgggaggccgaggtgggtgggtcacctgaggtcaggcgtttgagaccagcctggcaaacatggtgaaaccccgtctctactaaaatacaaaaattagctggatatgacagcgcacacctgtaatcctagctattcaggaggctgaggcaggagaatcatttgaaccctggaggcggagattgcagtgagccgagatcacaccactgcacttcagccggagcgacagagcaagactcagtctcaaaaaaaaaaaaaaaaaaagaatcaaaagctttctgtagggagaggacacttcaagaaggctcaggcaaagctccttgccagctcctttgagctggccttcagaggttcagaatccagcctggaatgtgatcccagttggggctaggagctaagctaaagagagcttttctgggaatggttcctagtgtgggaccctaggaattgtcactgtctctggcctttgaatgataactgtggggaattcttactgcatagccttgatccaaactgtgcagaaattaccccttgttgaccacaggagatgaatatgtcacagacagaacaaggttttcatctttccagagggacacaggaacaatgttacttttgaaagaggtagctttaggctagagaacttcaggaccagcatgaaattagtcaatcctgtattttacagttacctgggatttggattgaaagctgcaagactagcaaccctgggagccctggagacagaaggtttgtctgggtacctgtgctggggggggatggtgagggtgacacagatactccgcttgcttcttcccttccttgatagccattctatgaaggaaaagattatgttgaattgggaggcaaatgttgtataatggacctaataatggcaaactccttttctagtttataagttcagaagttttgatgtatattattagccatttttagaatgaggtctacttgttcaggggtaacagcctatgtctaggcagctgaagtgtctgcagaaatcccaggctttacgaatacattcagcaggagcttgctcaagccctgagctttacattggaggcacaggaagcagagtctgttctacatgcaggtggaacaacagagtaactccattgatctcttcacaggtcaggcagaactgggttcagtcccagtgttgtgatatgaggcaagtaacctatctgtgcccctttcctcacattaaatgagaatttgcatttaaggcactttgtacagtaatctgttattgggatgacatctattttgcatttcagagtatacaaaacatcttcaagtatatttaattgaagcctctcagcaaccagtgaggaaggtagcatagcatttctttcctgtttttataaaggtggaaagttgctgtattgaaggttttggatctctttgagatgtgatgaaagccatggacccctctgacaaaagcacatatgcatgaaaatttgcttctggtttcagggggttcaccaaccccacaaagcctatctttgaaccctgagttaaggattcctgtcacaggatgttgtcatggaattaatttcataggattttaaggcccagcccccatggtgattcttttccacctcactggcttcttgcttgccttcctccctctctctcacttacttacctcttaccttgtgccctggattctttcagggactgatgggcacactttccggagtgcctgtttaccgagatggttggaagcagagtggatctttgggggtgtgaaataccagtatggtggcaaccaagaaggcaagtgatgttttttcactggttaaagttacgtttacaatggaagctctggaaaagtcccatgggaaactttttccagaactcaagagaagcttatcttgttgcagggacttattccaaagatcttggcatgcctccaaggactaatgtgaagtgacagtgaacaaagcagctgtcattctgcatcagccaagtgtcatggacccattagatacctgcccttagccaagtgctgtggtgcacatctattgtcctagctactccaaaggttgaggcaagaggatcacttgagcccatgagttcaaggctatagtgcgcaatgccactgcactccagcctgggcaacagggagaccctacctcttacaaattaattaagaagcatattctaagcctaggtctaatgcagcagtgtgaaagcctgtttagttaatggttagctatttaaattatagtaaaacttaaaaccaagacaagaatgattcatcttcttataaaaggtatatacctgaatatcaaggaatgaacctgaattcccagtgaaggaagcaggcgagccctttagctacttgcttacaaatgctatggaatgtaatgctaggcagcagcacaaggttggccatgatctggtgaatacagattaggcaggagagcggccatggagaaacagactggtgaggctgcagacgtttgctcatctttgttttgacgcctcttgtcccaagcctcagccttctcctgctttccttgaccttcctgctgttccctcattgtctccagcagcctgcctcagagagtgtccccttcccccagcgtcgttctcaccttacccctgtgcacctttgcctggcaggggaggtgggctttgagccctgctatgccgaagtgctgagggtggtacgaggaaaacttcaccagccagaggaggtccagagaggttccttctatgctttctcttactattatgaccgagctgttgacacagacatgattggtgagttcaccccaggtgtcagtccagagaggaaggtggatagggctgtggtggggaaggtcaaggagaaagagcacttgaggtgctttgtcggggtgattacccacctcttttctagtcactcgaacaaaagggtggaaatgacttagagtcttttggaggtgagagatgaccaaaacaactatatgaggtctttttttttttaacatgtttattgaggtataattggcatacaataagtgcacatttaaagtatacaatttaagttttgtcatgtatacacccatgaatccatcagcacattgaagataataaacatattcaccacaaaaagtttcctcctgtctctttataacttttcttcttatcacaaaagcagtgtttttgcctaactgtgaaagtatatgtacctgatctgtcatggcctgagagagatgaattaatttcctattattgtgggggttttgttgttgttgttgttttggttttttgtttgtttgtttgttttttgagacagagtctcactctgttacccaggctggagtgcaatggcatgatctaggctcactgcaacctctgcctcccgggttcaaccgattctcctgccccagtctcctgagtagctgggattacaggtgcctgccaccacacccggctaattttttttttaatagagacgaggtttcaccatgttggtcaggctggtcttgaactcctgacctcgttatctgccttcctcggcctcccaaagtgctgggattacaggcatgagccaccacacccggcctattgtgttttatgggtctgttttttccattgtggttaaatatacataacatggaatagattgtaaataagtaaattaggttgcatagattacattatgtacatgtgtatataatgaatgaatgaatgaatttccttatgcttccttgaaggcgttttgatatcagataatcttctgttttatttcagattatgaaaaggggggtattttaaaagttgaagattttgaaagaaaagccagggaaggtaagtgtcaggggaagcccttgaaggtaagcctgtgagactgcctgcctactctagtgacctaaagtgacctaaagcacctcagtcagctcagaaggcctatcagaaggctagtttcctttctgagtcttccagtctttgctaaaagttaaaagcattgggtggtagccaggcatggtggcacgcatctgtagtcccagctactcagggcgggaggattgcttgaggccagaaattcaaggttatagtgcactataatcacacctgtgaacagtcactgcattgcagcttaggcaacatagtgagacctctgtctctaaaaaaataaattttttttcagctttatgcagcatagaattatgggcaagaatatgggaatacaagaggttttaggaggccgggcacggtggctcacgcctgtaatcccagcattttgggaggccaaggtgggcggatcacctgaggtcaggagttcaagacagcctggccaacatggtgaaaccccatctctactaaaaatacaaaaattagccaaggaaggtggcaggcgcctgtaatcccagctactcgggaggctgaggtaggagaatcgcttgaacctgggaggcagaggttgtagtgagccaaggttgtgccactgcactccagcctgagcaacagagtgagactccacctcaaaaaaaaaaaaacaaagaggctttagggctttagggaaatggtgaagaccttttttttccttctacatttcttgctttcttttttaaattgaaatagtgttatcagtgttaatgaaacactaagcatcaaaagacatggtaaatagccacagaggcttccttgagaggatcaaaactaccaagagagctaggcacagtggttcgacctgtagtctcagctacttgggaggctgaggcaggaggatcgtgtgaacccaggagcttgaggctgcagggagctgtgatcatgccactgcactccaccctgggtgacagcatgagaccttgtctctaaaaaaaaaaattaataaaaagtttttaaaaattaaaaaataaaatacaaatgatcttatcgagtagcccacagtagggttaaatgatatttccctgtcttctgggcctcaccattaataatagataagggatttagaactaagcccccacaataggtcatagaaacttagcaaataaactagagcccatgtaaatgtgaatagataatcataccagagatgtgcaagttcttcagaagctgcggtcttacagaggcagtcagtgcagtctagtctctgagatgcctaagcattaaccaaagggagacttctgctttgcttattcttcttctccccctaccttttttttttgagacagagtcttgctctgtcacccaggctggagtgcagtggtgagatctcggctcactgcaacctctgccttccaggttcaagcgattctcctgcctcagcctcccgagtagctgggattacagcggtacaccaccacgccctgctaatttttgtatttttagtagagatggggtttcaccacgttggccaggctgatctcaaactcctgacctcaggtgatccacccgcctcagcctcccaaagtgctaggattacaggcgtgagccaccgcgcctggcccctattccacttctttctaagagaaaatcctacacctctcagttagttgcaaacttgagctccactgtttactctctctttcagtgtgtgataacttggaaaacttcacctcaggcagtcctttcctgtgcatggatctcagctacatcacagccctgttaaaggatggctttggctttgcagacagcacagtcttacaggtaagagacaggacaccagagtctcataacagccctcttttgtgggggttgagaaggagtaagagcttgttcagtaatcagagtagctagaagtgaaattatgaggtatttttgtttgggctatggacaaggtactgtgctgggcaccatgaatgtgggaaattatctcaatgcaatggtagcctccgagtgtattaccaggcaagctatcgcacaggtcacagaacagaaagactagcagcccaaattaagatgccaagtcacatggtttatttatttatttatttatttattattatttttttgagatggagtctcgctcttgtttcctgggctggagtgcaatggcatgatctcagctcactgcaaccttcgcctcctgggttcaagcgattcttctgcctcagcctcccaagtagctgggattacaggcatgcgccaccactcctggctaatttttttgtatttttattggagatggggtttcactatgttggccaggctggtctcgaactcctgagaactcctgacctcaggtgatccgcccacctcgaactcccaagtgctgggattacaggcgtgagccactgcacccggcccacatggtttattaaatcagtttagaactcagggtgagaagcaaggggaaagagttggagaggtgaacacagaagacacggtgcaagcaggatgcaagtgccacactctctgaatcttgggttccatttgtcctaggtttatatgtcctgcctgtctctgctgctaatagagtggttacacatactagagctgaagttcggtcatgggagcacaaagacaaaaggtgcctgaggccaccacacaaacttgccctatttggagaggccccaggggcacacacacatggccatttgcattagctcagtcattagcctataagatgggttttctttggcagaggacatgagagaccaagagggtgtcaccagtgagtggcttatttaaggcctcatgaacactgaatgcctcatgcatatgtaatgtgtcatatatatttcatgtgtgcctcgtatatttaatgcctcttgaatcttaggtctttctttgtcctcctgtctctctccatctgtttcagtacctgcaggctctactttatctgtagtaagttatttatccccagttttgggcacagtgtctaggctctattacatcaggtcaacacagaacaatcaactggtttatagacttttttggtggtggtagcatctttatccaacaaaaacttatgtagaatatcagtaatacagccgggcctgatggctcacgcctgtaatcctaacactttgggaggctgaggcgggcggatcacctgaggtcaggagttcgagaccagcctagccaacatggtgaaaccccgtctctactaaaaatacaaaaattagccgggcgtggtggcaggtgcctgtaatcccagctacttgggaggctgaggcaggagaatcacttgaacctgggaggcagaggttccaatgaggagagatcataccattgcactccagccttggcaacaaagagcgaaactccgtctcaaaaaaaaaaaaaaaagagtatcagtaatataaaactggtaaaagtggaactattctggttgaagcagagattgggggcctgaaactcctctatcatttggcctccctttttccttcgaagcatttctaagaaacccctaaaattctgaagaaaacaaattgataaaccgataaacactaatctaatcctcttcttatatagttgaggaatttgggtctaaagttttgcccaaggtcactaagctaattgagatatgtactggcttagaatgtcttaagttccctgtttgattatttttttcttttctttttcttttgagaccaagtttcgctcttgttgcccaggctggagtgcaatggtgcaatctcagctcactgcaacctccacctcccgggttcaactgattctcctgcctcagcctccgaagtagctgggattacaggcatgcgccaccatgcctggctaattttgtatttttagtagacacggggtttcaccatgttggccaggctattctcaaacttctgatctcaggtgatccacccgcctcagcctcccaaagtgctagaattataggcatgagccaccactcctggccttttttgttcgtttctttttttttcttttttttttttttttttgagacagggtcttgctctgtcacccatgctggagtgcagtggcatgatctcagttcactgcaacctctgcctcccgggttcaagtgaccctcccacctcagccctctgagtagctgggattacaggtgtgtgccaccactcttgtctaatttttttgtagagacggggttttgccatgttgcccaggctggtcttgaactcctggcctcaagcaatccacctgccttggcctcccaaagtgccaggagtacaggcatgagccactgcgcctggccccatgtttggttattattagtgcttaggaagaggcacttgcttacatagtaggagttgagaagcttggtttgttctttcctacccctagatctattctcacctcctgaccatgctctttctgccacatctattatcattacaagttgccttatctgaaattagtgaatcagaaaataaagcaggggatactttgtgtagtttcaacgttagggaaagttcagaatactgtctgtctaaactatctctctagaaggcctgatgggccacaacctgggccagaagcattcagttcagatatgagaatggtgggtgtaggggcaatggccaatgggccatggccggaaggaaattgttacagagtagtgggaagcctgcaaagactggcttctgtccgttttgccttggtttgcccatgtggatattctttgccaatattttctgcccaagagctgtgcttgctagagttggaaactggatgaaaaggtgaagactttttttcttctcaacagctcacaaagaaagtgaacaacatagagacgggctgggccttgggggccacctttcacctgttgcagtctctgggcatctcccattgaggccacgtacttccttggagacctgcatttgccaacacctttttaaggggaggagagagcacttagtttctgaactagtctggggacatcctggacttgagcctagagatttaggtttaattaattttacacatctaatgtgaactgctgcctaaccactcaagagtacacagctggcaccagagcatcacagagagccctgtgagccaaaaagtatagttttggaacttaaccttggagtgagagcccagggacaggtccctggaaaccaaagaaaaatcgcatttcaaccctttgagtgcctcattccactgaatatttaaattttcctcttaaatggtaaactgacttattgcaatcccaagacccatcaatatcagtatttttttcctccctatacagtgccctgcccacccttatctgcacccacctcccctgaaaaagagag

SEQ ID NO: 86 - DNA, 4153 bp, Homo sapiens
aggaacagaggtctcaacataggtagggagcttgttacagacttactgaatcagaatctaaatttaacaatctccccaaatgatatatatatccattaaagattagggttcaaaccaagggtgtctctgttactgggtgatctttgttaaattacttaacctctctgagcctgtttcctcatttatgaactagtgagaattaacattaatatgtgacatttcttaatattgtgccatgtccacagtaggtgctctataaatggtagcaattatcatgatgatgataatcttggtgctgctaaagttacctccttgcaaaagcagtaaacaatcatgtttaaatcaatataactggctttcccccttaaccacaaacatttgtgcctcccaccctcattcctaaatgaattaacactcaacaagtggggttttaagcttcagatgactatcacgcacatataaagaataatggaaaacctaggaacatggatttttgctggcttagagactgaattcagctgcctgatgacttcacagctgtttctgccaccctagagtatctgtcccctcggctctgtcccctcagccgggtctgcaacgctgactctgggattttcttataaaaatgcctgatggacgggaggaagatctggaggtcggcgggggaaaaaatgagtcattcaaattcacaaagcagtccgcttagtaaatgctgcaagagaaaaagtaaaagctggctcctgtctctggggaatctgtagaaatgattcggactcatcatgtcactgagcaaagctgggggaagccaaaactcagaatctgctggcaaggaaaagaacgaaggaaaaaaaaaaatgttagggaggggcaaacccgagggggagggaataaaaagagagagggagggaaagacaagcgtcatttaggaacagaggtagcctgaaagaagcaggaactccaggatcccaaaccagagcagaccctatagtaaagtatttttacatcttttcctttccccagaagagatccctaacctattgttttattgacagccttgctgttagaggctctttcccagaagttggacgaagaggctcaggcgttgctgtttcttgtcttccaagtcaagtggttactctggtaatggattgcctctctccgaggtgagtgtaagtaatttggggacagatcttgattttcaggttagctcaatctcagctttggggtgaagttatttttttcagacataatctcaaatatcttttaactggcctcaccagaagttagggtgtcattggacaacagtgattaattagtttggtgattaaaaatgacatgtgagtaggcagctctaagatttagtttcattgctcagggagtgatattttgactttccagagcagggaagaaccagtgaggtttgatttggagttgaatttgttttcagtggatgcttaatatatttaaagtatgaatctcattgaaatggtctcaagtatctttctttaaacttgttcggtaactacaactgctcaactgtgtagcagctagacagctttttgagaatggaagacagtgactcaaccatgtctgagcagcagacaagttttcactgatttctcatagacagcatttcaaccagatacttttgatcaaaagtctcaagctttgtcctgaaatgttcaggtacgaaatacttagaaagggtcattgcagcaagttttatacacaaaggcatggaggaaaatgaaggttgtgaaagtttcctgaaaacctagcatgcttatttgtttctgcatgttgtagtatacataatatcgaaattttgtgttgagcttaatagaaaatttgtgaattgacagctaattactcaaataattgattttattttgccaagagaaagcacaaaattatatcctatgaaggggttgaatttttttttcttattttttctcttttatagcagattggaagatattgttacacttcagaccacaaatccccacctcattttcaatgaattttttgctgaactgtccacctaaagtgggtaataaaaagatcccagggagcaggttgcactgtgtttaatagtaacacaataaagatttgttggctgtcattcaatggagaagaacatcatttgttgctggccacttgccttgacattgattttgtgggcagccaatgggtgatagtttgcaaagaatgcatgttatgcccagcaagattggcggagtctgagttgctgtaagttctgggattaatggtacgaaatattgtttgtaatgtattctcctcttgaatgagaccatctttggattaggattcaggcatttctgtgtattcagaggaaggagaagcaatagacaaagcagaaaagcttgtaaaacttttgtagaccgccagggtatattaaacactgtaagtgcttcctgctttttctgtcttcccttcatatgcatctgcttcatcttattttttgcctaaatgcaaagagaatgcaaccaattcaaaaaaagagtaaagttgcttttcacatggatctgtgcctcctagaaaggaggtgcctccccagcttttcatttctgcttacagggtgtacattctgatacatgtagctgacatctcctgttatcttcacagctttcaccctggtgagactgtccagatctagtctgtaaacccagcttagaagcactgttgtaaaaatgactgaagagcccatcaaggagatcctgggagccccaaaggctcacatggcagcgacgatggagaagagccccaagagtgaagttgtgatcaccacagtccctctggtcagtgagattcagttgatggctgctacagggggtaccgagctctcctgctaccgctgcatcatcccctttgctgtggttgtcttcatcgccggcatcgtggtcaccgcggtggcttacagcttcaattcccatgggtctattatctccatctttggcctggttgttctgtcatctggactttttttactagcctccagtgccttgtgctggaaagtgagacaaaggagcaagaaagccaagagacgggagagtcaaacagctctcgtggcaaatcagagaagcttgtttgcttgagactgaatacgaccaaatgggccattgggcctggaaaacgtgctctgactttgtcacccaattcacccagaaccatggtgggagagaacagacttggcgttggagcagactggaagaatgggggtgggagggtggaggggcttctcctttgtgaggaatgactcatgtcttctttaacgacaaacttaaccctaagggctacttctgagactgaaaaatcagctttctatttacatgaaacactttgggggtcatgggagtgcacagcattagacagtatttggttcaccctgtaaagtagccaagaaaagatgagaaaaatcaagataggcctggcacactagacatttgcctccaaaagaaataacctacagtcttaagatgtatcataaaaatgttctgccaaggatctaaattaccttgggtttcgcatatgtctatgaaattctgtgataatttttttcaatacattgattcactggcgtctgttttcattttatacttttaataactcatcactggtggtactttatcttgaaaagtaatattttttatattttaacattggacagtgttagccagttgtaatgatgtatcagaagtaaagaaaaacccattaaagttatagctaatagatgctgttgggggttaaattaatagtaaaataatccaatatagcacttttgatgatttttatataaaagtcaactgtacatttcattcagaataataaatacttattgctgctaaaacttcttaaatggttgtttctgctatagttatttctattgcagttccaaattgccatcttcccttgtctcatttgcaagttctcaattgtatttctctcaaatggacaggttccttctttactggaggatttttgtttttatcatattggtttttcattacttctgaatagtcttaattacgtttactaaattctaaaggatttctgtgctattataattaggaaatcaacgtctttggtcaggaactttataatgtgctattaaatgtatattacatttttgtgg

SEQ ID NO: 87 - DNA, 3311 bp, Homo sapiens
cttaggtagggtgaggcccaggagaggggcctggtggggtgggtggcctagctgggcaagggcaggtccctgatgacctgaggaggccgcagcagtcatcccaggaagatggtggcatggaagggctgggagtagggggatctggggaagttccctgggcttgggttagggggtagtaagagtgagagggtgggtgggtcagctgtacccctggagtacacagaggaggagatgtccaggagggtctgtagaggaaggggcatggcccatgggtctgcagcaggaggaaggcagtgactaaagtgatagctgggagaaggcagtggtcctcagagccatacctggtggggagaggccacgtggggctgagcaaagagggtatgatttccttccagcctcagggctgggcacacttgccttcagaacctccccacactaggtgagccagacgctggccttatctcatttaccatctcagagccatctgaagggggagaagggaaccgggccccaggagggagaaagtcatcaaacctcccacatctgtgaccagcctcagtgccatactttttctatggagggccctgtccaatggaactgagcacagaccagataaaagaactgggcacccagtggcctcagtccagggcctggagttcaaactttactggaaacaaaggggccgagagagactggggaaagaactactagaaaggggctggtgcccccatggggctgtgggttttggagccgcgtgcccccacctgagcctcagggggcccggagtgtccacaccagtggacctttcgagaaatggctgggccattgtgcagaagaatgcccggaaatcccgcgcctccctcctccagcaaggatgggggctcttcctcctggccaggaaactccaagttggcttccggagggtggcctgggggctggggtgccagggacaccatcgccactggtgggagggcagggcacagcccctccgtgtccctttgtctctcctgtctgaaggccagagcaggctgctaggcctggggccaccactgcccctgggtgctacacccagtgtgctgggtcactgggaacttcctgaagtggtgtcacctgaactgggcccccaaggatggggtgcgggcagtaccgcaggaagaggagcagcccctgtgaagattgagaggtctgggaagcccctgcggcttgggagagtgggggtcgccaggcagggggaaagcccctgtgccaccgctttttgccagagactcaggctccagagaggcagtgagtggcatggggggtgaggctggggccctgggcctgacctccacacgcctgcctggcctctctgtttgccatgggatgagagagacagtgctgggactcagagcggggctggagagtgagagtgcgagaaagggcctgggtggggcttggaccccggggcgggctttctggagagcccccctacgagggcctctacggcggtgacggggtggggggcttctgcaaaccttggtcagggaagtggagctggctcgagtggaagagaccacccggctcagtcggggatgtgggagtggactgggtggtgcagactgggggtcgagcgccttctgaagtgacggggccgggacgcgcagggaggcggcccaagaagcgcgccctaggccagcccagaatgcgctcggccgcgactaggacaacggcgggtggggctgggggcggctgccgggcggggagcggtcccgcgccctcagctacccctcaagagccgttgtttccctaacttcagctgccagaggctctgtgattggctgcggcacgatgacccgcgcacggattggctgcttcgggccggggggccgggcccgggggacagaatccgcccccgaaccttcaaagagggtaccccccggcaggagctggcagacccaggaggtgcgacagacccgcggggcaaacggactggggccaagagccgggagcgcgggcgcaaaggcaccagggcccgcccagggcgccgcgcagcacggccttgggggttctgcgggccttcgggtgcgcgtctcgcctctagccatggggtccgcagcgttggagatcctgggcctggtgctgtgcctggtgggctgggggggtctgatcctggcgtgcgggctgcccatgtggcaggtgaccgccttcctggaccacaacatcgtgacggcgcagaccacctggaaggggctgtggatgtcgtgcgtggtgcagagcaccgggcacatgcagtgcaaagtgtacgactcggtgctggctctgagcaccgaggtgcaggcggcgcgggcgctcaccgtgagcgccgtgctgctggcgttcgttgcgctcttcgtgaccctggcgggcgcgcagtgcaccacctgcgtggccccgggcccggccaaggcgcgtgtggccctcacgggaggcgtgctctacctgttttgcgggctgctggcgctcgtgccactctgctggttcgccaacattgtcgtccgcgagttttacgacccgtctgtgcccgtgtcgcagaagtacgagctgggcgcagcgctgtacatcggctgggcggccaccgcgctgctcatggtaggcggctgcctcttgtgctgcggcgcctgggtctgcaccggccgtcccgacctcagcttccccgtgaagtactcagcgccgcggcggcccacggccaccggcgactacgacaagaagaactacgtctgagggcgctgggcacggccgggcccctcctgccagccacgcctgcgaggcgttggataagcctggggagccccgcatggaccgcggcttccgccgggtagcgcggcgcgcaggctcctcggaacgtccggctctgcgccccgacgcggctcctggatccgctcctgcctgcgcccgcagctgaccttctcctgccactagcccggccctgcccttaacagacggaatgaagtttccttttctgtgcgcggcgctgtttccataggcagagcgggtgtcagactgaggatttcgcttcccctccaagacgctgggggtcttggctgctgccttacttcccagaggctcctgctgacttcggaggggcggatgcagagcccagggcccccaccggaagatgtgtacagctggtctttactccatcggcagggcccgagcccagggaccagtgacttggcctggacctcccggtctcactccagcatctccccaggcaaggcttgtgggcaccggagcttgagagagggcgggagtgggaaggctaagaatctgcttagtaaatggtttgaactctc

SEQ ID NO: 88 - DNA, 67253 bp, Homo sapiens
gcaagtacatataaagcaactagaatagtaacgggcatgtcataagccagttataattattataactaaatgtatagctatgtttttaaggcaagctgaactttactagttgttacccataatttggcaatggaacagcctaagtaaatacacttaaaatgcaggaaccttataaagtaagcttttcagccccttgtcttctttctttctggttctgagttatacactttgaagaggactttgtagccatcttctgaaaacttccaaatctaatggcactaatagtcaatgggaaagacagtggagcactgcaggacatcaccaattatattacagagcctgaaaggaactaaaaatatgaagactttcaaaatagtaacacagcacaaacaccaaaatgttaacacacgaggagtttatctgaagtcctacttgtgatctatttatcagtaatgttcaaatatgggaaaattaatgtgggaaaaatgacaatgcaacacctcttatctagaatatgtcgacattggtgtcaaaatacttctttattctgttaattccgcatttccaggtagctccaactacccatctctgcacgttatactgtgaagctgctgacaattttctgagggtgcttcagaaagaaccatatcttacacatcagttctccacctcataccacatgttgaatttgacaatggcaaaggttagaaaagaaaacaggtttttgcctggctgtgcatcagatgatgtagggatgtggggaaaagtaggaggagaaataagaaagcaggactgtttttgcattactggaggaaaggaactagctcagaagtcagcctaacacccacagagattaaaacgtctcttccttcctctttgtttccacgtcccagtcttcaataaattctatctgacaacagcagcagagggacccactatcttgtggtttctgtcaagttcctgattttcatccgtagttgaagatgagcaagaactctgtaacagtgttaccttggagcctacaatgagaggtatttcaaaatgagtgaagcatgactctcacagatgaaggcctagacgcaggtaagaaaacagcttttccatgaaatgacttgcatgtatgtgaatggtgcatgggaacagaaaagatttctgagctgggcagcaacaaagctgaggaacactgaaccattgccactcacatttttctcagtaggttactttttgtttgacaactataattggtatattaatatatttccccatgctaatatggggatccaatactgaaatattatcatttatgatttaggatttccaatcgtggctgtcaaaatatatctgtgatgaagagatatcaaggaaaatgtttaaaaggtattcatccaggacaaacatttcaaaagctcgtaaatgtgtattaaaattgcttctcaaaactacaaaatcgattagcataatacttaggtcagtatgtctttgtttgcaattgcatatgtgtacagatatatagttgcatttacttgtacatacacttatataggtaaaagtttttatctttgtcattattaggataagttaaccccattaacacctactaaaataaaatgcctttaaattgtaaatcacagaaatatctgtcctaggcatagcaaatatttgagttcatatgctacttatttatagtctatgactaatcagctaaattacttacaattctttaaacattataaattaaattacattcaggagaattagcacagacccacaatgtcagcttattcaaccaagcccatgcaatccatcttgtctacatatactttgttaaccaaggacaatcaatcctacggagaaaatgaatcaaagatcacactagtaaaaaaataaatagtttgtatattcatctttctaaaacatacaaacttgataatcagttttagcactaaaaaaaaacctagccattaagttaaaaagaaaacaatgcactcggaaaataccaaaatggcatattttatgatttgtaaacatgcaatgaattttatatttcggtaaaatttatgaatactatatatacaaacatgcatacaattgtgtgcacacaattaacacattggtatatatgaatgaactctatattgtcatgtctggaaaaaaaaaaaacaaggaggccaggcatggtggctcacacctgtaatcccagcactttgtgaggccaaggtgagtggcctcaggagaggctggtcaggagttcaagaccagcctggccaacgtggtaaaacccctatctccactaaaaatacaaaaattagctgggtggtagtggtgcatgcctgtaatcccaggtactcaggaggctgaggcaggagaatcgcttgagtctgggagccagaggttgtggtgagctgagatcgggccactgcactccagtctgggcgagagagtgagaccctgtctcaaaaacaaaaacaaacaaaaataaaaccaaaagaacagtggggagattccaaggtactcaaagcatgaagacacaggggaagtgggccgggtgcagaggaagaagtataatttcctgaagtattacggtgcccacttcacagttgaagcaggtacagagggtgtgactatcctgagcaaggccacctatgatgcttctaaagtgctgaacagaagaagaacacggctccctagaagaacgttcactctataaagtgcttctgagtgaatttagatgttgaggcttccctaagcctaaggctctatgaactcagaagtcacaggtttattccatttggccccaggatatccttagaagttaggtcggtcacaagtgagctgtttcaacctcccagtgtgagcagtctctagaataccaaaaacagaccagtccaggaggtaggctgacaccaacacaagcatattctgccatcatcatgagcatcctcacctgcagaaggctgtctagtggaggatgatggacaataaggagtgtttcctttaattgaaaattatatcagtacaagagtgccaagtttgtttggatagagcagtggatctcaaagtgcagatactataccagctgaatcaacatcaccagtgagcttgtcagacatgcaaattattgaccccaaacctacagaatcagaaacaatgggggtggagcccagcaatctcttttaacaagccctccaggtaattctgttgcacattcagttttgggtgaccccatgtcctgggacagatccagttttcacctgttgtctgggcataattgaaaatagtgcctcctttctatctcaaaagtgtccttgattgtataataaattaattatgatcatcaatatgatcaccctgccagttcatactggatgctaagaaggcatttcattggccagatgctgtctactacttgggatttcaaattagcttcaagtctggtgctacacccatagcctccccaccatcaccccgcaatactaaaagatgcattgcctcctaaaagtctgagcagcacagctagataaatcaacttcagtaaaaatatcctatcttaatgagaaaaaatacctacaaccaaactatgtaaaatctattttaaattctcagcttcctaagtagcatgagaatcaggtctccaaaaccctctttactaaattttctggttcttctttacagggaattttcttttcctccctagcacccttaaaaaggataaatctagtaattaatgaatgctatttttatagtaatcatttggttacattaattcaccgaaacaccaagtttaccacagcaaagcttctcaatccacctgttctttaaagtcaaagtgaaatactggtcatatgcttttagatctgattagattcctttgaaatttttgtctttactcggtataaattaaattgctagctttttatttttcactgaaacctcccatctgttgtttttgaaaagcatcaaaggccttagatatcatgttctgacccctcatcattcaaataaaagaacagccagggacgggtgctggcttctacccaattatatgacatctgcttttgaggttaagataccaaagaaaagaggaaaagatcagttagttggcttctgaggttggcccaaagcgatctgtacacttgtggtgtgatcacttggggaaaaaaatctgatcctcgatactctccaggatcatacacacgcaattattttcatcacatcacttatagcctctagactctaggagccatttataccaagcagatgggaaatgtgccaccttctatagtgggagagacacctggctggaaagaactcacctgttgctgatgtgatcttcccagtgagtcgagccctaaggtcaaaggttggtaggagagctcacacaaggtttcatctaagaacatttccatcctgctacagatgatgaatgaaatccccttctcactctagggatattttggccatttattcattcaacactgattccttacaatgaggcagccaacattctaggaatggtagagatggtgtgatgaaaaggttctgggcctctggtggcttacattctaacagacatatccacaaaccttaacatcatcactcctaggaattgatagtcattcaattatgacaacaatctttggacatattataacttataagattacatttttatttccttaatggggatttggagacgattctaatctcatcagaagtcatttactgactagatccaaatccctaaccttaatccagctgggagctgatagccctgcatgtacagatgacaaaaacagaatatgaaaaatgatacttagttcagttaaatgtcctaggaggtggcctttagtgttgaatgttctttctctcctggcccccaaaactgcctacctatgtttctgcacaaggatttcactgcctctttccccactataaatatgcctataagcactacctttatagaagtgaaaaaaggaagagggaggatatggtctgagataaaaagaaaacctaagatgtcagaccagctgtccctgttatcactgagtttgatacacagcagctgtccttataactggtaccactgaggcaagttagttaaggaaaaatacaggttaaccaaaataacaggttaagtaggaattatttttagaaaccttaaatacattattttaatttgaaatacaaagtgcacattaattgcttaatcttttggttttgtggcagcgaggccttttttctgaatatgggttggttcatcagatatctgcaccaattttctttcatgagccacgactttagcacactgccagtcaaatccagtttctcagtttagttcaagtagtgtgagaactttaaaatgctttagaggccacacgatttaaaaaatccagacccagtcctagactttaaagtccctcaaaagaaaagactctgtcttagcctcataacacagtgaagttttcaataaatgttacatgaatggacaaaaatgagggtcttaaatatgatttgaaaacaacagtctgcatcaccaagttttatttaaatccactcctaccccaattaagaaatggtatatgccttgttctaaagaagacaaccagtccctatgtgtacaatgccaagtagtatagcataataatgaaaagtgggcattctagaatcagactttttggcttcaaatcttgactccaccacttattctaatacaaccttaataaagtcacttaacaactctatgcctcattttccttactgagttatggggattaaatgagttatatacataaattacccagaacagtaattggcataagaacacaatcaggccgggcgcagtggctcacgcctgtaatcccaacactttgggaggccgaggtgggcagatcacaaggtcagaagtttcagaccagcctggccaacatggtgaaactctgtctctactaaaaaaaaaaaaaaaaaaaatacaaaaattagccgggcatggtggtgtgtgcctgtaatcccagctactcaggaggctgaggcagaattgcttgaacccaggaggcagaggctgcagtgagctgagatcgcaccactgcaccacagcctgggtgacacagcaagactccatctcaaaaaaaaaaaaaaaaaaaaagaacacaacaatgtttattgctgtcattgccagcatcatcttctttcccaataacatagtgtggtgctctgatgactataagaacaatggaagccaaagagatacagaggttgaatattccttgatcatactgctttggaccaggagtgtttcagatttcagattttggaatatttgcattacacttagcagatgagaatccctaatctgaaatgctccaatgaacatttcttttgagagtcatgtcagccctcaaaaagtttcggatattgaagcacttcggacttcagattttgggattagggatactcaacttgtattcaaaattccagtgtgttccttaacctctccctgctcagttgactcatctgtagaaaacagaacaaaaataaccacctagaagaatggctgtaagagttatcatgcctggtacatagttgagagtcaaaacattatagccattaacactcatacaaggaagaaaatctacaactccacacttcaagccatatccacagatgtccccacctcctgcacatctgtcaacctctacccaccaaatcttaattaaccaggatttggttgtgtactcaatattttatacttggggcagaggacaaacaacctttcccgagtatgcactttgtaagaatatccacactgaaaaacaggatataatctaggaaaaattaaatggtgcttttaatttataagttagaaaatgggaatttgggaggaggaaataccactgtgtgctggtgcacctggagaacagaagaagcagaattaagatgagtcttgtaagagggacatgatacatatatatgggaaatgatagactgataactatgggaatgatatactgagtagaaaaacaacttcaatttatgtttatttgtccaaaaacatgtcctgttttatttttatcttgacctcttgacttgagaaaccttgaccctatttgagaaatcttatccccaagtcctaaaaacatttacctctttgcatcttcaaaacacagcacaaaccatctattgtccagaaagccttttctgtttatcctgccttttcctgcaagctcatgtggtacacactgtcacttctgccctctttcaagcaccctataccatttacacacacattacaatctgctctgtgtatgctcaacatctgtattgcttcaagagcaagttttgtgcctttgactttttcccctaatttatattggggtataaaccacatacaataaatgaaaattagattttaagtgtagagttcattgaggtttgacaccatataatcaccaccccaattaagataaatagtatttccatcacaaaaatttcatcattctcttttctaggcacagccatctacattcctaatttctctcattagagcttagttctaccagtattagaactacactgaaatggaatcacaaggtacatagtcgtttgtgtctgacttgttttgctcaacatgttttgagatttaacttgttttgctcagcatgttttgagatttacctatattgtgggcccgcatcatcctccggatcaccatatggtattctatgagtataccacaatttgtttacccattttaatctgttgatgagcatttgggttgttcccaacttttggctgttgtgaaaagagttgctatgaatattctaatataagtctttctatggacatacactttcacttctcctgggtaaacacctaggagtgaaattactaggtcacaaggaagcaacatgtttaacttgataagaagtgacccgttattcaaagtagatttactattttacactataaccaaaaatataccaaagtatcaattattctatttcctcgtcaattcttaacattgtcaagtttttttccattctaatgggtgaaagtactaccttattattttaatttgtatttccctgttgacaagtgaggctgagaatcttttcatgtgctccttgaccaaacagcttcctttgtgaattatttgtttgcatcttttcagcattttttttaagaaactgagtttgtctttttattatagagtaatgaaaattatttaaatagtctgagcctttaacagagatacttttgtgaatatttactccccaatctatggcttgccttcattttcttaatggtgtctacaaaaaaaatgaaagttttaaatttggggatttttttttttttggtttttgggtatgtgtacacatttagttttattctaacaaagcaacttgtacacttttaacatttaaaactaagtgtcatctttcctttccagtgaaataaaaagaaaattttaaaatagacaggtacaaaagtacaacagagaatgtgaattctaaataatatcctgcaggttctgtggattgtcccatcgagtggcagggcaagagtcatcactggagagaacttattttaaatgtgtcatgttaaactgcaaagatgcccattaaacatcacaattaaatatgccaaaggagaagccatgttgtcaaaatacacacttaacccacccaaacatctcaaactcaccctttgctgaccttacatagtcccattttttgttttgtctttttttaaacaagagaaagtagacagatacatgttggcaaatgctaactatccatattcacgcagagacacagtgttctgagcataatacacagagaaaggaagaaaagcgctaaaattctgtgcactaatacacaggggcttagcaccatgcaaattccagcagagcaaagggaggtttttcttttttccccagagagttcagtggtattaaatccatacagtttttgttcagacaagaagggataaaaatgaatttggaacagaaaggggtagagatccttttcccattgtattctgctcaagttattttccccccaaataagttgagagctgtggtgtagagaaaaaaagacctcaagaacaaggcagctgagcccaaaagaaaacacacacacacacacacacacacacacacacacacacacacacacgacagcttgctcccaggaactggagaaaatttttaaaaaggttggaacctatcagtgttctattagtcattttctccttcaccccctttctttcctccctttcatcatcatcttcatcttcttcatcttcatccttatcccctttctttatcaatatcttcccatccttcttcatcatttatctccttccctttcttcatcatccatattgaaaaccaagtagtactgtaatggatttgtccaagtattatctttgatgaactctcccaactcaacaacacctgcatcagaacggtcagtaaaccaggtaaagaagctctctggttcttcgtgctgcctcttcctgctgactttactctgcgtttgactggaacgttttcattatatcctttccagatttgcatttgacttcagtggactctaaaaatagatcaccactctcattcagatgaaattccttggagagaactttattttcaaactaaagattttcatcaaaataaaaatctttctgtaacctgatttaatacctccaaattctgtcacttcaactcgtcaaataatacagtgcctctttgtcttcctccccaagtaatgtagacacttgtggatggctgacaaatgctgttacccaaaaatttgaaatttgggcaatcaattttgacctcttccaaaaaatggttggcagaatttgttatacttctgttctgctttcacaatctccccactggcttgttcattaagtctctgaattttgtgtgtgtgtgtgtgtgtgtgtgtgtgtgtgtgtgtgtgtgtgatggagtttcactcttgttgcccaggctggagtgcaatggcacgatctcaggtcactgcaacctccacctcccaggttctagtgattctcctgcctcagcctcccaagtagctgggattacaggcatgcaccaccacacctggctaattttgtatttttagtagagatggggtttctgcatgttggtcaggctggtctcgaactcccgacctcaggtgatccacccaccttggcctcccagagtataggcataagccaccgcgcccagcctgtatttccttttgtacgtcgtcaatatattcaattgcttctttctgttctttttctcccttcttcagcaagcccagagaggccaatgtctcctccggtctcagagcaggaagtagtcttggttttgggggtcacaccgctaggaaagttcaagaaccagaccacaattcttctttctcgtcaggaagacgctcagaaaacttaattttttttgttttgtggctaaaaaattttgcatactaaaaccaaccgaaggttgggaaggtattttacattttcctctagaagctttgtggtcttagttttacctttaggtctatgatacatcttaaattgcttccttgattcctccatttcatctgttagtagctctctgcagagaacaagtgctttgtaaacactgctgactcacttataaatgccctataggttagaagaaatgtgttttcaaagcttactaaaggctctatgctcagcctcagtaacattctagatttaaaaaaccactaatgggaatgaactcacaaattagacaaaatttgaaacaaattaggcaaaatttgacaaaatgtctaactcacaaattagacaaaatggagaaacctggaagcttccatttagaactcatgttatggttctgcctaggacatgccttgactagggcagggataatccagtttcatttctgtacaaatagcagtttaactcagcacagaaaatggagagcagtatgctcaccatattttcttcctctttgtatatatgttagaaaattaccatgtcattagcatagactgaattctttttaacaaattaggccataaaacagtaattcacagcagctctgttgaaaactgacttatatatatatataagtaataaatgttacaagatattactctcaagagacattttctataccctaaaacactggcattattttataggatttaggtagctttaaaaaatgttttattaatgctttgtattgaaaacatgtaagctgaaaacataaaaagaagtattcccactgtttaaagactaccaccgatgcatattaaaacagagcatttccagctatttccttgagactttactaagaacgcataagactaaaaagagcaaaaattacccttgtccattttactggcatttggagaaattcataaattaggataatagcgcatttcttaagtacttagcaactgataaaatactctacgtacaaagaaattttaaaaagctattctcaaacactgtattttgacagctgtttccttgatattattcagccaaaacatgctccatgttttagcaaggttcctttcttattactctgccttagtgcctaagtttctacaccacaattaggcaattctttttaatgaattaggccataaaacagtaattcacagcagctctgttgaaaactgacttatatatataagtaatacatgttacaagatattactctcaagagacattttctatagcctgaaacactggcattattttataggatttaggtggctttaaaaaaatgttttaaattcataggaaaactatttacatctaagcaaggaccgaggctctcatttgtagcttgcacttttctgtttttaacaattacccagattcacaagctaacatttcagggataatcaatagtggcttagaatttagggtgaaaaaagagaaagtaacatataaccttgatattgtttctttctaaaaagaaaaggggatttgtgattagctacttaaatttgattacattatacacttaaattccttttctcatgaagtatttcaatgactaccatttccttaatagcacttcattattgttatgcctttctaaatgacaatgtacaatccttttcacagccaaaggtcaaaaagaataaagaaagcaaaaatctcccagtaaggaatactgtcataagtcacatcttccatgaagtgtttagttgatagttcctgtaaacagtcaaaataaacttcacttcaagaatgtaaggagttctaacacgcaagaaatgaactctagaatgagctgcccagacaattttaaattaggaaaaagtcttttgtactttacagtatagatgtaatttgtcaacactatgtataaagtaaatccaaacatcccataaaatccattttaaaccatactgaaaacactccaggacagaatggattgacttcatgtgaaggtgggggtttataaaagttacagactcctacaacatgctgggcatgacagcataccaattccttcccaggagaaggaagttttcccttcgtaggacatctacagcacttttttgctctgaccttagtctttcttcttaccaggcagctaactatttcctgcatgtatgctttatttttccctgtgccaagccaccaagtcccaaagctttcctcccatggctggagttcctttccactgatatgttcatatcacttgctcatccactccttcatttacttaaaatcttcaaggtactagaataggaaagaatgttcaaggaaaataagacagcaacccccatctcttatagctaacgctaaggtggaagtcaaaattgaaacgcgatttttaaaaaggactgcactattatacaactgcttctgtaaaaatataatttaaaaaatgtctagagtctaggcaacctgtgtttaatgttaagtccgttcgctcaacactaaactgctttctatctggatgatactgtaaatgtgatcctaaaagtctcttctgtttgagatttccagacacatgcagtgatagggttcaaatatttcacaaatttgttaacattttggctttgataagttcatgttctcattttaatagaagatgttgaataccttggaaattgaggtcatgaagggacatctacttatttaacagaaatcagatgagccttcctcaaaggcacagaggcagcagcatcattagcataaagttgccgtaacaacgttgtgctgcaaacaaaagcactaaggagaaaggggaactgaaaggggaaagatggcagcaaagccaagggcacctgtgcacactgccaagtcgaatctaagtcagtagctcagaaactcttgtaactgagcaacctgaaggcacagacaacaattaaatgcctctttgaaccagaactaatcagacttgcccagcgctgatgccctttgcctgccatcttcaattctcagggccgcaagactctgctccaagcctttccatgattccctgaaaaggaccaagagacccttccaatttcataggtgttctgactttaatttgcagggagaaatttttttatacaaacacaatcttaccaatacataagacagaaccagaaatactatactcttggtgaggctgagatggggacaccatccgtctccctggaaccccagaaggcctatgaggactgccagaagccagccaagaaacattttaaaacctactcagattcctccgtataaaaaggaatattcttatgatgagcctgctgtatactgcctattttcttagagagaaaccctgaatataactgaaaatctgtcatcagtgatttgagaggagatagggaggatgatggcagtgaccggcaagtgggcagttgagaataaagactcgaaaaggctctcatggtgtaagacacaaatataagagtaaagaagcagaagataatgatactcaaaaaagagaaatcagtctgtgaaacttctgctttttaaaaaattctcagaaattccacgtctgtgctgggaaaaataaactcaacagttttattttcctgatctctttaactttaaaagccaaaagatctactcagtttccatgatgactatttaaagtctcagaatagagcatcgtacattatattctatgagtagctcccctttgtttattccgtctttggctcaaccattattaactgaatacttccactgtgccagatactgctctaggtgctggcgacacacagcataacaagtggttctgcactgaagaataatctagcaggctggaggcaggacataatggcgagttctggaaaatagggtgagaggaagaaatcatcatgaagatgagagatcagaacagaaataagggagacaaagagggagaaagagcaaatggagaagatgggtgtgttatctttgaagtggaggagcaagagcaagaaggccagtgtggctacaagagaagggcaaggcagtggccacaggaggtacagtcagagaaccaggcagggccagctggtcatgtagagccatgcaggccatgaccaaactctggatgttttctaagtgtgatgagaccacacacacacatacacacacacgcactgggtgggcctgagcaagggagtagcaagacttaatttgtgtttttagagctccttcttgcagctggctggggtagggggcacaggctggaaggtcacaggaggctcctgctcccagcattgattatgacagagcagtttttaatacacaaattaaactgcaatttgagggaaacaatttcaggagaaagaaaccccatcaactataaatgagaaaactctccatactgggttatggttatcttagagatgtgcgctttacacaatcataaaccaactaataagctcaggtttgaatttctgagacaggccataaggcgttttcaataaaagctcttaagcagtttcttctttcctaactgacaaaatacactcctactgccctcgtgagaagagttcagttcttccatttaaaagatggcatgtccaataattacttaattttatgctaagtgagcacaaactctttttgatgtcacagcaaacaagtgcttacaaaataatgaaatcaattacagcagctgtactgaagaccaacctcaaaacacaaccttcaaagattttaggggaatgtgggagggaacaaggaaatacaagtacagagatctttaaacactgaacaatgaaataacccaaatgtccagtaacagaaaaatggttatgattcttttcttcagtgaaatgaagtagaactactcaaaagaaaaaggcagaactttaaaaactgaaatggaaaagtcaccatgatatactgttaagtgggtaggggagagggaaggagtggtggtaagagatctcagcctctgtccatcgttatctgcctttctacaattcctaacattaactgaaggctgtgccacactttaccctgcactgacttcaacactgctttgtattgtctcactcttaccacaaccctatggggtaaagagaattattaccatttaacagatgagttaggtattttaccaagagtcacagagctgataagtggggggggtggtacgggaatccaggaattccaaccctgtagcctgcattcttaatctctatattacattaatctcttagagatgagtccttattcactgaacatgttaaattaattttttcttggattgtttctttcaaataacacttaaaaaatttaaaactcccatttgatgttctgggaaataatttcaaggaaaattaaattaacgataaaacacgtaaagctcatgatattttggaaagttgatatgacccaagttggcattaaactcaaaatcaaagaacaaaacaactttacaaacaaatgttatttaaaggctcagtgacttatgataattctgtcagccttcactatgatagcaaattgtgaacaccacatttgtacatttccttctggttccacatgtttgtaataatgcaatgttatccagtttaaaatgaaacagatgctcacaagtttaagacactctggggaggtccactcagctggcattatttcagcagtttcacgtgctgatgacaaaggactggaagatagctgaaggtgaggctgattagccaaatcactaaagggtgctgggccatcctaaaagcacagggcctgtgcacactcctcagctgttgatccatctctgcacccacttcgcccatgcagacatgtcctaatcctcactcgtcaaccccatgtactcctacatgggtctcttccccaacgccaccccacgcgacagtcattcattgcagtgttttctcttcctcctaaagaccagcagagggtacatgttaagatgccctagagaactacggcttcccctgcctcaactcaaatccttaccagctacgtgtcttcaggcaaaatgcttaacctcaccaagccttactgccctctatcatttaactgaggagacgttaacaggacttactttatatagaagctatcaggttttaatgagttaatataaataaggaatttagaacagtatctggcatacaataaaaactcagtaagtcttaggtattattattattcctgttatcttcctagtgcattttaccatttgcaacaaaataactggttacccaagaataaatctgtcggtgattttaattttctgctttctacttttctgtattttctaatgtatttacattgcccatgcatcccttagtaaatttaaaaaacacatatacaaactaagcttttaacataggcctcaccaaatttccttcacagtggctggcacagggacctccaaaaggctgaactatgtaaagtctatggctgagcaagcaggcacccactgttgccagccaggtgtcagggccaccccataggtaccatgtttacattcaccacagggcccagcattaatgtctggagatatctcagtgtgcaaattcttcccacaaaaagttgggggcaaaccacagtccagggctactcatgctactggagatgaacaataatcaaattctcaaatccaaactatcactagtgtgacttaaaatctaatacttctgatgggatacatcctgaaaccaaaatgtttcctttataacaggggacttaatcaggagagttcatgaattccctgctagtgtataaaatgtgtctgtacatttttctagctatctaactttcaataaattctgaaaggtattcataacccaaagctattaaaaaatagtagttttaacagtgattctcaaactttaacatgtttgttaaaacatctaccccttcagctgagtgcagtggcacatacctgtaatcttagcacactgggaggccgaggcgggtcaatcacttgaggtcaggagttcaagaccagcctggccaacgtggtgaaaccccgtctctactaaaaatacaaaaaaattagccaggcatggtgacgaacgcctgtagtcccagctactcgggaggctgaggcacaagaatgtattgaacccaggaggtggaggttatagtgcgccaagatcataccactgcactgtggcctggatgacacagcaagactctgtctcaaaacacaacacaacaaaaacaaaacaaaacaaaacaaaacaaaacaaaacaaaacaccacgtaccactggacccctccccagaggctgagtttcaggaatggaggtgtctgggagtcttgggtaacttgcatttccagcaagttctcaggtcatgctgatccaggcccaggaaccacactttgagaaccaccagcttaaggagttatgtgggcatttttactttattctgaagataagcaaccaacctctctaacggaagtaatgtatgaaaactaatggctgtttctccattacttacccaggaattacctagcaagccatggccaccatccctcttaccctccacaattccaggtaggctacacttgactatcagttcaatcctgcaaatattatcatattccttatatcctattagattagaaaccagctttgatattaggataaaactgtggctgtgaatgtatctccacctctgccttttggggtttttttttggtctctccatcattcgttcatgcaaaatacctctctaatctgtctcattcatgggcatttccaaaagagaatggggaacagtataatttagtttataaaattgcaccccctcttatttcagaattaaatgcataaataaacatggccctgaaaatcaagatgcttcccctccaaaaaaacaaaagccgatgacattccattgttaaacacacagggatcctcaggccatgcttgccctgcaacacacagaaccaaagacaccatacacatccacaccatcaaggaaatcagtctggggagatggaaactggaaggccagaaaaatggatgtgacgccgtcaagataaagataaatgttgactttactggaaacgtctcagctttgagtataatttagtctgaatacaactaaggcaggaacagtattctgaagagaaaaaaaaagattacagttatttacaagaatacagttatttaccttttaaagactaggtccaaatacctacaaacctcagaaaagtgatcactgggaaacaaagccggtcagcattgagctgtacttatgtaaaatgtcattaaaaaccagctttagggccaggtgcagtggttcaggtctgtaattccagcatgttggtagactgtggcaggaggatcacttgagttcagaagttcgagaccgaccacggcaacattgtgagacccctatctctatgaaaaatataaaaattagctggacacagtggtacacgcctgcagtcccagctacttgggaggctaatatgggaggactgcttaaacccaggagtttaaggctgcagtgatccactatcatgccacctcactccagcctggacaacagagcaagaccctgtctcaaaaaacaaacaacaacaaaaactggcttttaaaagatattagtagacctagattaagaaggaaatgagaggttaacataagttcataatgcattttggctgtatcaactcttaacagaaagtccatacaatttaattaggctagataaggtgacgttgcggctcttttctttatttttaaacaccgtgtccattaagtttactagccctcattctttccacaactgaaacacactcatgatctgctaccctaagcccaccaatggtgtccccagtcccacccatcaccatatccccagcagtgagctgaatgctgtggttgacaaaaacaaaatacaaaataacccgagctccccacttcacaatgcctaccaatcttttatgtatcacatgaagaaaatatttaccacataccaaaaggggattggtttccaaacttagaattaaaatacaaggattacagaaaggacagaacaggatgaactaacacagtcagagacgtcatgaaggaatcagctttaaaatagaataaacagagtgaaaaaagaatgcactggggcaagaactataaaccaggactctaaacttttgtttggaaatgctatgagctcgtttaagtggaagaattctctgaaagattaacacagagtatttatacacagtagaagctcaataaatttgcacatagtagcattcactgcaaagagggacaaagtaaaacctacctatcttgaggctcattttcagatgtttatgaagacctgagcttgcaaaaaatttttagtatttgaaaagtttattctgattatccagtgtctacttattcttagggtgaacacataccccagtttgcctgagacagacccagttcactcctgctgtccccatgtaattaagtcctcttttcattctcaaaagtgtccaggttgactaataagttagaagaccaccctatccaaatcagtactggttaagcatttggtgaataaaatctcactgaaagtatttcctggggttctgtacctcagatcagaaaattcctccttaaatcttaaaggctttaagaaaaatatagcatagttcaaaaggagtgcctatttctgaaggaaagccagaggttgatagcacctcacagaaaccattgttctcagagagttgtgtggccgtaatcctacagcaggataactaatcaaacacaaagagttgaaatatgcagaggcaccaccttaggtgaacctttcagtccatgtgttaaaaaaggttctccttattccagtatatttaaagtatgtcatttcccaaatgcgtttaaaaattaaatttgatttattgctaatagtaaatacatacatattacatatgtgtgtgcagcaccacttatcagcaccatttcacaggtggcaaaggcgaagcctgcagaggctaacagcacacacaacctgaatccacagctcccatccacaaagcctcctctaccttagagtagggaaggacttttttttttttttttttttttgagacagaatcttgctctgtcgcccaggctggagtgcagtggcacgatctcagctcactgcaacctccacctcccaagttcaagcgattctcctgcctcagcctcccaagcagctgggactacaggcatgcaccaccacacctggctaatttttttgtatttttagtagagacggggtttcaccatgttgatcaggctggactcttaaaaagcccaaggatgtttatttgttgaggctagatctaaagtgaacaaaggtagaaaaggaaaatcctcaagttcctcaggatgcaccacagccctagagatttagcagtcattcaaaaaaacagctaagaatgtgaaaattctcattgttctgttgcaagggataccctggaatttaacccagggccagcctcagatagcatttcatgaatcagtctttttattttattcttcaagaaaataacagaaaattttcttcacctggtttatacacaatgaccacattagaaagtactaaaaattattttgtcagcaacaagacaacaaacagaattaaagaaagtgggaagaactagtgaaattatattagaaagcaacaattgtgagggtcaagagtacttgattatgcccgagctagttcccatctagcttccagatctttctaatccatctcacagtggtctcataccatatcggaactcccactttgggcctgtggaagaaaatgaatcccaggagtttgcctgtaaatgccttggagcaactcagggacccacagattggaatggtatagatactgggcttgcacctttactaatcaggaatatcaaaaataaatacagctttatgccagaaaaattgaacttgtggccaaaacaaattgtttcttatgttatctatttacaaaatgcctaaaagaagctagagagggaaggtggggaaggaagcagcaatattaattgccattcaaaggctgtagtagggagagagaaggaggaacttggaatataaaaatttgtgtgactctcatctaagccaagtggtccacatgacacttgaacaaaaggtggtctaaaatgtaagccagaggaaaattgttgtgagatatagctccataaataccatgtttacactgaatttcaaaagcatgttttctccaaaaaatcatctcttgaagatggtatgaaagcccacacaatgcaaatcttgaagctcctttcagttctccatatacgaaataatactgatgacagacaatatttatttttctcttctatgtgccaggcatacagaacaatattcctcacaacagtattctgaagtagatattataatcacttttgtacagattctcctaacgatgagggtgctgaagcacagagaggttaagtaatgtgccccatgacacaaagctaatgtgtaactcagccggtattctaactaaggcaatctattctggagacaatgctcttaatcattcagatatattgtttctcacataaacaatttaaaaaaacaggactacaggtcaacaaatgtttcaactgtctaagagattaatacgcagtggaaaggttctgaaaatatttaaactacaacatgccaactggcatacagtaaactgagaattacactgaagctgaagaataagtggtacagagaaagaaactacataaatatgctttccaggcgaggtcacttcaaaatcattccaaatggttctagaaaacttaacagctcaaaaatgtctaaaatctctcataagcatttctttttaaaactacaccatttcttgtatctcagaagcagctgtatcgtgctgcttttctgttgttttcaaatccatgtgcttctaatacagggttaagtatcctaactcctggcaaatcatacatacttcatatgtggacttgataagtgatatttgatttggcaaatggcaagagattatttagcaaattcaaacactattttccccatgacccatttaaaaaaaaaaacaacaaaaaaaaaacctctgtcatttcccaccaagaaaaaaaaaaaaacagactggattaataaccagtcagctgaactaacaaagtattaacaaaatgctctgcttgtatgagtttttgttctccttacctaagaaaaataaatgtttcctgcctttactattatttagcatctcttagatcttaaaatacgagaaactcatctttagtgtaataagcttttgtctttcctgtaggacagcagtctgttgtgatttctggcaatggagaggtactttaggaccacatgttttgcctacattaggaaaaaaatagcaaaaccctaatttctgtggttgacaagagggaagaaagatggagccatcctcattcacactccctgtggagacagggtgggactggcaatggggaccaagggaaagaccaccagctctggttgatcctggatgtgtctccatcccttccttactgagaccacagagtaaagcacagatgagaatatctcctattaccttaggcatgttgaggcaaaaatgtaaagctccgagaagcactccatcatgtgtgccccatccgtaatagtttgagtttaccagggtactgcatatgagatcttatttcctcttgtattagatttataatttgaaaatactttccatgagttatgtattgctatgtatctaaaagagccttcctataaccacagtggctgggtcaaagacctactcaaatttggctctttccataacaattaatattcattaaaaacacaaagcatagcactgtatttctatctagcatatgttgaaccatgcagttttgaaagcattgtaaaggaacaattagcctgtcatagtaaaaagagaccctaccatttactgaccttagagctaggcattatagtaagaaaatacaccttacgtgatttaaactttccaacaactttaatagtgcaggtagtactagactctttttgcagatggggaaacagattgagagagattacattaccagcctgaggtctcctggtttatacaaggcagtgctgctggcttgtatatccaaatttaactccatatgccacgttatgtagcattaactgcaaagaatcacaattaatctaatcctgactttgtctctatgctggagtaaacaagttcgctgtattttttcttcatttgtcctggataaaacactagcttaagatggccaaaggtttcatctcaggggccagttttgacaagactttctaagctccactatagaagggaagctgcaggaaaaatcgcgtgtgttcagttagagatgtctgaaaaggcccatagcagcacagaccctcctccccagccatggcagaaccaaagttggtgggcatttatacccaaaccgcctgcccgcacccccagccccctccccctggccttttctgctgagcaatttaactgccgtggactttccgtctactctactggatgctcattatctagaaactccctcccccaacttttgaactatggcaaaagctaaggtagatatttaagtcacactgcatgtcacacatgaagggtacccattagtataaatcccaaaacagcatttttacaaacaaatggaagtcactgtatccctctcacatcccctgttatatggctgatagttctatcctcagattgctccttcttacatgaaattggtctcccaacagcttcatcaattccataagtcaatcttcagcctgcctatttgtgactcgaaagttcctatcttttaagcgcttctctacatttttaaatgaatacaagcaaaggcctcgcttattatgagtataatactatatttatattgttaagtataatataaagtttctgggaaaactacaaaaaaaagagcagcaaggcaaagtatcagaatctgactcagacttttggtagcagacaagtctcaactattccgacaagaatgaaaaacacagttttggaagtgtgtatatatatcatgtatgtgacatttataagacagcaataattgcaacctgccaaaagcaaaaggcctaaaactggtaagctagaggtctctccggtgaaatgtaacacaaagttattaataacaagcacatttgtcaacacgaatctcctctgcctgttgagttgtaatgctaagaagcatctatgctgcgaaagttttatcatatgcataaacatgcacttggacttcacatttctctctaaatgcagctgttcacaaaagtacttttaagcttacacatacacgtatagctaagaactagattaaataaggtttggttcaaattataatattgaaataataacagctaacatttatatagcatgtttacatatctcaactaattataaatgggaaaatgggcaaatgggcaggcagaacccagagggaagcctgccctcattagaccaagacagcaaggtttcccctggtcactagatgaaattagggagttgcaatccttcaaacgtaaatgttaagcctctgctataaataatactcatatagctctagttacgtgaatgaaagatgctgatttatccaaaaattgtggacataattatctggtaaagggaaacgtgcacagtgagctaaatcctcatcttccacacaaggaagtcaacagacactatcaaaagccaagaacctccagttacataagaaatacaggcactaatacctaaaaatagataaaaggaaaaagaggtggctaccagggcataagaaaagggtatggacttctatttttttcattatatgtttttttaaattgtttcttaaagtacacaaatgcataactttgataaatcttaaaagtttaaattaacaaaaaaaaaaaacaagaaaaaatcaaaacaaaaagaaggtatatcaaatgtatccattccttggactagaagaagaaaaaaaaagtagtggaggtcctcactgattaaattaaatcaccttcttggatatgaaagacctttttcagtggagctaagtcttaggagtcaggtgtccatggattgctctcagcaaaaggacaatgtttcaagcccagaaagtaatcctggacagcctggcaatatggatgagagaggctgcaaaaaagtcacctgccccaccccattccccagacaagccaaatgactccatgaatgagactggggcaacatcagcaaaatacccacccaccccctcacaaaaaaagaaaaaatcagaagacacagccatcaccatctgtgatacagtacaaagcctgaggggtggcctaagtagaattaaattaagcactataggaattcagagagaggaaaaccattcattctcagtaagaacataaaggaaagctccactaaagttgaaatttaagagggcccatgccaggcttaggaaacggcccaacaaaggccagaggagggagaacagaaggtgtgtttggaaatgaacatgatctaagccatattaaaatgtgtatcttatgctgctgttgctccactctaaactggagtgaggggtaagagcggaaggcccctgggacagtcaatggtttccggcacagtgcaaaacttgagtgcagtatacgtgcctctcaattaactcatttataggaatatactctccatatttgttggcttttctcggaacaggctcttaaatctcagacactgacatttatatcactatacagggtgcctgtcatgaccccagatctccagaagtccttagctgcatgctagtggattctgttaatacattttccttacaatttcccaagagtgttgaactcaaaagacagggactttagtttaaggcaacataatttctccctttagctcacgacatgtaatatttattttaagggcaagttcccttaaaataaatattctcctaaatgtatacacattccctatgtcattttaatgtagtacatgctccttttaacactacagtcattgctttaaatcaataaaattggactaggtttgatccacacaaccccaaataccagttttggttaaaatacacacattttactcaaggttttctagataagttctagaacttatctagttagtagataagttagtagattacatatgaacaaacctactcctgcatagcaaactgaatatgtacaaaagacagtctatttgcatgcatcataagccttcaaaaataaaaatgaacatattaacttttacttttttactttcactctggcctttatgaacatgtttagaagtatcatttacgaaacacaagtataagtaaaacttgaaagagaaaattaaggaagcaacacatctttacttttatattcctttaattaaatgaataaaaatgtcaggtgccaaagatgcaaaattaagacactgccctggctctcaacagctcacccaatctagttgggagaaacaactggcagacaattaaaaatcagtatttatgccagaagttgcaattattttctatgaaaaatcagatcttagcgatgaccatgagcaataggatatgaataactcccatgagcttagtgtcccaataatggaacacaaggtataaacaagttaagcactactcctggttgtacctcccacagtatttaatacagaaggttactaataaattattagttgggtgactggataaacagatggatagaaagatgaatgaatggagatattaatagtactttttggtaacacaggaaggtgagtttatcctgcatagggagggaggggatgggtggtccaggaataacctcccataggaaagggtgggccaactgcatctgaaagtagtatgtttccacagggataaacacacaggttaaatagaactcagacaaattacacagttatgtaataatttcaaggtatgttaaaagaatcaaaatctgtgacttcaaagctatttttacttaggatgagggtaaacatttaatttttaaggtgattccatgtacataaatatcagatataaacagatcaggtggcatgtggatataataaagactgagaagcaagtacacaaatagctgaaattttttaaaatgcaattcaaattcagaataagccaggtgaaagaagagaaattattccagagagctgttctaggcagaggaaagatcttaagcccaagcaatggggcaagaaccacagatattcacagagagttcaaacaattgagtgttgctgtgatatacagaccaaggcaaatagtggtggaagaagaggtgtcaaatcacagagcactctactgaattaaacaccatgaacttatcttttaagtattagagacccacaaaagggacacagtgctgcttgtattttagagggattcctctcacgggtgagtggaggacacaccctgtgggtgggaggcagattgaaggcagggaacacagacaaaaaatgacctgaggtttggtgggaataacagtcaagaaatatttaagcataaaaaaaaaaatcaccaggctttggagattgactggctaggaatggatgagacagagtgtttaattgttgacagcttgggtaatgggtagatggtattatcacaaattgagagagacacattgagtaggaagaacccaagaagcatctgggtagaaaggtgcaaggaacaacagtgtacagaggtgcaaggtggtgagagatgctggcagagatgtcacaagtgctaacagggcagggcaagggcagagaaaggcaaaagcatggggctcaggatggaatccataaaacatcaacatttgagggcaagcccttaatcatggagggaacagtgtcagaaaggtacaagggcagtatgccaaagtaccacagagagaatcatcatcaaaagctgccttaatgcctcatacccattaagatggctactactagaaagaaagaacaaacacaacacacaaatggaaaacaagtgttagcaaggatgtggggaaagtgacacctttgtgcactgttggtgggaacgtaagatggttcattcagcctctatggaaaacagcaattcctttagaaaattaacataggattaccacatgatccagcaattttgcttctgggcacataaccaaaagaactgaaagtagggtcttaagcagatatttgtatacccactttcatagcagcattgttcacaatagccaaaaggtggatgctacccaaggactatggacagatgaataaacaaaatgtggtatatacatagagcggaatattattcagtcttaaaaagaaatgaattgtcacatgctacaaaatgcatgaaccttaaagacattatgctaagtgaattaagccagtcaaaaaaggacaaatactgtatgattccacttctatgagatagctagagtattcaacttcgtagagaagaacagtagttaccagggactaggggcaaggataaatggagaattattatttaatgggtacagaattttagttttgcaagatgaaaacagttctagagatgcatggtgatgatggttacacaacaatgtgaatgtaattaacgtcactgaacacttaaaaatagttaaggtggcaaatgttatgtgtatttcaccacaatcccaaaaaagctacctcaaagacaaaaaaaatctttcaaaatgtcaattggattgaggaatgtgcaatgaggaggtctttggcagttctagataagtgctgaggacagaaggcagagtggactagattacagagtgaatgggaaagtggagacagcaaacgcagaccatttccaacaagtttggataaggagataaaggtaccgactggatgattgctaataaagaggattcacatttaagggagagctttgagggttttcgctttattttatttgataatgataacaggcatgattgatcgtgagcatgcctctctaggacagaaggaaagaaactggtaaaatgggaaaagttgatgctataggccctaaactggatgaattcaagtagacggagtataggagactcaggcctttccttctgaaagatgtattatgactgtattaatccagagcataatttcagaaatccccaggaagaacttgttaaagaaggaaatatccaggcattgggatcaagtaacaacccaggacagaaacagaatgttgtgaaaccagatttaagtcaaggagtaatacgaagaatgattggagacccaaaagcccccattcaaggctggaaatgtgtcaggataacagatggagtagaagaggtactggcatgcatcaagtccatccctagaccaggataagtctagaggagcaaatcccccaagtcccagaggagatagcatagtcttggggtcctttcaatatctcttctcatttgacagttatcttgccctgcaccaatcaagacccccaagttaacacctacttaaacagctttcctgcctcctcccctggtactgaaagaaggaaacgtgcagatgttttactctcaaatattttttggttttccaactaatttcaaggaattagtttgaaaccatgtgaattacaacttaaaaatacttcccaataaatacagaagctattattacaacagcttcacaggaaaaggtcataaacaagcatgggaaagatctatcttcctgctggctggagctctcacttgctcagtctcccttttcacagctggtttcatactatttactatttggtcaagccgtgctaatctgtaaccctaagcaaatccaaatcaggtccaacttatgcaagcatatattagagctgggctccaaagaatactggacatctgtagtacctgacattcaagcatttggcgagatgtcaatatttcagagagcactttaaatgttttgatttgaaagctaatgcagtgtttcccactggtcaacacgagcagtccagcagagagcaaaatctatttccctcaacatcaaatgctacactcagttgctgatcctatcttgcctacagagaacctaaaagactggaaaaattggtaagtaagaaaattccatctaatgcagagtacagttaaataatatttgtgattacaatgtaaaatggctttgtgtggtgctgacatcctaaatttttttttaatggatggagtcacagagttataggctatgcaagacttttccaaattcaagtaataaaccaagtctagttaaattttccttgtaagtatccttttttaatttgataaggcatgatttcctttcatggggcttgtacattaggcattaggaaattcctattttaaaaatacttattatccagacagtcggatgggtatgtgggtagtgacaaaattagtatttggtatgataaagtggaccagtacagctgggttatgatatatataatctcagggcaaagacagtccaataaagaacgaatatactgaagaaagaaaacaaaaaccagacagtttggtttaaaagcacaaaatgctaaaactctacaaataatgaaaccaaaggtgaaatacttcatgcaaggcagctgtgatgtcttctctaaaatattaaatgcatgggtcactggtatggatttaatggtgagtcacaatttattttcaaaggaaagaaataggaattaaataggtctcatagttgctgttttattttttattagtgtcttaggttttaattttcctttccttggttcttctgattgcttcctctgagcgttaaacatttaaataacaaacattcatagcattttttgttttaacttgtggatggcaaggacaaggaatattattgtgtagtttttctataaattatgtagtaatttccaaaaatctagactaatagataatttagaaacttaatatacatgcttagaatctactccagattatttctcaggcaaaaaaaaaaaaaaaaaaaaaaagaagaagaagaagaaagaaagtaaacaaaagaaaatctttttaaaaggagccctgtcttctgaatacattataagaacactgcaactaagggaaggcagagcttttttaaaaactgtgactcttgtcaacaaatgactctctaaatggagaaaatgcaacttcttaagtcctaattcattttttttttgctttttttttttattatacattaagttttagggtacatgtgcacattgtgcaggttagttacatatgtatacatgtgccatgctggtgcactgcacccactaactcgtcatctagcattaggtacatctcccaatgctatccctcccccctccccgaccccacaacagtccccggagtgtgatattccccttcctgtgtccatgtgatctcattgttcaattcccacctatgagtgagaatatgcagtgtttggttttttgttcttgcgatagtttactgagaatgatgatttccaatttcatccatgtccctacaaaggacatgaactcatcatttttatggctgcatagtattccatggtgtacatgtgccacattttcttaatccagtctatcattgttggacatttggcttggttccaagtctttgctattgtgaataatgccacaataaacatacgtgtgcatgtgtctttatagcagcatgatttataatcctttgggtatatacccagtaatgggatggctgggtcaaatggtatttccagttctagatccctgaggaatcgccacactgacttccacaatggttgaactagtttacagtcccaccaacagtgtaaaagtgttcctatttctccacatcctctccagcacctgttgtttcctgactttttaattattgccaatctaactggtgtgagatggtatcttcttgtggttttggtttgcatttctctgatgccagtgaggattttttcatgtgttttttggctgcataaatgtcttcttttgagaagtgtctgttcgtgtcctttgcccactttttgatggggttgtttgtttttttcttgtaaatttgtttcagttcattgtagattctggacattaccctttgtcagatgagtaggttgcgaaaagtttctcccattttgtaggctgcctgttcactctgatggtagtatcttttgctgtgcagaagctctttagtttaattagatcccatttgtcaattttggcttttgtggccattgcttttggtgttttagacatgaagtccttcccatgcctatgtcctgaatggtaatgcctaggttttcttctagggtttttatggttgtaggtctaacgtttaagtctttaatccatcttgaattgatttttgtataaggtgtaagaaagggatccagtttcagctttctacatatggctagccagttttcccagcaccatttattaaatagggaatcctttccccattgcttgtttttctcaggtttgtcaaagatcagagagttgtagatatgcggcgttatttctgagggctctgttctgttccattgatctatatctctgttttggtaccagtaccatgctgttttggttactgtagccttgtagtatagtttgaagtcaggtagcgtgatgcctccagctttgttcttttggcttaggattgacttggcgatacgggctcttttttggttccatatgaactttaaagtagttttttccaattctgtgaagaaaggcattggtagcttgatggggatggcattgaatctataaattaccttgagcagtatggccattttcacgatatttattcttcctacccatgagcatggaatgttcttccatttgtttgtatcctcttttatttccttgagcagtggtttgtagttctccttgaagagttccttcacatcccttgtaagttggattcctaggtattttattctctttgaagcaattgtgaatgggagttcactcatgatttggctctctgtttgtctgttgctggtgtataagaatgcttgtgatttttgtacattgattttgtatcctgagactttgctgaagttgcttatcagcttaaggagattttgggctgaaacgatggggttttctagatatacaatcatgtcgtctgcaaacagggacaatttgacttcctcttttcctaattgaataccctttatttccttctcctgcctaattgccctggccagaacttccaacactatgttgaataggagtggtgagagagggcatccctgtcttgtgccagttttcaaagggaatgcttccagtttttgcccattcagtatgatattggctgtgggtttgtcatagatagctcttattattttgaaatacatcccatcaatacctaatttattgagagttttcagcatgaagggttgttgaattttgtcaaaggccttttctgcatctattgagataatcatgtggtttttgtctttggctctgtttatatgctggattacatttattgatttgtgtatattgaaccagccttgcatcccagggatgaagcccacttgatcatggtggataagctttttgatgtgctgctggattcagtttgccagtattttattgaggatttttgcatcaatgttcatcaaggatattggtctaaaattctctttgttggttgtgtctctgcccagctttggtatcagaatgatgctggcctcataaaatgagttagggaggattccctctttttctattgattggagtagtttcagaaggaatggtaccagttcctccttatacctctggtagaattcagctgtgaatccatctggtcctggactctttttggttgctaagctattggttattgccacaatttcagatgctgttattggtctattcagagattcaacttcttcctggtttagtcttgggagagtgtatgtgtcaaggaatttatccatttcttctagattttctagtttatttgcgtagaggtgtttgtagtattatctgatggtagtttgtatttctgtgggatcagtggtgatatcccctttatcattttttattgggtctattagattcttctctctttttttctttattagtcttgctagcggtctatcaattttgttgatcctttcaaaaaaaccagctcctggattcattaattttttgaagggttttttgtgactctatttccttgagttctgctccgattttagttatttcttgccttctgctagcttttgaatgtgtttgctcttgcttttctagttcttttaattgtgatgttagggtgtcaattttggatctttcctgctttctcttgtgggcatttagtgctataaatttccctctacacactgctttgaatgcgtcccagagattctggtatgttgtgtctttgttctcactggtttcaaagaacatctttatttctgccttcatttcgttatgtacccagtagtcattcaggagcaggttgttcagtttccatgtagttgagtggttttgagtgagattcttaatcctgagttctagtttgattgcactgtggtctgagagatagtttgttataatttctgttcttttacatttgctgaggagatctttacatccaagtatgtggtcaattttggaataggtgtggtgtggtgctgaaaaaaatgtatattctgttgatttggggtggagagttctgtagatgtctattaggtccgcttggtgcagagctgagttcaattcctgggtatccttgttgactttctgtctcgttgatctgtctaatgttgacagtgggatgttaaagtctcccattattaatgtgtgggagtctaagtctctttgtaggtcactcaggacttgctttatgaatcttggtgctcctgtattgggtgcatatatatttgggagagttagctcttcttgttgaattgatccctttaccattatgtaatggccttctttgtctcttttgatctttgttggtttaaagtctgttttatcagagactagtattgcaacccctgcctttttttgttttccatttgcttggtagatcttcctccatccttttattttgagcctatgtgtgtctctgcacgtgagatgggtttcctgaatacagcacactgatgggtcttgactctttatccaatttgccagtctgtgtcgtttaattggagcatttagtccatttacatttaaagttaatattgttatgtgtgaatttgatcctgtcatgatgatgttagctggttattttgctcgttagttgatgcagtttcttcctagtcttgatggtctttacattttggcatgattttgcagcggctggtaccagttgttcctttccatgtttagcgcttccttcaggagctcttttagggcaggcctggtggtgacaaaatctctcagtatttgcttgtctgtaaagtattttatttctccttcgcttatgaagcttagtttcgctggatatgaaattccaggttgaaaattcttgtctttaagaatgttgaatattggcccccactctcttctggcttgtagggtttctgccgagagatccgctgttagtctgatgggcttccctttgagggtaacccgacctttctctctggctgcccttaacattttttccttcatttcaactttggtgaatctgacaattatgtgtcttggagttgctcttctcgaggagtatctttgtggcgttctctgtacttcctgaatctgaacgttggcctgccttgctagattggggaagttctcctggataatatcctgcagagtgttttccaacttggttccattctccccatcactttcaggtacaccaagcagacatagatttggtcttttcacacagccccatatttcttggaggctttgctcatttctttttattcttttttctctaaacttcccttctcgcttcatttcattcatttcatcttccatcgctgataccctttcttccagttgatcgcatgggctcctgaggcttctgcattcttcacgtagttctcgagccttggttttcagctccatcagctcctttaagcacttctctgtattggttattctagttatacattcttctaaatttttttcaaagttttcaacttctttgcctttggtttgaatgtcctcccgtagctcagagtaatttgatcgtctgaagccttcttctctcagctcgtcaaagtcattctccatccagctttgttccgctgctggtgaggaactgcgttcctttggaggaggagaggcgctctctttttatagtttccagtttttctgttctgttttttccccatctttgtggttttatctacttttggtctttgatgatggtgatgtacagatgggtttttggtgtggatgtgttttctgtttgttagttttccttgtaacagacaggaccctcagctgcaggtctgttggaataccctgctgtgtgaggtgtcagtgtgcccctgctggggggtgcctcccagttaggctgctcaggggtcagggacccacttgaggaggcagtctgccggttctcagatctccagctgcgtgctgggagaaccactgctctcttcaaagctgtcagacagggacatttaagtctgcagaggttactgctgtctttttgtttgtctgtgccctgcccccagaggtggagcctagagaggcaggcaggcctccttgagctgtggtgggctccgcccagtttgagcttcccggctgctttgtttacctaatcaagcctgggcaatggcgggcgcccctcccccagccgtgttgctgccttgcagtttgatctcagactgctgtgctagcaatcagcgagactccatgggcgtaggaccctccgagccaggtgcgggatataatctcgtggtgccccgttttttaagcccgtcggaaaagcgcagtattcgggtgggagtgacccgattttccaggtgccgtccgtcacccctttctttgactcggaaagggaactccctgaccccttgtgcttcccaagtgaggcagtgcctcgccctgcttcggctcgcgcacccactgacctgcgcccactgtctggcactccctagtgagatgaacccggtacctcagatggaaatgcagaaatcaccgtcttctgcgtcgctcacgctgggagctgtagaccggagctgttcctattgggccatcttggctcctcccctaattcatttttatacctcccaactttcttgccagtattccacaaagaaagcattcacaagagaaaaatgaaaaaaaattatgtatgtgtgtatgtgtatatatgtgtgtatatacatatataaaatatcctactgtgtgtgtatatacacacacacatatatataacccactgtgaaagtgtgtgtgcatatgtattccagttaacataattaaaatgactagactagcatttgcatctctccacatcagtccatcagtcccatccattataggggaagatgcttcactgcctttagtgtttcttcaacacaaaacatttaataagtcgctagggatcaacacatggaattcaagatagcctgaggagaaaaaaatcaagagtaaaagtttgttttgaaaactacaataaaatctaggcttacttgccttttgccatactctttgatattgatacaaatacatatattttaacatttgtaattttactaataacctttggtattgccatttttgaaggtaaaaaattgtaaaatatcaacaatttgatcactcaaccaactaaagagatatagtctcaaaaggcaatcccagatgccaaagggcaaggagaaaaccactaatgatattttacataatttttatgtgatagtgagatctaagacttctaactaacacttccaagtacaagtactaaactcccatgagtatagtcccccgtttttaaagcctttacacagatactctcatctcactggatgtttttggcaaccaggagacactggaaaaggccttctattcttgcccctgtttcaccaattagcaaatagggttctagagaggttcagtgattcaggcaagatgacacagctaatcaagaccaagcatggtacttgaagaataaagtcatctggcttcaaatccactaccctttcacctatcactccttgtctctgacctaaggaaatgaccaggtccaataaaaaccatgattaatatataaatacaagttagatgcaagagtgcacaaaactggtcagtcccttgactggatatttacataacagcagcaataatcacactgtataaaatagtcaatattattgggactcagattttcatagaagcaatcttgcatggtagataaaggagatgcttaaagataaacaactagatttgaatctgccatgatcttgagctacaccttttgttttgttttttagctctttcacctctgtgaccctcttctgtcccacttcctattaaataaattttaaaacagataaagccaaacagctgctgagaaactaaacaagacatgctagtacctggcacgcagcagctattcaattaaaatggagtttccttcccatccctgctaataacttattaggataaaagtgtaaaatcccactggaaactgcttgagctgtaatctgagagtcagaggtccaaaaaagaaatcacagaaataaagggtaaggagtacctctcccaatttacctgccatcattcccacaaaaaactgggcgtcgtgtcagtacacaggtagtgaacatctattgacacaggcccattgactacctactaccttaagtaatctacactctaaaaaacggggccactccttcctggccagaacaatggtcctgacagttatggagcctggaattacaggtcaggggctgtgagacccacaggtggtggccatacacacacacacaaaaaaaaaaaaggtgggagaaagacatcaggattacttcctgtttgattcacacatctggtgggtagataaacaaccttaaaaatgctcaagaaaacaaagtgaaagatatgtgttctgtacaagttacaaaaatgaacttgggaagtttcatatatttttaaatttaattactcttcataaaatgtggtgtccttttttgatatttatagacagtccagtataatacatatatttaatagcttaagagctggagtgctaaaacaagcaaactaacaaccataacaaaatctcttatcagaaaatatagataaatgtattttagccaagaattctcaaatttttggtctcaggatcccttttactcttaaaaaattactgaggacctcaaagagcttttgtgtatacctatccatacttattattttagaaattaaaattgtgacagttataaaacttttaaatagcaggttaacacaagtaacatttttatgaaaaatattttcaaaaaaatttatgtcaacaagtcatgttattctacatttttgcaaatctctttaacatctggcctagagaagacagttggattctcatatccacttccatgtccaatctcttgcaaaatgtttaggttaaaagtatgttgaagaaaatccaatcccatacagataaataatggccttctggattttcttctttgacagcacaaaactcaacaggtggttttttaaagcatgattgcaatattggatctaaaaccatgtcaatgaatattttatactttgtaacactgaaatcttttggtcttgacctttaagtctatgtgttttacttatgcccaattttataacatcatacattggtcatgtagataaaatacattcatgcagaaatttgtaaatataaacacttttcattctacagtaccaaaaaatcatactaattaatattgcccctcctcacagtgtcaataccggaaagctacgaaactcacaacagcagacagaagctttccaaaattctgctttcagtttgaaagcttgaattttatcattgtcaaaaattgtctctcagttcattcagttttgagaaaatgtttgccaaacacccaagtacaattattagtttgtcattcgatcaagtaaaaatggtgttccatgaaaaatgcatctaattcagcttataactcaattatacaagtgttcattcctctagacaatcataagtagcaaatgtactttatacataattaatattttggcacacaaaatattaaaaagatatttttatggttgagatttaataaaaactagtattgctttattaagcaattggtaaaactgatttttcttttcttgtttaagattgtatgtcagtaaggtataaaatgcaatgaacagttgagtgcactgccttgatttgtgctaagacacctgaacattttacacatcatggcttttgcaccatcagtgcaaatttcagcacgatgaaaatagcaacatcttagtactcttataaagatggatttgatttcatagtgtctctgaaagggtgtcaggaacccctgtggttctgcagaccacattttaaaaaccactgttccaggctgggcgcggtggctcacgcctgtaatcccagcactttgggaggctgaggcgggtggatcacctgaggtcaggagttcgagaccagcctgaccaacaaggtgaaaccccgtctctactaaaaatgcaaaaattagccggccaaggtggcaggtgcctgtagtcccagctacttgggaggctgggacaggagaattgcttgaacctgggaggcggaggatgcagtgagccaagatagtgccactgcactccagcctgggtgacagagcgagactccatctcaagaaaaaagaaaaagaaaaagaaaaaagaaaaaatgtgcactgttctaaactttaggacagaaaagttttaagatacaaaaagcactagttagaaaagaaaaaaacgataatttgatccttaaaattggtaaattttgcttcttgaaatataactttaaaagtgaaaacagtaagtcacaatctagaaagcctatttatagtagagacaccaaacaaaatatcaacaatattcaaagaagtctacaaatcagtaacagcataaacaacccaacagaaaaataagcaaaaaatgtgactagacatttcatagaaataccagtgatcatatgaagagatgcccatatcatttgagatcactgtacaaatgaagactacaatataataacatttcataagaaaaaaatttttaatctgaaaagataaaacgtcagagaggactgatatccacaggatcactacacatcattggtaggaatataaactagtgtaacttctttggaaaacagtttggcggctgggcgcagtggctcacacctgtaatcccagcactttgggaggccgaggcgggcagatcacctgaggtcaggagttcgagaccagcctggccaacatggtgaaaccccatctccactaaaaatacaaaaaattagccaggcatggtggcgggcacctgtagtcccagctacttgggaggcggaggcaggagaatcgcttgaacccaggaggtggaggttgcagtgagccaagatcgtgccaccacactccagcttgggcgacaagagtaagactctgtctcaaaaaaaaaaaaaaaagaaaaaaaaaaaaagccaggcgtggtggctcacgcctgtaatcccagcactttgggaggctgaggcaggtggatcacaaggtcaggtgttcaagaccagcctggccaacacagtgaaaccccgtctctactaaaaatacaaaaaattagctgggcgtggtggcatgcacctgtagtcccagctactatggaggctgaggcagaatcgcttgaacctgggaaacggaggttgcagttagccgagactggtactccagcctgggcaacagagcgagattccgtctcaaaaaaaaaaaaaaaaaaaaagtttggcatcacttcctgaagtttaacattcatgctgtccttgactcagcaatttaactcctaggtttatatccacgagaaattttcaaatgtccatcaataggcaacaaagatatgcatctcggcatgactcacaatggcaaaaacctggaaataccccaaatacaagaaactgaattaactatgatatggtcacacagcagaatgctatacagtaaccaaaacaaaattaattatagcaatacttaataacatggatgtgtacgatatatatgaaatcaaattttatatatttatgtcagtaaaatatatagaaaaatcatgaagagattacatacagttttaaaatcataacttcattcacacacacttttaggaatacatatagatgttacaaaaatttgtaaaacaggaaaagtgaaagattgaagaacacatgactcaggtaatgtggaataaaagtatccagagagatggcatgggggtgggaggatggaccatttagacaagagcagctgcttactgtcaaggtcttggctttcgttttggttactgagtctgaaggagattattaacatcgttaagaataacaaaataaatctgtaaaaagtcatccttgcttgaatgctgcataacaagaatgcttcctgaatcaagaattatgattattctaattctgtgatccagagatttaaaaggatatctatatatgttaatctactatgcacattgaagtggcaattcaaaatataaaagtacattttaaaactctagaagtgctgaacaaactcatcatttgacagttaaggaaatccttaatttgaccaaagttgtataagtaagttcattctgaaattccataaatattcattgagcttctaactgtagagcaagctctattctgggacctcctaattttgccgttaacaagagaaataaattctggtctggcaaagcttacctttaagaagggctgtatgtaagaatagggggagaggagaataagttaaaaaatattagattggtgcaaaagtaattgcagtttttgccattgaaagtcatcacaaaaaccacaattacttttgcaccaacctaatattttaaacaacaaagggagacaagagaaaacaaacgtggtaagaggctagagaatgcgacatagggggaatggctatgttagatgccatgaacaggaaaggccttgctgagaaggtgacattttaacagagaccagcatgtggcagccacacaaaggtaccagagactgacaatcacaggcagaagccagctccaaggacctctgcccaagtgagttgcttttacttatttatttatttatttatttatttatttgagatggagtctagctctgttaccaggctggagtgcagtggcgcgacctcagctcactgcgacctctgcctcccaggttcaaggaattctcctgcctcagcctcccgcgtaactgggattacaggcacgcccagctaatttttgtatttttagtagagatggggtttcaccatgttagccatgatggtctcgatctcctgacctcatgatctgcccacctcagcctcccaaagtgttgagattacaagcatgagccaccatgccaggccatgagttgcttttagatcttttcagaatcaaacttcaaccccactatagggaatattcacattcacctgaacattcctgctactcttatgcagagcttgacaaaactcagctggtcatgcttgcagggccctgcccccatcagtttacaaaggtccagaaatctttcacaatttaatgagactgaggaaaacatgcacctgctcagagttctgccaggcattagatgaccaaaaagctcaagtgggtaggttaagcttttactttttattttgaatttttgttccactggaccaaaatacctaagtagcttaataatctacatctacaaggaatattggtttgcctgccaaaggcactaagtgtctgctaccctgctttcttcacaacctccaccgcatacaaaaaaacacgcctgagctttttctacaagttaaccacgtccatgacgtggttagaaatagaagagatagaagaaagttcgctggaacgtttgctgcttcaggctggacagattcttattataggtaaaagagtcacacagctgaggataggcttctgctacccaccaggagagtgatggtgacccctgactaaggaacttgacagcagggttaatgatagtccacattatatgggcatcacttatgccaggcttctcccagccatttactagaagagaggcatgcaaccaagttaagaacatacaggttggatattacagtaactgaggcttcgaatggttgggtcctagttgtaggggctctgattaccatatctgggaacttactcaacccattaagctcccttcatctttcttcctgtgtaaaataaggatatttttggtcattcatcagaaagtttatacagcacctactatgaaccatttgctgggttaactgaaaatacaaagctctctcccaacacagtaaaacagacaagctagtaaaaacaaatactttcagtaggatgcaatattttccattgattaaggctgtaaactggcaatgacctcgattcaaatctcagctctacaacgtaactatttgcaatacctagacagacaatttattcaagctctctaggctttgttatcctccagtataaaacaggattactcctatcttgtcaggaccacttgaagctttgaaagttactaactgtagttaattcagtctcactgctgcataaaatttcactaggcaaataatgggttttttacccattctcctgtcaataatcatctgggttatttccatatttttgctattacaaacagtgcttctatgagtgttcttggacatgcttcctggcatgcatctgcaggagttttctagggcatacacctaaaagttaaaatgctcagctacagagtgagtgaatgttcatcttcaccaagtatttccaattccctttccaaagtgatagactttttaaatttctctactcagcattatgttttaaagtcctaaaagattacatatagcatgaacaatttttacaaaggaatgtatgtacacatggactaaaatcattagttttaaaagggaggaaataaaaaacacacaattcaggacagagttaccacaaggcggagaaaggcggatggcagaggaggaacaggaacgatccaagaatgcctgtgggactctcgctctcaagtcggtgctgtgtttttgtttttgtttttttgagacggagtttcactcttgttgcccaggttggagtgcaatggcacgatctcggctcaccacaacctccgcctcccgggttcaagtgattctcctgcctcagcctcccgagtagctgggattacagacacctgccaccacgcccagctaattttgtatttttagtagagacagggtttctccatgttggtcaggctggtctcaaactccccacctcaggtgacccgccagcctcggcctcccaaagtgttgggattacaggcgggagccatcacgcccggcccagtgctatgttctttttgttgtgctttaacttatactacatgtagtcttttcaaagtatcaaacattccattgaaaagaaagactatatttaaaagcaattaacactgtctgtgtttggtaaaacacaaaactcaaaatgaatggtagctattgctacagaatgtgatgagaataagagatgacaagacagcgtagctcaaggtgaggcatgactaaactcagagggcacgagagtgctaccctgtggaggtgaggcagccgggctcgtcaacatccagagctgcaaatgacccagatctgcagaaactagagatgttcaggggaggaggggaaagaaatggggctgctcagatgccagaacagcaggctctgagctccaagagggcagggacaatgttggtgtttttttattgctttatcaccaatagcacatacactgtctggtaatagctgttagaagaatatttgaaaggtgaaaagaaaattttgttttacagatgatggttttaaacaatattaaaaaaaatttagtttcaagggtacatctgaaggttatataggtaaactcatgccacagggatttgttgcagatttttttgtcaggtactaagtctagtacccaatagttatctttctgctcctctccctcctcccaccctccatcctcaagtaagcctcagtgtctactgttccctttgtgtccatgagttctcatgatttagctcccacttataagtgagaacatgtggtatttggttttctgttcctttgttagtttactaaggataatggtttccagctccatccatattcccacaagacatgatctcattctttttttatggctgcatagtattccatggcatatatgtgccacattttctttatccaatctgtcactgatggacatttaagttgattccatgtctttgctattatgaaatagtgctgaaatgaacattcatgtgcatgtgtcttaatggtaggatgatttctattcctctgggtttatacccagtaatgggatggctgggtcaaatggtagttctgttttcacaccaatcagaatggctatcgttaaaaagtcaaaaaataacagatgctggcaaggttgcagagaaaagagaacacttccacacattggtgggagggtaaatgagttcaaccattgtggaaagcaacactgtgattgctcaaagagctacaaacaatgttttaagtaaagactactttggcatagaggagtatatagaaagagaaaagaaaatggccaagaatagaacaagaaacatcaattttaaggatgggcagaggagaccccacaggaaagtaagaaggaaaggtaagaaaaatagcagagacacccaggagactgttattaggcattcgttacctgtcaggcacggagcacaggacccttccctcaaaaccaacacacacacgtgtgtgtatacatgtatatgtgcatataggcatgcatatatcagcaaaaaaagcccatgaatacacaagtttatacaaacatacaaacataacactttgttttcttgtactgaagtactttcaaaataagttgcaggtaatcatgacccttcccttctaaatacttcaataagcatctctaaatactctctcgcttaaccacaccatcaatatttctgggaagattattactcagtaatattacctaatctagaatctgtattcagagttatacaactgtctcaaaacaatttgtatggctattccctccagccaacaatcaccactcattaacggtgttatttctctttggcctgttttaatctacgactgtccccttccagcccatcatgtttgtttctcgtggcattgatttttttaaagagtccaaggctggttgctttatcaaatgtttcatattctaaatttgtctgattgctcattgaagatttttgatacagtttattacaaaagtatgttgtgtacatctaactaaatcatatcaggaggcatacgatgccagattatctcacttttggtaagttggatcattcagtgaccaccagatctctctgcttcagaggtatactttttattactctaaatgatgggggagtatgttttcagactgaaagatactattctcccacacccattcacccagtggcttttggccacaattgaagcttattgcctgaatcagttatcacactgaggttgcaaaatggtgatgtcctaaattctacccttcttctacctttactagccagcattctcctgtaaacaagagctttctcatttgcatcctacctttttgtaatctgtacttttaatatcaccataaactcctgaatttgttttggttttcaatgtattttcacctgttgctatcattctcattaatgcccaaactgtcccagatctaggagtgccctcaagtcggcttctgtgtccttttttagcatttcctaatcggtctgagcacttccttgctttctgatcaaaagatgtcacaactcaacttatacttttcctgtacctgatcggaaatcagtaatttctcttaaggagccctgtttcctttcagtggctagtgagagttccaaacaagatgagctcactgacagtgggaagtcactacttctgcattggcaggggggtttcacttttgttatttaaaaatggcttgagcaagtttacagctattggggtgtcatgacttacagacatacagattttattacttttttttattaaggactttgagcaggtttaaagtttgaagggaagtagcccttagaaagagacgttgaaaatagaaaagagaaaagcaataacacatagagttcaaagaaacattagaaggaagtggaagtgcattcaaaaaaaaaaaaaaagcgtggagtaaaacaaaactagtcctggcacgtttcacagtccaaggatgtcaatgagcatcaaagtgtagtgtatagtataacgagaaaggagtgtttatcagaatttttttacatacaggtattatacctgaggcaataatgaaatggcatctaacagctcccctggggcagggcaagacataagactattttcttacactgtacttgactgacttctattgaaattcatgggaaaggtgaaatatcacaagtggaatgttctaaaacagacacgcatattcaagaacagatcccggccgggtgcggtggctcacgcctgtaatcccagcactttaggaggccgagacttgcggatcacaaggtcaggagatcaagacaatcctggctaacacggtgaaatcccgtctctactaaaaatgcaaaaacaaaaattagccaggcgtggtggcgggcacctgtagtcccagctacttgggaggcagaggcgggagaatggcgtgaacccagcaggcgaagcttgcagtgagctgagatcgcaccactgcactccagcctgggcaacagagcgagactccatatccaaaacaaaaacaaaaaacaaaaaaacagatcccaacatgtgagcctaggactcataaaaagtaaaggtctttgatttcaaatacaacttgaacaacatcttcaagctgcataaaagtgcatctttcacccttaagtcctactaagtttgcaactaatacagttgctccattgttgcatgctctagttaataaaacacaaattcgtttaagaattgctcagttcgcctggcgcagtggctcatgcctgtaatcccagcactttgggaggccgaggcaggcggatcacgaggtcaggagattgagaccacgatgaaaccccatctctactaaaaatacaaaaataagccaggcatggtggtgggcgcctgtagtcccagctactagggaggctgaggcaggaaaatggcatgaacccgggaggcggatcttgcagtgagccaagatcgtgccactgcactccagcctgggcgacaaagtgagactccgtctcaaaaaaaaaaaaaaaaaaaaaaattagccgggcatggtggcacgagcctgtagtcccagctactcgggaggctgacgcaggagaatcgcttgaacccgggaggcgaggttgcagtgagcggagatcacgaaactgccctccagcctgagcaacagagcaagactccatctcaaaaaaaaaaaaaaaaaaaagaattgctgaatttataagttattaccacagtatgttttattaaaatcaaagaaccctctaacagggattaatacacaaaacagggaggaaacatacaacactttgggttagagagtatatgggaatcacttctgtacagtatttctactcccacttaaaattctggatatttatattcttttcctttggctatataagcctgaatcttgaacaaacacacaagtggttgatattcagctaagcagttaaagctgttgttttctcacacatggaaatttgtcttcatcttcacagcaaaggataaccactaatggtctaacagccccatgatctgcagatctgagtactgcttgcctgagaaatgcaaataccatctcagtgaggcgaaaagaggtcatggattcatttccttgcctggccccagggaataggaccacatattccaaaacaatgctgcagaagaacaggctggaaaaaattcagtaattcaggcagctcaacctagttccaggagaaaaaagaattggttcccaaaaccctgaagccaggagtgatgcagagctttgtgccactctcatgaaagattagcattgtgtagggactggtaaattagaactgaaacactctggacttcatacatacactctgttgttgagtgccacttcctgtgactagaatagagggatcatcagaagcaaaacctctcccaatttgtcccttgttcaagcactgctgggccacatactggaggaagctcagagcactctgcaaagggtctactgtgcctcctgcagccctgaatttcagtgtagaagagcgtcaacttaaatcaacttaaagaagaggggaaactgtcaggagcctgatagtttattctgttatcagctgagtcactccctgtacgcgcaatgttcccactgagtcacagcctgcctcacaccaggtatttgattcttatgggaacaggaaccctagatgtagctgaggtagctactacttctcccctcattttagacatgtaaaaactgatacacaaaggcagttaataattatcgcaatattctagcgccatacatgtagccaaggcccactgtatcccacaagcatgcatgtaatcattatgctgcactgtctgtcctctgtccactattccaacagagcagtaaataaagcacacttcacattcctagaccttagcatacagattacttactgctgatgagttattcaattacagttaaggtctgaccccaacaagaaagctaaattctcttcctgtatcaaaatcatctgaaacatacctaccattaaggggtcattccagtggttctcaagaaaatttagaaatgtgtggggacgtggctggttgcacaaaccatggcgttctactgccacctagtggatacaggccagggatgcggctaaacacccaacaatacacaagacagcctacccacaaagaactgaaaccgaaaaaaacagttaacagtaccaaggctgagaaaccctggactattccaatcattataggcaaaaaattacaggtccatcctgactaccaagatgcagtccctagagtaaaggctaacagtgggtggccattttcctggcccccagtttgccattcgggaagactgcatgactatgtatccattggaggtcatgaggtgcctatgccacacctcaccctccactgacagctcccatgatccatttgcataatcacaaagtgaagacaggctggagttcttagacatgccaatatgctagacttgcagtctgccacaagctatgccaaaagtgttttgagggaagcgattagaatacaaagtaaagactatgtttggacgttatcagtttataaatccaacctaatccgtccccccttaccattctcacacataatcaagagttggatctgtttgtagcagaaattcagatttcttttatctttatgggttgtaaagactgtgaatacgaagatcaagagggaatcaagagagggccgaatttatgctttggtggaggaggaagttcttgggtatctgcaattcagcctaagaagaatatttagatatttctaatgtgaaaacttagcacagctcctcaatgaaagtatgtggccacaccattcagccaattttaagttacattaacacatgttggtcactgacctggattctaactgaaggtaaagtcgatgggtcacagcagcaggagttaggatcaagtgacctgatcttgagctcacatctcctgccagagaaaactggctgaaggtgacaaacagcagcaagcagagctctccttgtgccaggggccccaggggatctgcgtgtggcatccaaaccacatgcagcagatctgggtttctccctgcagaagagtttccaccatttataggttaacgttacctgttgtaatcaccattcatgatagtccgactctgtatctctctttggatatcaacgcaggagatagaaaactgagtcaaaaaatcagaaactcattttaaatacttttagaaactggcaaatcaaaaggaggttctctatgccgcagtatctggaagataactgaagaaactgaaggcatccacctcatgcaaaaccttaaaactcagatcaaaaacaaaaataatatatatactctcaaacatacacacatgcacattcctttcttgaaaaaaaaacactggctgacttctcaagatgcgactccagcaaaatgttgaagggcctgtgtaaaggatcacattcatataaaacatgctgcccccacattctttcaggagcaggggagccctggcttggaatcaatcagacattagtttgaatactgtctggctatgtgttaggtgccctttgatgaatcacttaaccattttaagcatcactgtcctcatttgtaacgtaaacgtttactcattggcaagattccatcatgttacccaagagcttaggccatccattttcccccactgtgacagcctctcgtgtcagtcttgatgcctgttcctatagctctctcaccccaaaactccttccttcttctttgcctagctaaagccaactcatttgtcaatcttcactatcacatgctccaggaaggctgccctgatgccaccatttctgaaactagatacgtgctcactgtgttcctgtgcttcctccttcaatgatgaccccatgtcataccttgaagtgtccctctgttcagcctccccctagactggaatcttcctgagagttccctgatgtgtttccatagggcatggcagcatgttctgacggctttatagtgagcaaatgaacaaaaggccttggcaaaggaagaaatatcaggggtacacaggagccaaaggttacaatgtactttataaacagcagatttcaacaaggggaaatcaatgatatcaaaaactgcaagcaaagaggtcaggaaatagaataactgagaaaaagacaacagacttagaaattaggtccctgacagcttctgagaagtgtggtgagtgtcaaacatcaaatgctgtgggtaatgaaaaaagatagggggtgggagagttccttcttctgggtgaaggagaaagtgagattctccttgactgagcctagacagggcacggacaagagtgccacaggaatgcagaacacggatgagacagctaccgataggatctgacagaaagctgctacggtttgagtgtccgtttcaaaattcatttgaaattgatttgccattgtgacggcattaagaggtggtacctttgagagatgattagatcatgatagcaaaggcctcgtgagcaaattaatggtattactgcagaagttggccctctttttctcttggtctcacatgctcacttgcccttccaccatgatgcagcaggaaggcctcaccagatgcatcccctccatcttgagcttcagagaatccagaaccatgagccaaattaatttcctttctttataaatgactcaatacgtagtattgttatagcagcagacaatagactaacacaggagctaagcagaagaaggatttctgagaaataaggggagtgtagccaattacagagagagaacagcaacttctgtgaagtcgagggcaccctggacaggtctatgacttagaaacataggacattgtttacccagccctaaggagtcacagtgctggggcagaaaggcaagcccaataggcagggtgaaagaagttctaaaatatccagctctgcttgggtaagaaaagctaggaggctgatgacagagagaattaaataacactagtaaataatataaaatattttaaagatgtaaaacgctgtaagttattttagtaacataaaatgtaataagcatgttctgatggctttagtgagcaaatgaacaaacggccttggcaaaggaagaaatatcaggggtacacaggaggcaaaggttacactatataaacagcagatttcaataaggggaaatcaatgatatcaaatgctgcaaagagggtcaggaaataggataactgagaaaaagacaacaggcttagaaattaggtccctgacagcttctgagaagtgtggtgagtgtcaaactttaaatgctctgggtgatgacaaaagatagggggtgggaggaggattccttcttctgggtgaagaagaaagtgagattctccttgactgagcctagagagggcacggacaagagtgccacaggaatgcagaacacagatgagacagttatttgtaaattattttagtaacataaaatgtaataacacaactataaatacacgacacataaatactatgaaaaccgcataggcgatcacattgacaccaaaaaaaaaaaaagtgttaaacattaaggcatgagagattaaagcagcaagaaaatggcttcagtaagtttaaaaatgtataaatgattacatacatctatactattttctattgatacagaatcagctagaaaacaagtatttatctcatagaaaaagatccagagcactgtgtattaaagcttttgatgtctggactgaaaggaaggaaaaaaaatatataaaagttgtacctttataagaactgaaaaaagaagaggaagaaaaatgcacgtcataagtgggtactgataaaagcattatttgaaggcaatccattctccatagatatttctattcctaattatgaaataatttaaatatacaaaaacagaagtgcagacactaatgttgataacaccaatgtaccagtcaccagtgttaataggcagtaatattaggcatatttgattcagaatttaagaaataaaatatcacagatacagcaaagtccaaccaccctaccacttataagctcccacttgtaagttaaaacacgaggtatttggttgggtgtaaggaggctggacttgctcctacttccctccccaggagtaggcaatgttcttttctttttttcttttaggttcaacagttacatgtgcaagtttgttacttgggtatattgtgtgacactgagcttttgggcttctagtgaacccatcacccaaatagtgaacacaaaacccaagagtaagtttttccaccatttccccgcttcctacctccccgtctttggagtctccagtgtctactgttcccatctttgtgtccatgtgtatccaatgtttagttcccacttataagtgaaaatatgtggtatttggttttctgtttctgtgttaattcacttaggataatggcctctagctacaaccatgttgctgcaaaggacatgatttcttttgtatggctgcatagtattccacagtgtatatgtaccatattttcttcatccaatccatcattgataggcacctaggctgattctatgcctttgctattgtgaatagtactacaataaacatgtgaatgaaggtgtctttttggtaaaacaatttgtttttctttgagtatatacctagtaatgggattgctgggtgaaatggtaattttatgtttagttctttgagaaatctctacactgctttcaatagggactgaactaatttacaatcccacaagagtacataagtgttctcttttttctgcaatctcactgacatctagtttttttttttttttggactttttaataaaagcctcaatgttgtaaagttagaatatatgatttacaaccagcacatgttccatactgccctaggccactgagattattactccatgcagaacttaacctctttctttccaaagagaatctcatgactttttaggaacattctaagtaaatataagatgatcacaatcgccacctctcaaataggtataaaataccaatttacatttccaagagaccataaagatgggaagattatgatgaaatgtaatgaataaacttgggcaaagatcctagatttcaggcctacttggaatataatttttcttgtctaaagtcccgactacaacaaaaatattttaccatcatcacctttattaaatgtctcctgggcacaggatctgggggaaaaaaatgatgctaactcaaagagtggtacatggaccagcagcatatcatgctttattagtccattttcacactgctgataaagacatatttgagaatgggcaatttacaaaagaaagaggtttactggacttatagtttcacatggctgaggaggcttcacaatcatggtggagcacatctcacatggtggcagacaagagaagagagcttgtgcagggcaactcccatttttaaaaccatcagatctcatgagacccatccactatcacaagaacagcacagaaagatctactcccataattcaatcatctaccaccaggtccctcccacaacacatggaaattaagggagccacaagatgagatttgggtggggacacagagccaaaccatatcattccacctctgaccgctcccaaatctcatatcttcacatttcaaaaccaatcatgtcttccaacagtcccccaagtctcaattcatttcagcattaactcagaagtccacagtccagagtctcatcccagacaaggcaagtcccttccgcctatgagcctgtaaaatctaaagcaagttagttacttcctagatacaatgcagtacaggcattgggtaaatgcagtcattccaaatgggaggaactggctgaaacaaaggggctacaggccccatccaagtccaaaatccagcaggacagtcaaatcgtaaacttcccaaacgatctcctttgactccatgtctcacacccaggtcacgcaatgcaagaggtgggttcccatggtcttgggcagctccacccctgtggctttgcagggtacagcctccctcctggcattgagtatctgcaacttttccagaccagcggtgcaagctgtcaggggatctactattctggagtgtggaggatgttggccctcctctcacagctccattagatggtgccccagtaggcactctgtgtgggggctccaatcccacatttcccttctatactgccctagcagaggttctccatgagagccctgcccctgcagcaaacttctgcctggacatccaggcatttccacacatattctgaaatctaggcggaggttcccaaaccccaattcttgacttctgtgcactcgcaggctccacaccaggtggaagctgccaaggcttgaggcttgcaccctctgaagccatgacctgagctctacaagggcccctttcagccacactagagtggctgggatgcagggcaccaattccccaggctgcacacagcacagagaccctgggctgggcccacgaaaccactttttccttctaggcctccaggcctgcgatgtgatgggcttgcagtaaagacctttgacatgccctggatacattttccccattttcttggtgattaacattcagctctttgttgcttatgcaaacttctgcagccggcttgaacttctcgtcagaagatgggattttcttttctattgcattgtcaggctgcaaattttctgaacttttaagctctgcttcccttataaaactgaatgcttttaacagcacccaagtcacctctttaatgctttgctgcttagaaatttcttcagctagataccctaaatcatctccctcaagttcaaagttccacgaatctctagggtaggggcaaaatgcctccagtctctttgctaaaacataacaagaatcacttttgctccatttcccaacaagttcctcatttccatctgagaccacctcaccctggactttatcgtccatatcactatcagcattttgggcaaaggcattcaacaagtctctaggaagttccaaacttacctacattttcctgtcttcttctgagccctccaaactgttccaatctctgcctgttgcccagttccaaagttgcttccacattttcagataccttttcagcaatgtgccactctactggcaccaatttactgtattagtccgttttcacactgctgataaaaatgtaccagaaacaggacagtttacaaaagaaagaggtttactggacttacagttccacatggtgggaggcctcacaatcatggcagaaggtgacaggcatgtctcacatggcagcagacaagagaagagagcttgtgcagggcaactctcgtttttaaaaccatcagatctcatgagacccattcactatcacaagaacagcacagaaagacccacccccataattcaatcatctcccactggctcccttccacaacatgtgggtattacgggagctacaagatgagattttggtggggacacagagccaaaccatatcacgtgccaaactccagacataatggaatctcagtcctcattttagcaagatcccaggtaatgtgtatgcacattaaagtttagggagcactcactggtttaaagaattcagaaatatgaaaacctagactaaggcagaaccaaatccaaccaccattttgctaaacctatcctcttcctatcagaccacatggctttcaggtgttatctctgcaaagtccacacattagtctcattacactggtggtaatcaaatgagggcaattttgtccctcagaggacatttggcaaagtctagaaacatttttgattaccgcaacttgggtagtgggttactggcatctagtaggcagaagtcagaactgctgctaaacatcttacaatgcataggacagctcccaaaaataaataattatctggcccaaaaggtcaataagacaaaggtttttaaaaaacaaaacaattaaaaaaatccacctgcaattagacttatgatttcatggctaagatgaattgttatattcagtcatttgataaattgattcgatcatccatatccaaggggggggggggggtaatataaaccaataaccaaaaccacttcatgcccaagctctcagagtttaagtttcccacaagaggctgcaaccaaatcaataatcaataatgacaacaaatagcaagtatagtgaaacaacaaatgcacatgttgaaatatttcacaattacacaagctgaatttaagaagtaagtacagacatattttcccaataaaaagtcaggtgctcacttaaatctttggttttttgttttgtgtaatgcaggatctttaatgaaaaaacacttgggccacttcaagacgacaaacgctcactgggcaaaacaccttcactgaaaagagacctcatattatgcaaaaaaaatcttaaaaggtaattttttaaatccctcaagtattatcaagagctttgttaatttcatcgaagtgctatgaagaaaaaattcttttcttcacagaaggaattacagctcacaattaggaaggtggaaggtgttctaatacaagaggaaaataggtcatggtatataattacacagatgagtaatgaactcagagctgactaagcctgcttttattaagatgaacgtatttctggagtgagcaatgctttgcacagccttgtatcaattaaattctgtccaaagagagaaccctgaggttatctgtaatacatgacaacttgaaaacacttcatgcagcacaatcctaagatattacactgcactaagggacaagtgcactcactatctaaatcagattgaatctttggcattgacattctttctacacaatgctcccactacactttaataactgtctttgggcctcataaatctcattctgccatgttctttaattatgttaccaaagtctccaaagtgacagtagacaatgtaggctaaaacatttcagaccacttcattctcatatatctggatttgtgaaacaaggcaaaatttcactgaagaaaatttcaagacttacactattacagtataccccccctctttttttttttttttttttttttttttttttgagactgagtcttgctctgtcacccaggctggagtgcaatggtgggatctcggctcactgcaacctccgcctcccaggttcaagcaattctcctgcctcagcctcccaagtaactaggattacaggtgtatgccaccacacctggctaatttttttatttttagtagaggcagggtttcatcatgttggccaggctggtctcaatctcctgacctcgtgatccacccacctcggcctcccaaagtgctgggattacaggcttgagccaccgtgcccggccacagtattcctttttaaaaagtttagctatatatatgaatctttcttaaatgtgatctctagaatttaggaagcattgtttatattcctaaagcctcaaggttaacataatgacaactttcacagcagaaattcagtgataataccagaagtaactatcaatgagcagggctccacaaacagacacctacacaaactggctcaccagactgcctgcttatccagtaatccagttaatcatcatccagaagtcctgttcatcttttaatttttttctgttgcctatctctcctctttaatggactggcatgagctggtaagaaacagtgaatcaactgagaagtgggcagggaagggagggttgctgagcacactaaaagcttcttttctgattcttttggttcttatttatttttacatttttgtataaaatcagcatgagaataaaacgatttccttcatttgtgaaagatttgaagtttctgtaggtccctgtatgaggacattaaatcatctcaatctgtactaaagataaggagaggagactgagtagatatcacgaggtccaaatgatgcatgtcttttttaatgattttgtcctgattttcatccaacacatattcctgccttttggtctcaatatataatttggtcttacttgccttaagagagcttcttttccacacatctctcagtctattactgctctgatctgccctacagaaaaggctgccatgctctaagacacttgaacccgtaagacagtatgttctcaccattaaccccactgcttttaaaaaaaaatcaatatttaagagttcaaaaattactaccaagagtatcttggaatttctctttagcttgttcctttagagtgttcctttaagatgaagaaatctgtcctggcatgagcctctgctgtatcaaaccagacagtggcacagggtagcagaggcacccaaccagcatgtctaaaacctcccaccctaaactggaggctcatctgcaattgcatcaaaactgccaaaatagcagtgtttggggaaagggcgcaggtaagctgtgtgcattcactccatttcaggaggcaaagctgctctagaagtttaccttggtcagtcagtcccttccatccaactcaaagtggtgggagcagtgaaggggaatggtgtatatcaccagggcatacacatgcagattcccagcaacctgaggaatctgagagcagagttctggacctgcagcattaggtcacatgcagaaatactgcagctcaaaaatacaaaagacacaagactctgagaaaataattttataagggtttctataagaaaaggaattatgtctctcattaaatcatttctgggattcactatttctataaatagtggcttctacaatatttctaaaaggaaaggaatttggctctcattaaattatttctgggaaattattcaatatttcaccatataactatatattacacagttattatttctgttttccaaaataacagctacagttttttatattttaaactcaagtgaatcccacaagtactcagtacctaccatgagtatgacaccacaatggccaggcgctggggggttgtgtggcttaggactgggaaaccaaattagacctgggaatacagcagcatgcattctctcaagctctgcaagactggcatttaaaccaaaatgcatctaactgtcaagagacagttaccagacaaattagttaccagccacagactcttagtcacagtagacagctaaaaatggaaaatgtgctccccctcccttatcttttaaaatatgaaacaggctcataaggagaaaggcgatagaagacctacaaagaagcaaatgagtacaaacccatcatgcccagagccaagcacacaaggctacagggaagaggaagaatagtgctagtgaaaggttttgtggaggaagtgatttggggtactcattccttctataggaagtccatagactggcaaaatcaagtctatcaatatttctagttttgccataaagcaaaaggaaagcatatgggaaaggaaaatacgcagaaacaagatattcttgtgtaggaagcagcacacaagtttacatggatgtactattttttatgtggaatgtgactgtatttcatattccatatttcaaaatatccctttgtcatgcttaaatgtatcaacctaacttgtcattcactgtgatatgcactgtgctggcaccacaaatacagatgaaaaagatgcattctctgacatcaaggtacccactgttcccacaatctttctttcccttgatccctgaataaatcttaagagcaaggattcatgccttgtattcccagagtgcatattcatttatttcacaaatattttaactatctaatgccctaaatattatgcaaagaattcaagagtaaaaaaatgacatgatctttctcctctgaaggagcttgtagtagtggaagagacaaacagctggagagaggagtgttgataggagaaagacacaggatgataagcacacactcaacccaccccaaaccaggctaggaaagttgaggtttcctaaggaaagtgacagctaagctgaggccttgaggataaagagaagttagccagccaagaaggtatggaaacagttttccacacaaatgaaagtctgtgcaaaggtccaggctgagagaaatcacagaacctaaaaggaggcagatgggcccaggacagcaggaactcagtgctgggggtggaggaagcaggaggcagaacaagaaaggacttcaacattacagacttagggcattctcctgagggcaaggacagactactaaagggttttaagcaggataattggtactgttcacatataagatgggcagtaaacatctgttccgatatatcaaataaccttttgaatttaattctagtcttccctctgccctaaatcaacacttccgacatcagtgaagaatatacaggattcctaaacaatagaagttctggataacacctagcacagcactgtgcaataaaaccataatgtgaaacacatatgtaatttaaaatttcctagtagccagagtcttaaaaagtaaaattaagttaaatttaagagtaataatatattttatttaatagagcatttgtagaatattacttcaacatgtgatcagtattaaaaatactgagatattttacattttttcattccaagtctgcaaagtctagtgtgcattttatacttaacagaacatctcaatctggactggccatatttcaagtgctcaatacccacacatggctagtggctaccatactgaatagtacagatgtagaatgtactttgggaagcatttctcagaatgcttaaagtactttttatcatttgtttgtatttgtattctaatttattaaaataatgcaaatcagtttttcaatgggaaaaaaaaaaagctcaatattgaaaaggtacccataatcccataccaaaaataccggttaacatttgaatgtatatgtttgttagacactgtcttcatgtccaacatatatgtagaatacacttttctaaaagtaaggtccgtctgaatagctcttaatatgtaaacatttataatgatttttatgaatccataaaaatttctcttttaggaaaaaacaatcacatttccaacataggttttaaaaaaatacattacacatgggattctgaataaaataaaacattaattctgcttttacagttactaccttttaagattatacctaaatgagtatttcctagaactctggagttttatagggaaccattattattttaggggcatgctggtctccgtattacctagaagttctcagagactgccctgctgctccagtttctctttactgccacctgtctgctccattcttcccttttcattgcccaaaaaaaaggaagaaggaagaggagggaaaagggagggggagaggggagaaggaagaaaggagtgggggttggtgggtaaagggggaaagagggagggaaaggagaaaaggaagaccaaaagaaagaaaaggaagaacagagggagggagggatgagtgtctaacttacacagagtaaaaaggtggcttcaaaaatttggtaggtttgactatattcattgccctttgccttattactcagcaaatgtcttggaggccataagtgccctatgagtgaccagttcacacctcttttcaggcctctgccttcagaagttacaagatgatcaattcaacctccacacagcctccagatgaatcctgctctcagaacctcctgatcactcagcagatcattcctgtgctgtactgtatggtcttcattgcaggaatcctactcaatggagtgtcaggatggatattcttttacgtgcccagctctaagagtttcatcatctatctcaagaacattgttattgctgactttgtgatgagcctgacttttcctttcaagatccttggtgactcaggccttggtccctggcagctgaacgtgtttgtgtgcagggtctctgccgtgctcttctacgtcaacatgtacgtcagcattgtgttctttgggctcatcagctttgacagatattataaaattgtaaagcctctttggacttctttcatccagtcagtgagttacagcaaacttctgtcagtgatagtatggatgctcatgctcctccttgctgttccaaatattattctcaccaaccagagtgttagggaggttacacaaataaaatgtatagaactgaaaagtgaactgggacggaagtggcacaaagcatcaaactacatcttcgtggccatcttctggattgtgtttcttttgttaatcgttttctatactgctatcacaaagaaaatctttaagtcccaccttaagtcaagtcggaattccacttcggtcaaaaagaaatctagccgcaacatattcagcatcgtgtttgtgttttttgtctgttttgtaccttaccatattgccagaatcccctacacaaagagtcagaccgaagctcattacagctgccagtcaaaagaaatcttgcggtatatgaaagaattcactctgctactatctgctgcaaatgtatgcttggaccctattatttatttctttctatgccagccgtttagggaaatcttatgtaagaaattgcacattccattaaaagctcagaatgacctagacatttccagaatcaaaagaggaaatacaacacttgaaagcacagatactttgtgagttcctaccctcttccaaagaaagaccacgtgtgcatgttgtcatcttcaattacataacagaaatcaataagatatgtgccctcatcataaatatcatctctagcactgccatccaatttagttcaataaaattcaaatataagtttccatgcttttttgtaacatcaaagaaaacatacccatcagtaatttctctaatactgacctttctattctctattaataaaaaattaatacatacaattattcaattctattatattaaaataagttaaagtttataaccactagtctggtcagttaatgtagaaatttaaatagtaaataaaacacaacataatcaaagacaactcactcaggcatcttctttctctaaataccagaatctagtatgtaattgttttcaacactgtccttaaagactaacttgaaagcaggcacagtttgatgaagggctagagagctgtttgcaataaaaagtcaggtttttttcctgatttgaagaagcaggaaaagctgacacccagacaatcacttaagaaaccccttattgatgtatttcatggcactgcaaaggaagaggaatattaattgtatacttagcaagaaaattttttttttctgatagcactttgaggatattagatacatgctaaatatgttttctacaaagacttacgtcatttaatgagcctggggttctggtgttagaatatttttaagtaggctttactgagagaaactaaatattggcatacgttatcagcaacttcccctgttcaatagtatgggaaaaataagatgactgggaaaaagacacacccacaccgtagaacatatattaatctactggcgaatgggaaaggagaccattttcttagaaagcaaataaacttgatttttttaaatctaaaatttacattaatgagtgcaaaataacacataaaatgaaaattcacacatcacatttttctggaaaacagacggattttacttctggagacatggcatacggttactgacttatgagctaccaaaactaaattctttctctgctattaactggctagaagacattcatctatttttcaaatgttctttcaaaacatttttataagtaatgtttgtatctatttcatgctttactgtctatatactaataaagaaatgttttaatactg

SEQ ID NO: 89 - DNA, 129297 bp, Homo sapiens
ggaggggaacgtggtgtggcccgacgagttggcacaagcctgtaactgcaagactttgtagctattgaaagttcaagtggtgaaagaaggctgtgcctgccattcttcatgtgatcataacaatagcgccttggaagtggttgcgattttcttcttccataaaccttttgggttctcactggaattgtatgcgtgttatttctgaagtttacttatttctaagaccagtccacaaaatgtgaacttcattaagttttaaaatagatcgccgtcgttaaaaacgccattctctgcactgtagtttatttgcttacttcacatgctttattaacgtgtgtatgtgcgtaattaatagctgtgttcttatcttccaagtgtatttttaaccgcaccggcttctatccaattcatctaactacgtagagcgtccatcgcttctggaatctacctcttgataacagtaatcagaatcagaaaagctcgccgttcacttaccctcatcctttaaaacttttccatttaagaaaatcgatgaacaaaacctttcttgtaactcgctcctgcactacgtctatttttatttatttttctgatttggcaggactcagcaatgctgtccgggattttttttttctttttttttttcctagctagagcagatgtgggggtgggggaggtgagggctgggctccagccagagtcgcccccgctgagcctccgcctagcgcgcggtggggccaggaatcctggtggaaggaagcggcgctggccagttggtccaaggctccacctgcagccacaccgcgtagtttctccgcctctgcctcgctcactcgcactcacatacaccacagctctcctttgggtcggaggagacgccagccaaagtaggcggagttgcggaaggagagtccgatctgcgcaatccagtccgggacttggctccgcccgggagcggcggcctctccggtgacagaggagtagtgagcggcacggggtgaggctgcagccaactccgctccccgcgcactcggctgcccaggcgctcggaacccagcagcggcgctcctccgcggtgccggtcgcccgcgatgcccgcttagcagcgtgtagcagcggccagcatcaccacacccgcggcaccgcgctgccggccgcagagccgggccagagccttgcacccctgccccagcccccaccccgccccccgccctgaaatgacttgttaatcggcgcagacaccaccaaggggactcaccgaagtggaatccaagtggaatttggatttggagaagagtttcttgaacatttaccctcttccttgttggttttctttttctttttcttctttttttttttggcttcttttttcctctccccttctccgctcgtcattggagatgaacacatcgcgtttgcatcccagaaagtagtcgccgcgactatttcccccaaagagacaagcacacatgtaggaatgacaaaggcttgcgaaggagagagcgcagcccgcggcccggagagatcccctcgataatggattactaaatgggatacacgctgtaccagttcgctccgagccccggccgcctgtccgtcgatgcaccgaaaaggtacgccccgggcgcccgggcgcgccccacctcccgggcagctggactccagcctgagggtcccggggccgtggctagcgcgtgctgtcggctttgtggtgcctgcgttttattttgtcttgtgtctctgtttcccgagccttgcccggtcctgggggagcagccgtgagccctgcctgcctttcctctctgccctgcgccccagagtgcgtccggctccacgtcgagagctttcccacccgcgttgcgcacacgcccggcgccgccccgggccgcgacggcgcgtatggctgttcctcctgggggtgtgtgtgcgagacccaaggctcatcctcccgcgtgcccagcagggagcagagcgggccctaaatggtgggattctcggaagctccctggcccggtgtgtcgaaggcaggggaaggggttctgccctcgagggctggagggggttgggtataacagcgctgttttcgtccagtgccaggtgggagaaggggttccgcggagacggtgtggaagcggagagaatcttttgttgtcagtgtggggtctgggctgggctccgtggagtgcaagaaacttgtaatggctctaggcacccgcgcgccctgtctctcggtgagatcctggctcctgtggccgctgccaccagaggttccgggctttgtttgctcgaataagtgtccgggagcagccgttcgggtgacgcggcgcccccgccatgggtcctgtcccccgccgcagctcccaacccgagcggcaaggatatagcccgtcgcggctgcgtccctcctgaagcaccgagccctttgcaccgggctggcgcacggtacgccctcctcccagatcagcgcggtctcgctctggaaagatgacccaggagggggaagggtgagagacctggcagaagatggccctgggtttgaaacccagactagggctctgttccgactcctcactgtgtcctagggcgctaccatgggggcaatggggcgctggagagtaagccgggcagtgcccacccaccctgcctgatccttctggggcgggaagtgtctcttgtcccgattctccgcgttttgctcagctcctcgctgtgggagatggtgcaaaacaggatcctgaggtctcctccctcctcgcaagacccgagcggcacggggggagccagggagcggtcccgggcttgtggacgtcgggaaaggaaacagaattccgctgtttttcccgctccctcgccgcccctccgcccagcgcctcctcccactttacagcggcggggtcactagaccaggcgctcctggaaagtttccctgaaagccaggggcggcaggcacgaccggactggggctcagcatgtgcagtctgagggaagccggacctggagggaatcatgcggacagctcgggatgcagctaggagctagatcccggccctttggagagtggaacctcctggcccgcggtacttgctcgacaagtcggggaagggatgaatggggaagcaggaccccggaggcaggtgcggccactgtggacagaggctgtggggaaggtgcgtgtggacacaggccggggctcagtggcttgcaagtaggcagcttcaggtgcagaatcccgagccatctgctccctgcgcacgatttcccagcgtggctatccagggagggaggaagcagagccaggtgtgcgtggagcgggagaggaatgggagactggaggcgctgtcttcacagccggggcaagcacttccagggagtctccggcctgtatcgcactggggagccctgcaggctttttcgcgtcggtctttgggagaaaggtggctgctttggaactgcggtggccaggcacagccacagtgggatcgctcctttttttacgctcagcttttttacgctactgaatgcgatctgtgaaaggtttaaaacacaggcgtgcatggacacacacacgcacacactcgcccttgtacgcacaactttctttacctcagatctgaaaagccgtttaacccacttgcagtgttgtgccagcaggtctcagaaaagctatttaatgccccccagcgctggtttttaagtcttgccaggatgggaaggtcgagtgcctttgccttgtctttctttagtcctgaaattgttcgtcgtccttcccctggtggacacatcttgggcatcaagtctgtggtatgctacagtgatggcggggaggactggtggtttaattaattatttaattatgttttctccccaaagtaaagatgcctatgtttaattctgactaaaaatactctacacttttttataccgtacccaaatggctaccagcggtcaagattgcaagaattttgtatgactttttaatgctgtgtttagtctacatggagcagttttatgatttacagtaagctttgattaaactactccaggcaccaaagttaattattaacctaaccttaaatacagtggcagaactatgtctccacctattaacctaaactatctattaaaaaataattgcactagctatttgaatttggtttacccatgcttgtttgtatggtaacttttatttgaatcttgagtaacccttactccctgttattattttggttttgggacgttcttgaatgaggcactttgcaaaccagtttaaagcagaaaagaacgaacatcaaatttaaaatcttacttttggttatgagtcatttttcaacttgatgtaaagaagcattctactttatgtttctgatgtacagtgtttgtgggtgacaaccttccccatatgttaggttttgcagctatcaccttttagagatgtgctacattttcaataacgcatataatccacatatgtaaatgttaagcagataccgaaaatcatttctgaggagccatcagctgaatatacttattggacataacaactaagcttaaataggtaaaaattttataagaaccagtatagaacactcaagtaaatgtcgaatgaatgaaataaatagtcacacatggttcatgtttgtccacttaaagtggacttctttattttccctacagtgaaaaaaaaaatatatgccttcaagtgagtggttatgataaggcggcaataagtgcacctttttatttacacacaacacacacccctcaagttcttccaaaatctagtaaatgctttttccaacattaaacacatatagcagttgtattttgagtaggcgggtaacattgcactagtgaagtctaatgtgttgaatcagaagtgtagcaagaattaggaagactgttatcttcaccaaataaaaatgaggcatccaaattaagaacttgtattaaattcaaaataagtagttatgctttaaaagtaaatgggtagttgcactcctatatgaaatggaaggaaaaatactattttgaaccaggagttaagtcagatagtttattctgtgtacattgtggttcagcgcttttcagaacaggacaaaagagtgatgatgggatgaaagtttttttagaactagattgccaagagctaatatagtctctccatcttatttgtttgcaggaaggaatcacagaacaagctaagctaattgcaaatgctttaattaagcatctgccatttgtgtaaggcaatgcctaggaaagcctatctctgcactgcccctctccacacccttctttaggtttagacaattttctgtcctcctagagtagaggagtgctccttgacatatttatatagaagctttgtgttatggcagccacatttgtgcatgttgaggaaggtgatgccttgaggcgttctgctgggccctcccatatcaggaaccccccccactctcttggggtgccttggagccaagttttctctgagatatttctatttcagcgtgaaggcttttctcatctgctttaaaatgtgctgcaagagcaactgagctattctctgctggcgaccacatggttgcctcttggggatatggtaagatagagaaaggagggaggcatttaatcccttcgaaatgggcaaatgagatgtcataccacacaaacctcaaggggaggagttcaggacaacttctcaccatgggactactgcatatagtctatacacaagggtatcttgctttgtgaaacagatgagctcttgcaaaactttattacaataattccatttacaccaatagagggtatcatataaaaccataatacacagatgattcccaaataacctcttcagcttagacctctctcctggacctcacaaataaccaatgcttagtgggtaggtagctcctcctgaatagacatctcaaacttaggtttaaaaaacctaattctgtatctttctcccccatatctgcctttctcatagtcttctccatcatagtaaatggcaactccattctttgagttgccggcccccaaatttagttctccttgaagcttctctgtcacacctacatccattgtggctgcaatgctgttggctccacctttggaatacctgcaggcttccttcaggtgttcctcctctgtggccctcaaattggccaagccatggtcctctcctgctaggttttcatgccagcttccccactagcattcctgcctctgcccatttctcaacacagcagccaaaacacagcagtgattttttttttaaactaaaccagatcagatcactactttgctcagatgttttcccatcttcttccaataaaagccaaagtccttcctatggcctttgcagccccacatgatctgcactcaggttccaacctctctgacctccaccccttgggcttgcttgaatctgtcaagcatggcatatacttggggtcctttgcaaggacttactctttcatgccttgggatggttctttccccagatagctacatgatttgcttctcatattcttcaggtctctgttcaaatgtcactttctcagtgaagccttttgatccccttatttactttactctttcccacagcactccccacctcttggcagtccttatttttttcttagcatttttcacagtctgacaaactatatgttgtccttgttgattttctgtcttccactagaacataatgccataaggatagacatttttaggctttattcactctggcacctaaagctgtgcctggcacatcatgggccatccataacaagtgtttgctgaatgaataaacagtgaatcatttttgcaaacaactagtctttattttatctattttgtctgcctttgtttttctatatcatgtttttatcaaatgagatacttcatgcatgcatgtgtgtgtgtgtacttcatgcatgaatgtgtgtgtgtgtgtgtgtgtgtgtgtacaatcttccaagcacataggtggtatggctcatgcatcattagtggaacattcactgtgttgtttttccagtggtagtgatggattggagcctgttcattcccacattctcacccagtcccctcctgtgtccaagagcacacatctgtgagacacctggttgtagctggagggagtctgagttaggtaaaatcaacttgccaagaaacagagctaagaagacagccagcatttgtggggattgagcttttgaccctggcctcatttgttctgcattctaaccactggccatagaacgttcatgtttttttggagtttgctaatagtagttttaaaattcaactttctatcaggagaatacagcatactttattaacccatgtttctgccctgtacccgtacagtatatctgctgttgaggatcctgcacttggagacaagaagacctgagttccagactctcactaccttggacaagtcacttaacttctctgtggctgcattattttaattgaaaattataaatagtaaacctattcttcctaacttataggattactgggaaaataatacgaaatcatgaatgtgaatgtatttagtgaaatattacacgcattgtggaaatttgggaagtttgatgttaaccccctctttcccactctggaccctggatataacagagatcctacttcatcttctaaattatttttggtagaatatacactgttcatgtagttttaatgtaaatcacattatgcaactaaataatatgttcaaattcattgaaattgtacagttcacctagagcatggatagcaactttattaattagaacacctaccatgtcaaggaaacattgctttcaacattatcattaaatcaggcaaggtcataggagtaccattctgccaggaattagtttaaaagtaagataattgtttttgctcagttaaattctgaaatagttcaaatcagtgtaacgattaatatgtcagggtgaaccaggactagtagaagtttccatctttgtcataacaaggccgaattcgttagatcttgtggcgtgaggttaataaatgtgaagggaccgttggagggaaggtagtggacaactctagaggcattgcggaggtcatgcttttttgacagacaatgcacgtggatttgttttgccatttaccaacagtgtgactttatgccagtttcctttctccttcagttttcatttgcaaagtgctagtatgatgataatgttatggttttgagaagaataaatgtgctaacatctgtaaaatgcatgtcacaatgccgggcacacaacaagcagtcattcaacataaggtattatttttacttgagtaacagtagttacgaaaaatgtcctaggaatggattttgaaaaagcagatagtacttttattctggggggcaggggaaatagtagaaaaggaaatggctacgaatctgtaatataaagagatgatgcaaaagaaaacaacctttggactagaaacaaacattcataccataaacaggccataatgtcatgggttttaagttgagaagcatgtgaatacatcacttgcagggaaacaggaaacagggaaactttggaatttgaaatatcacacccaaaacatggaaggaaaaaaccactatatataaaaaataataataataacaagcagagccttatatcaaataggagcccaagggatagtttttgaaaaatgatagctatcacttattaacattttaataataaaatgtacactctgcacctacatttagaatctgaaagcaactcataatgacaattttagggatgagttgaattcccaaggaccacacctgtcttaggagagaaactcggctgctgattggaacccttgaggaggttgtggctaggacttctgcaagagggtcttcaggttgggcatgcatctgccaggtcactcttccctggccaagcttgaaatcaatttgggagcaaaagcaaactactgccttccacaccaaaggtaggaaataattggctgaccccagtagagatagcagttattctgctgacagacacactactacaaaacctgaaatttgattcaaatgatagtcatacaagttcttatcagtgagaaaaatctgacttctaaaaggcacagcagaaggggaaataaattgatgttatcaccacaattccctgctaccattatgttttccaggaatgcctccatggcttagagttacagttattttcaactaggaaataaaatgttctcaaactctgtaagtggaaacagaatggaaagagtgtgagataaatcagtaattaacatgctgcaaggaccgaagtttcagatccttcttagcagccagtatggtgacttttgcttagaaagcattgttagtaatagatacttcctcatgcagcctttagacttgaagctttcttttaatattcctaggtgctttctaggaatttccaactaacctataattgtcatctgtagaacattaaattcaaagaatccatgccaattaaaaaaatttagcagaagaagctctaaagttggtgctgtttacgcctttcttagcccttctgcccctctacgcttcaaagaccagcctttggccatgatttgattagaagcatttatagaacagaacaggatctggcattaaatacaatgaaaacatgccattggaaaataaacattgttagagactacgaagaaataaagattgtattaattatgttttaatgttctatgagggttttacagacaagctgtgatagatccattcttctttccctgttcctattcctgattcgttttttaaagaaaagtattcagtcttttcattaatattgcagcgacttcagcacttccccgcccctcccccagactcctactgtccttgaatgaggaaactgagagaatactgattgagctggtgaatggaaacgttcctttcctgaaaatggaatgctttacaaaaaattgcattccacaaaaaaacactcaaaacaattcaacaactgtccctcctcctttctacccagagagccacttgatttcattcacatattttggtttttcaatgtatttgttcttaggcctaaaatacccaggtggaaaaccattctattaagcctttcactattttaaaaacatgagcatctgagtttctaagaacattctcattcctgcatagtgagcgataaatagaaaccaaattgtttgtagcattctaaactcaagtatattggcagaatggcagtggagttgatttttataagaatacttgttaatggttttcgagacggattctgtgctaattcttcttgtatcatgaatgatggccctagctagacactgtcgctgggatcttcatctgttaatcatggaggctgctttcttattcggttgccatagtttcagtgcctcacatagtgttggggtgtcttgggaaaggtttgagatatactagggcttgcaagccttgcagttattttgacagttgtgctctgaaagactgaaaaccgcttctcgtataattcagtgttggattaaaagaggcaacttctgagagtgtctccctggaccttgttatgtgcacatccagctggtatttaatccaggatttgcctcttgctcagtcttgctggcaaaaaaaataaataaataaaaatacagtacagaggctgatgtcactttcatatttcaacaagaaagcaaagggacgcaaactcttcattaagactattcacaaatgtggaggtaaatgaggccattcatgactttgcttaaaatttctgctccataatttggctttggctttgcagattactaaataaataaaatgacatcatgattgctgtgtgccgtgtgttattttggcaatggaaacatgtagagctttacttcaggtttaacctttccttttttacacttgacactcattgctaaggagctagagaccattttactgtattttgcaacaaaaggctcatacattttggactgtaggtctactgctttgtcaactcgtgaatagtatatgaacatttttcaattatttaataatttcaatattttgctatttttttttaggtttgtgactttagagttgattagagaatgttctccagtggtgtatatattgtgtgacttggtcaagaaaggatttggggagtaaattgctgtaagagggtgatacacatacacacattctggcgatttatgtgcttcacgtgtgatgcagaacacagcttgcttctggttggcaaatttggccttgtgcaacggatagtggtacacttcatgtttcagtttccatttctcaagtggactttcaaggactcctaccagtctaagccaagcaatttaattcctttgtagattaaaacataaaataatctcacactggaagcaaacagtgttgaattcaagacatgcaaagcataagtgaaaatctaggctgatttagaagaagaaactttgaattccttacaaatgggactaatctagaaaatcagtcatttttttcctttttactagaaaatgactagtttttatttcagaatgagcttcaaggcagcgttttaaatttctccagatccagcctgccaacatttttgtgtaagatcaacaagcatttttaatgcacgtgcctattttgttgacccatccgttacccaaccacattaaaggattgattttagaggccaataatgtgaagtaaattaaaaggataacatggccttaattgctactggtttcaccgggcttctaggcaccggaatttcttgtggagaaacactttaagtgtcacagcagtttttgatcatgtggtctggctcacccagaggcttcaattatctcccagcccttctccacctcccctcagatatctctgagaagcaaagaaaatgtgcatttgtaaattcagtattatggacccctgattatttggcagggtaagaaaataggttctgttcattttacagtattcgcataggctagatgtttaaacaacaacaaaagacatggaatggaggagaacagtgggagtaagatcaaagcttttttcattaaaaagaattttgttgaattgagttcattctctcaaatgataacaagattgtgattactcttgggtgtcgggttagacacaacattgcacacgtagcttaagaaaagtaaaaagtactttttgtgtagatgtcagtcaaatacaatgtggactttaattaaccttaattaatgatttctgattacagattttcttttgtgtgccttggaggctgtatttaggtagagtattttcagccagtagtgacatgaacttgcttcctttgtcttgccatgcaaaccacactagattctcattacaaggaaaaatgtgattctgcatcatttcagaatggtcatacaaagaatgaaatatcacttggggaacaactgaaatttgtaagtggtgtggagtatttgaatcttcagaggaaccattcctaattttaaaggaatttacctatcaaaattgctgatatttactggcttctggctggattcgaggccattccttccaaagattgaatgggattttgagtggtgccccagttctttcaaataaaagcatactgcagaagtgctggacctagcagcatttcctttgcccaagtgtaccctttataaagtactaaacatagcaactagggaatattgtagacactgtagagaattgggcctttgtttttcatgaagggaatttattaacaaaatattttgaggagtcttgtcttgttcacagatggcgaccacggcgaccccccttcctgcgggtgctgtcagagaggatgggggggacgtcctctatccaccccatcttcatacccgagggggcaagggctcgagggccgactgggccccaggtccaggagtctttgtcctatttcctcctgtggcccggtgtttgatgtgtaaggcagtaatacccagttccttgcacctctgagccatatcctgggcagccaacatagcagcatatggcaaagattcatctcggtctgccttcaccttcatcccaccagtcacacggcagagggtttctttgccagaaagatcagtgacatggacaaaagtgtcattgaagggtgcaacgatatggcggacaccaaatatgttttctccgtcagccacctgaggtcagaggctgatgacctgttcttccttttccttcccctttcgaggtgccatttctgcacgttgtctccagactccacaccggaaagagtgggccttatttttgattaaaagtactttttcctgtgtcatgagttttagaacaaatatcaaaaacctgaattaggatgttaatgtgctatttacattcaacttttaactagagggtctgataaaggttagatatgatatattaatgccaatttatgaattatatttctctgtgaacaattattttgtagcttatacaaaaccctaatagcatataacccatctagtttagtgtaattatgcttatgaattataaatgcttagcttttacaattagacttactgatctgtaggcaccttaatgagaaattactgaaattaaattgattcgtaatatttgatgtactgtgttccagggtagtggttgtctaaaataatttttagagtatgtgtctgactgcatagcagtatggctttatttttaatagaaaaaagtcctccctgttgcatgatcccacctttgtccaaggaggagatgtcaaaagttagaaagagcagagtagattcacatgtagccaagagaaaaggtaacacatcttttggatactttttttttttaaattataaagggatgttcagagtacagggaaaggtttctattaaaaagtcaacttttatctacaaggtgtttcctctcagttgtgatgaggggaagttcaacatgttgaatatgctggttaattaattctccagggatatctccgagggtgatgctttcgttttcatattttgttgtgtcaaaaacacaaaacctgttaatattgcccaaacacatccgttcccaagaattaaaaggacaatgtaattgcctttgctgctagaaaacagctacatccagttctctagcagatcttccaacatgccaggtgtgcaagacaagcctttgaaatgttgtgaataacttgacattatcacattgttattgaaatgcaaattctgcgtagaacatgaaagagttttaaatgtacgaataggacaatgcatgtcatcaaccatacctagtcttaacttgcttgttctgtggaaagtaaccataatgtatttgcatcttttattgtttttccttggccatgtttaaagtgctcaacacaccttcctgggtggcaccttgttggggagagaatagattggctcccagctttgaggtgtttagatagggctgttttgcccagtaaggagataacgtttccccaaatgagtcttgctgagttctacattagaattagaagtcagcttactgactgtatttaatggtgttattattaataataaagactatttatatagtgcttgtatttttcaaaatgtgtttataaacattgccttatttcatcttatcacaaccctctaggttaggcaggataggtattattatgcccaatttaaagatgagataacaggttcaaagaggtcaagtaatttgcctaagagcacacctctggtaagggaagggtgtggacaaggtcccaaaccatatgaatctgagttttgtgctcctccatatagctgtgttgtgtactcaatatttaaaattaaaaaaatattaaaattgtccaatcatagttctcacatttttcctattacatagaagtgagtcctgacatagaacaagtttagaagtagctttttgaggatttcgtctgaggctttagtgcaactgggacctaaattcctacttctcagtgaaataccattgctaggaggggacactcactgtctctggaggttcttagagtgtcttgagtcaaaatcaccctaagaaatatcaaatggcaaatggtaggtgattttatttgggattctagtcctattttatggtcgggataaaaataaatagttacataagggtggcagttttgaccctggcgcagggtagaactggagggacagaaggttgaattagatactctgtcaggaatatcctcctggggcttgcaactcttacctataaaacagaaacacgtttttagcaaggaatgaaatagactgcatggcacaacctaagtggatcttccctctgacaaaagtcattgtactctggttcaggctactagatctagtgaaagcagcagttcaatttaattcaatagataatttatttagcacctactcttggcaaggaaaagttctacacactgcagagatgcagcgatgaactagttcagaatttactggctgtgtacctactgtcggcccacatttcagtgaagaaggtagagatgtgaaaagtctttctagtctaaggcctgactattctctgtcccaaatgcagaatgcagaagatgctaagaaggccaaaagtggctctgtccagctgggaggtcaggctgggctccattgaaggaggaagcatttcaattgcggagtgaggtctccgtatttgggaggcaagggggaggaggagcagtggggtgaagggaaaagcaggagcaaagcccagaggtggggaatgtaggacttggccccagaacagcaaggggcctcctggtgactgacgcacagggacaaggtgatgtggtgaagccctgaagacagaggaggcattgaggcagcttgtggagggctctgcccagggtgctgcaggtggctgaagcttttcagcaagaggatgatgtcaccagatccgtgttttagaagtataaatctgctaggactgtgagttgaaaaaggaaacagattctgggtatgttggcatggtacagccaacaggatttgaggccagttggatgtgtggggtaagggaggggaaggagtaaaaaatggttccaaggtatcacctctggggagctgagtggatggttgtggcattggccaggacaggaacccaggtttacagacaaaatatttaattaactgctgtcataaaccgtatttaagtgacacataataagcaaaacaccaaagtccaacacctagttgcaaggctcttgtattggtccgaaccccgagagcgcaccaacaaacaacacaaggcggtgtggagtaacgcgctgttgtaatgagcccaggcgggctgaggcctaaaacggcgtcagccccaagtgcggatggggcaggggttttatagtcttctgtaaacaggaagtgtcccagtctgactgtaactgctacgtggtaccctgacggcccctctcaatctccagggggtacctgtcttccggccagctgtcttcctgcttctgctatctgggcgacgcaccaggccttgcggactgggcctgaggagggaggagttattcatccccccaagcttccaggctgggggagagaatctttcactagtcctattgtgctcaccctcagctcttcacaaagactgctgaaatttttgagtatgtttaaactgtagcatttggtcttgcagttgggaccactcttcaactttagggaggttcataccataatatgaggtggctaataggaggaagacggaagcacattcattgcatctataaaaaccactgttaaaaatgggcaggaggaccaagcgctaaatgatctgttcatgtaaaaatcggggcatatatggagccacctagttcctgtttatttcattccaaacaattttactttatgaaagtttttaaattctgaaattagatatacatgtgttctccctctccccccggctcaatgttgggcatatttatatgagtgtttgtctcttaaattgccatgtgcaactgaggtgttgcagacgatgtaattcacaaaacaaataacgcttaaattgtgttgtttttatactatttaaaagaatccttggccgggcgcggtggctcacgcctgtaatcccagcactttgggaggccgaggcgggtggatcatgaggtcaggagatcgagaccatcctggctaacaaggtgaaaccccgtctctactaaaaatacaaaaaattagccgggcgcggtggcgggcgcctgtagtcccagctactcgggaggctgaggcaggagaatggcgtgaacccgggaagcggagcttgcagtgagccgagattgcgccactgcagtccgcagtccggcctgggcgacagagcgagactccgtctcaaaaaaaaaaaaaaaaaaaaaaaaagaatccttaaatgatgggtattctctaaagcatgcggggcttaaaacctagatgatggattgataggtgcagcaaaccaccgtggcacatatatacctatgtaacaaacctgcacattcagcacatgtatcccaagacttaaagtaaaagtaaaaattaaaaaagatgggtattctatatttatctttcatgttacatttttctttgtggggtttctaaataaaacttgtaacatgaatgttttattctcattctgtattttaaaaagaagctgagtaacaaaaggaaaacaaaacaggattggaaaatcaactattttcagggggctttaacaaactgaatatctagaaaggttctagagaacctttatgaaactgtttgtttggatgtcttattttaaaggcatattagaagtaaacattaaggaacgatttgatttttaaaaaatgttgggacaccatatttgagttggtatcataatgccgagaaaccaaattatagattatttatctattacgtgccacattattgcatagttgtgctatcgcttgtttctaactttacttggaggctgccctctagtgttactgaatctcagcacaaccacttttgtttagatccccggaaaggtgacaaaacacacagaatgctaccatctagtcagcagctagagtgttaagtttatgatacatagtttgaaagattttgaataaattaaaatgtgcacatcaccagtgctcttgatggcatagaagacagcactggaaaaaacacacaccaatgactgaattgaagccatatccggaataccaagtctaacacaggttttaggactaccttaaccaattaacttcacttttattttctattttgtatgtgcaaaaaagctacatgtgataaaataagctctctctaaataaggctataagaacttctttagtttaaataaaaattataagtattaagaaaagcactttgcgaggccaaagcaggccaatggcttgaggccgggagtttgagacaagcctgggcaacatggcaaaaccccgtctctactaaaaatacaaaaattagccaggagtggtgtctcatgcctgtaatcccagctacttgggagactgaggcacgagaatcgcttgagcccaggaggtggagattggaccactgcactgcagcctgggagacagaatgagactctgtctcaaaaaacaaaaagaaaagtatttcaaccaccattgggtgggatgtgtttgaccagacagcctcaaaatttatgatataattagtcctcagagaagagttctcaaacttcaacacatttttctattacaaaccttcaaagagtagatccaagcactttaaagattattctctaaagatattaagaagagaagcacaccctacaacctaaatggtggtgttaagtacttttctcacagtagtgccaactctgctttttcttggatgaagaataagcatactccagagtctgcagaaagtggggagagtaaatttcagacacagtagctattttttgcatgtataatgatggcattctcagtggattatgaaggtaacgttgcaacactccaagtacatccagcttacagcagcagagtgactgacatgttttctataaaaatggttactggtaacagtggttttccaaagttctgaaactcagatcaggaagaacaactaaaatcatattagcgctacacacacacaaaatgaagctgaacaccaaaatgacacttggaagtcagcttttcttctagaggggtgttatgatagagtagttaaaagtatgggctctggaggttgctattctattggctgtgagatcttgggaacattacttaacatctctgtgcctcatattcatcatctgtaaaggggaaatactaatggtaccttcctcataaagggagtctgatgattaaatgaaacaatatgcaccagaatgatgtctggtacataaacactcaataaaaattagctattaatatttgacaccaaaccctcctaatataatgagctaaattcaatgtttttgtcaccagcaggatatgggttcttgacaagtaaaactaaaaagatgatgaggagatgatagtgtccagatgaatctttctgccagtttctgtctctttatgttcttttgtgtgtcagagcatggtttaaaataactaagtaagtaatcattatttcattttatgtaggaaatatagtacatgcctactatgtgcagagtgctaaattagatcttattggatatttctaaaatattaaataaggcattaggagttaggtgactatgttttgctacagttgttatttgcctttgttgggtccagtgcccagttaggagcctatgtttatcaggcccatggtgccttgagctatagccttcctgtcttctgttctcagaggaagaaactccgaggtcataatatcaagtatttcctcactgggtgagttttctgaatgcagtgtttagattgtaggtaatgtagattgtgtatttggaaacacaatactcagggattttcactaacaaagagggcccaaagatctctgtcaattaattagattttttaaaaatatgtatttatcttttagagactggtctcctgttgcccaagctgaagtgtagtagcatggcatgatcatagcttactgcagcctcgagctcctgggctcaagtgatcctcctgagtagctgggattacaggtgcacaccgagcctggataatttttacaattttttttttttgagggggggtcttgccatgttgctcaggctactccagaactcctggcttcaaatggtcctcctgcctcagcctcccaagtagctaggattacaggcatgagccactgcacctggctctgttaacttaatgtctgactcaaaaccaatgtatagatacaaacaagtttattttatataataaaactttgttatatgtggcattaactactcgtaccaataaactgaattttcagattgagtcatggggtttaaacacttgtctttcacaaaaccaaacagctgaactgctaaacagcaaagtggatagattggaaagtaaacccctattctgagcctgccttcacccctacttcactgaggtgtaatgaggagatagaaaagaagttgggtgagtcaagaagagaaacaagggctgatcattagctctcaagcaaacaagagttaattttggctttatccattctagtttactcaggtgggcacagcctgattcacaaaaataaggaacttgttggtcaggggttagggaatgtgctaacaaaagcttggagactgggtgtctctggagctggataatgggaactggggcccctccttcccggtggcagagaggattgtgttcatttggtatttacccaaagtcagaaccatctgacagctgtttggtgtttcttgtgaaatggacttggaccctgaccagatgctagtggacagatgttcacaacacaaaaggcttcatcaaaataggcactaattggcaccctcctgacaatctcaacaaataaggcaggaatgggctgtatctgctgttgaccatctcaacgcccaagcctgcctttcctggcttagggaggaggccctgttggggaactgagctttctccatagccagagatttttggttccagggcttcttgacatgaaactcccaaaaggtactgaatatttgttttatatgtatatatgcttgtatgtatatacttaattgaaaccttttaagaaggtaggccaaggaaggatcatttggacttcaccacccacctctcaccaaagcaagtcttaaaatgcagaattttctccacaaagttggtttctatgcagtagtttttgaacaaatactttatacaaattgttacgtattatcttaatatgaacccctccaaataaatgtgtgtattttattttatctgtgatgtagttttgtgcaaatatttttgctagatggattttaaaaacctaaagctgttttaaagtggatatttcaggggcaaactggtttgactatgccccataaatcattagatagggcttgctcctacttgtacaggatacaattaagtttgatttcaacagttcaactgtctttttagtgctagagacactttttgagtaagcattctctcctctttttttcctctgaattttgcaagttgggaacaaactctaactcctggcttattattaatactattggaatctgttcccatctatgtgccggcaaataataattctttctaaggcaggatgtagttttacaatgcatggtttaaaacacttttactgatgttactgtttattactgtttattacagtagaaagccctttcctactatagggctctctgtggccctcctcctatcattacctattgaagtctcctttttcccactcctctccaggaatacagatttaagaacgatccatgctccactacagatatttccaaaacacaattggtattaacccaggctggacacattttatcagtcatttctataattacttattttaaaaaatggtatacatggttgctgtatcgtatggagtgtgagaagctatcttatcatggtactattcatcctggttgaaaggatgttggttttttcccccctaacatctcactctcaggatttctctggaccaggaatccaccccctctttcccattctctagtgtggctcctgctcctttgaatgaaaggctgctctgactaaaggagctagaatatgcccagcaaccaaggccgggtactattgagtccattgtttgctcccagcactgtggagccaaatctcattttatagcacagtgtgttctaggaattccacttcatcagtacaacagaccttctctaatgccttcctattttccccatttgctgctgtcacaggcagcgccacacagtcctgtggcaggcaattataattcacttttctccaaggctctgctctcccccttttgcaagggaccacaaggcatcagctgccatattaaatagacgctaatgacaccaagtgtgagccgccagagctgtggttgtgatggtgtgtttaagatttaatccctttgagggactgaacctggagttcagaggtggtttcactgaggtttataagaaatttggctaagattatacttaatggattttcaagtactgaaaggtatttgtgtttaaagtgaatatgttaataaaactttccaaacacagtcacaaaaaatagatctgatacaaaattatgtaacgtattattcaaagtaatatagttgtctaataataatatattgtatgtgcatatgtgctgtatgtactcattttccctctatagttttctaagcggtttgcttttttctaaatggagaagtgtcctttggtgactcacaaagattcacaatgagcgaatgctccctagagcagggccaactcctcttgggcccttgtcttgctagaagatgcttttctcctggagacaggatcgccatcattagtaacttatccctacacccaatccacaaaagattttactctttaaaattttccagcatattttggcaatggtggaatgacaacgtattcatttttgtcccatctggcaacattttggcacctcttatgaaattattttctattggatttgtaaaagtgccccattagtaacacttcctgtaagtgtaaataggcttttccatagctgtcccttcaccgaaatagatcggttttgaaccttcctgccagtacagaggatgtggcctgatgctccctcacaagacggtggctgtctcaccttcatactgcccgggccgcttaactaaattgctccatggccttgtgtagctatgctgaaggatggagaagagcgtccctttaatgaacccggagtatttcatttattagcaaatcatcagttgacccagaaagtggccaggtaattagtgtaaagttttgcagagcttttttatatgcaccatctcatttcattcccatagacctctgtggcacctgcctttaccctggcttggaaaaatagaacttctccccttgactaaaaagacttagtctgtgtaaagttatgtgttttatcactttacccaaatattgttctttgtaattttcaacttaacacgctaaaacatactgaaaaaaaatgattgactacaaaatccttttttaaaggaaatgtgtacatcagaggaagcgttaggccgtaaatagtgttattttagacactctaggacattttaaagagcaagaacaagcctatagctcaccttgcagtgctctccaggttaatcagtgattctttgactggtgtcagggacatttggtgggtagtgattggcatgcctgtattttcctttgtcaccatttcttcaggttcatgtagaaaactgcagtcagaatctacagacaagatcctgtgactggttctcaggagaatccttgtgacaaacatctggcagatatgttttaaagtcctacgatagctgtcagaaagttgatggctcctgatacgttacattgtcagtccagacacactaattctttagtgggattattgatgttgttgtagcacatctgtgtttaattgcagacaggaagctgaaagagaaagcttgttgtgattacgacctctgagatacctattatatctgaacttaacaatcaggtcaaaacttagtggtgggtgggaatgaaaagatgtccgcaaatgaaactatgtgcatgggagaagagactgcatgtcactgacctgcagagaagccagtgcctgggttcaaatccatcactctctagctgtgtgacatcaggcaagctccttaacctccttgggcctcagtttcctcctttgtaagatggagtagtaatagcatctgccttatagggttgctgtgaggattaaattagtccatatgtatacattcccttgagttcccattacatcataagcactagataagtgtttcctatttttatatttccccccaaatcttctgctttgtaaaggtaaatcttctgctgatagaggatgagctgcaaagagaatgtgtgtgtgtgtgtgtgtgtgtgtgtgtgtgtgtatgctaagactatcatgcagaattgattctacacttgtaacacgggcatatttggctgttattgcctacgttatccattttgacacctcccctactctcaaagcccctgcatgtcactcgcttcctctgcttttccccttcagattatttcacccatgttctatttggtcatgacctgtatgtgtacctcatctaagtgatgctttatgaattccataaagccactcatctttgaggtctccaagaacagagactattccctaatgatccttttgtgcagtgttagttgttaaatgtgctaacggatgccagcgtttgaaaatggtgctgatccatgacctcttctgacaatgttagattcctatccttcagagtgagaattttaggcatgaggctgcttgaggtactgggttgcccaagacaaacctgatctccagggctgaagtatgggcatctatgaatcaatgcccatcaggtgattgtgatgatcagtcaatattggcagcctctgatttaattaatcatcctgagaataatgttccttatgtgtaagattattagaaagccaagttttctctcagagttttggtgcagatcaaatgatgtcctgtttttacaaagcctgaagcccaggtaaacctaaagcactgttattactgttattactgcagagaacctgtgtgctgtggaaggtccccaggctacagggtgcagagatgtccactgggcacatgctgacagatccttcaaaaaatggtacttaaagaagattagatcaacatttctgagaaaagcatctcttttgccttctcattggttcagtaaacccagttaaaggcaaagtttccagccctcagagcctgccatgggattcctgtatcattagatattgttaacattagcacttttggagtattatttcacagacatggtttcaatgttcagaaccaaaaggtggagaaatggtgtcagataaccttagagaggatcattttcttggtaatctctcctttcttaaaataaactagatattgctgacaatgtgaaatttgtgactaaccttcagtagatatgttgattttgcttttaaaataaaaaccaaggatgcttagaagtagccataagaggaaatattttgaaaatgaatgacctaaagtaatcaatggatatgtataacatttatattttaaaatgacaatgactgtgatttaaagtgcctctaaaaaaattaactctttaaccatcagtccctttccactcaaatcctaaagcaatgcagtttcatattttctgcttgtacaaggttaggatccatcactgactcaaacatgatcatttagacgaccatttagaaggcccaagagcaatgtaactggcatttctgggtcacagctaattgaatggaatgtgtgccgtgaccgatcgtacaggtagcacttgggcaaagaggtgtttgtgaaagtgcataagtatcgtttgtgtgttctgactattgtttgtatactactaaatgctctgaaaagtgttataatttgtacatagtatgaatgatttggtggagggaaactcccttgtgaattttgtataaagagtatactgcattcctgttgtcaccagaaaagtactgatatggcacattctgttaacagtaattggatatgtatgccttgttagaagagaagagggtaatttcccacttattataaataaaattattcttatttcatgtcttctgtttccacctgtttatattttgttttgtctgggcaatgttggtggagatgaaaagaaaattagcctcctaacctgcagtcagaggatagacaaccatgggtccctggggttttagcttgagctacctccataccagctccccattcttgtttccccttccaaatccatgagggctttatggtagtctggtcttctccaggagataagcatgatcaagatcctcctgcttctaatctctcctctccaggcttcagtgcttctgttctagtgccgagctctccatacgctatgggagggtatggaatgggggaacttattccattatgaatgctcacctctctgactccaagagaaatttttatttctagattcaggccctcaaatggtagaggcttataaagacttgtaaagtatgcttttagtaggtccctggcgatattaagggaatttagcatgtgatgttttttccatctaggttttaagagatgatttatcaggtccattttgttgtttgcttacagtgatttttatttgtatttttcgttgattcatcagagagcctgaaaagtgcttatttggtctttccatcagctagcactgagaacctttaaatcagtggtttagagtactctatctacaagatcatgctttacttgttgtatacttctttctagaagtagaaattgcagatagagaaggccaggcctgtcctattattcttttagtttccaaggcagcattcatttaagcatagcgtttaaaatgatattggataatgccattggataaaactcttttgcagaacagaactgtgcaaagcaatactgttttaaggtgaattgaagccatccaggcagagagaataaggttgtcttcttatctcttctgttgacttggtctaatctgtgggcagttgttccttggcctcaattttcccattggaaaggggatttttggaaacatatcttaaaactcttgagctgaagaagctatatcaatgaaaaatgtgttgtttaaacacaacaataacttttccgtggtatgcagcattatatttatacaccataagttgagaaaagccttgaaagtaacacaaataccatgaagcctgttttataattcctgactcccagaaaccctgagatgtattcacagcctgtagtcaccctccagaacccaagcaggaccttggaacttcactccatataccactccaaagcaagttttctgctccagtgtgatgagaaatgtgatgttcactgaaatgcaccgtgagtctggagaactactgttcagccaccttgggcatggcatctaaatgtacagtatcgagagtgtgatagccttccctggaaacaagaactaaggtccataaatcaaatctcaagtcaagagaagaaagccgtcaaggaaggcgaaggcattataactggcctgtagtgtccagctgtattgataccacagagctttggagccaattcaagactggtcaaccccaaagtgggaaattaagtttcagggctgccagacatccctgtttgcagatgtaaatgtaagtgataggataggtggtcttcaaaataaccatgctaccatgaaggtcagagtccccagcacaaatgtgaggccggggataaggttcagcacttttggagatggcattaatttgtagcccctaaaagcactttagctcctctcaaagtgtagcttacatattgcaaggatctgagtataatataccttaattaacagtgctgatcatgttccttccttatttgcagaacactttacattcacgggtgttgactcaggggatcatttggctttttttttttttttttttttttttaagtatcagatacatagcagtttacatcattggattttatcccctggtttagatccaaagacattattggccagtcttaatgcttgcttgttagtaatactgttatgaaataaaagcttctgttgcagaagcttccttaatagataaaacaaaggcctttaaccagtacgttacttagagaatattaatgaaatagttaaaaaatgaggggaaaatgatgaatgctttaaaaatactggccttttcaccttaataatgtgtcagaaccacttattttctacaacacatgtctcaaatttgctggcatttcaaattcttaggagttaattttctatgtttgaatctttaaaaagaaacatacaaatgtaggatgaatacattcagagggtttagtgcatgctttggctagcaattcaataaagatgacttggaaggatcaaagcaaagatttccataaaattgaatatgagatatttcagcaacatcaatgctatacctcttcaggacacttgtatgcatgtccacagtactacctagcatttacttaatgccactagaacaaaaaagataaattttgttgaggctaatagatttttaaaaaattgttttaaagtccttttagagtaccaggaaaatctgactcaaaggcaaacagcaaacagaaatgacttaatggaaatcagacaataagcctaaggaaaaaaaatagggttggaacctaaaataaattcaatatataacacctttccattttgttccctttcctttttgtttttcatgagaatctatatggaaaagtcagttgattgcttatcaggctgaagcctgtgtttgctcagactagcgataatgagcaataaaaaggtggtaatggttaaagtgagaggagagggaatcagggaaaatgggtgggctcagtatagtttgcaggctctgagttttggaagccctgtaattctcccttgtgctgttatgttcattggaggggagttaagatcaggatctgtaatgagtgtgggggctttccaggcagtggtctgatggctgcacaaaagaactcccagtgattacctagttacatccctacagtcagcttggcaagtaatcttaaagccttgctcctgaaccagcagcatgagcatcacccaaaagcttattagaaatgtagatgctcaggcctgataccagagtgcctggatatgaatctgcattttaacaagatcttcaggtgattggcatacacattcatatttgagagacactgactgaaggaacacatggacacaagatgtgaggacacatacagtgtggggtgcagtagtagggttatcctaggaaaagaaggagcagactttttagctagtgagctaactcattataggcatgtacagatgtttgttagtagtttatctttcaagttgtaaagcaatcagagtgtctcagggaagtcattacatggacctttacaagcctgtgactctgagcttgtgactctgtgtcataggaagccagtacttgcgtaagagccccaaggccatgtgggcaaatggagctgagataagaaagcctgataatatgaagagtgatcctaatctcagtggcctttgggattatggttatcaccaggttttagagctttgactctggtaaacaaagattctgcccttggtttccaacacatacttattattgaaatgatttattattttactgaagcatcttgtttccaaaatgaaccaccttagcctcctgaaatagctctactgtgtcccttgactttaaaaggcaaatgaggacttatgccattaaccctgcagagttatgatgaatggcagaactagatagggccatgaagatggcaggataaaaagatgcctgtcttcggagcacctcttttgaatggcatctccaagtcttcatccaaagactagattggttcttgtctccattttcccatttggagctgccatttttccatagcagccaagcccactaggtggtattagaaatgtcaaatgcttgttccctggtgccacaaagaaatagcacttgaacattaattttctcagtaaggcaatttttactttctgcagaaagggtgctcctcgcagatggaacacggccagagcacacctgaacaaaggagggaagcaattttttttttaagatgaagtttcgctcttgtcccccaggctggagtgcaatggcgcaatctcggctcactacaacctccacctcccaggttcaagcaattctcctgactcagcctcccaagtagctgggattacaggtgcctgccaccacgcctgggtaatttttgtatttttagtagagacgggatttgaccatgttggccaggcttgtctcgaactcctgacctcaggtgatccgcccacctcagcctcccaaagtgctgggattacaggcatgacccacgtgcctggccgagggaagcaatttttatcccttacgcagcttgtccctgctactgtgtcctgtctccattggctggagccagaccgcacaatctaagctaaacccgactggctatttcaaagagagcagggatatgagccagagtggtggggtgagtagtttggcaggaaggacagttaggaacaggtaactaagggtgacttaggtcagagcaggtgactaggatgagtcaggatggagcaggtgaccagaggtgactcaggtcaaagctggtgttggggaagagtcaggatggagcaggtgaccaggggaacagatgtgagctagtgattaggactggaaggaaagttgtttactgaaactagaagcaagaaggcaaagagaaccaggaagttaaactttaaatggagaatcaaagaataagacagctgaacatactgacatattgattctttgaagagaagcttggggttcactatatttaacagtggtatgtaaataaactgttttccccctggcatagttgcctctatcagtggagggtgaggctgcagataaatcctctgccacttcaccttttatgccaaagtctaaaggcaataaataccaagttagagaaacattgactagaaatggtgatatcacagtaatcacaaatctgttcttgtccttgcaactttttgacataatgatctcagttggccaggtacaatggctcatgcctgtaatcccagcactttggtaagctgagacgggaggatcacttgagcccaggaacttgagaccagcctaggcaacataatgagacccccatctctaaaaaaaaaaaatattcaaaaatttcgctgggcatggtggcacatgcctgtcatctcagctactcgggaggctgaggtgggaggattgcttgagcccaggatgtcgaggctgcagtgaaccatgatcatgctatactacactctagtctaggtgacagagtaagaccatgtctccaaaacaaacaaacaaacaaaaaacctcaatcctgtgtggcagatgggagacctcaggagacctctgtaaactgcatccatgccgtagaccccgcatccaagcagtgctgcatccaccagccttaggaaagtggatcagaaaggaaatgtctcagtgatcctagacactaactttgacaaggaaagaccacccatagtggaagtggttggaaggtgagccttcaaattcaagtaccccagttatttcattaggggccaaagagaattcttttttcctattttctactagggtgcatttaatctgtattagtaatgccacagagaacatttactgtcatataagcaaagaccttgcaaatgtattttaacagcagttcagaagactaaagaacttaacagagaagtagagaagagagagcctgcaaagtctactgtaaaagtaaaacgtgctagttttggcatcaatttaaccacattggagacttggtcaggagcactgaggcttgaccacattatccaaacacatctgcttgccttatcatattgtcccatttacttttctttttcttctgccagcacaaacttgtgtcagcatgtggaagtggtatttctgctacctaatctgtgttaaaacagccctgaagggtcatgcaactagtcggattgtaaacctttggagaagattaaacagtcatcatgtattaatcagtcttgaccacgttgtgaattaaaaggtgaaattcttggccttattctaaaagatgacaggtctagatgttagagataagcattgtttttatattagtcagtatttctatgtagccagttatgtttccagagtagtgagaattattctaagaagaaaaaagtattttcagtataaactaaacaagagaaaaatggaagtttaatacacatctgcagtgaacatgaacataggaaaacgtgaaaacgtgagcatagtgaagtttgaagtgggagagaaccttttctgaactgggttgctttgctcacaggccaggtaggagagagcaggggaggaggttttactggacccaagcgccttgtaagaattttccaaaaacattaagtaaaatttagttagttgtgaagtagaaagttagcacttctatgtcttcaaggaatccggttatagtcataacacagaaaaaccaatcatccctcccatagtagttgaaagataaaattgacatcttcttgaaagagaaaagctactattttatgagcttagaagaaaaaaaattcttcaactttatgatatgctatttgagctctgtgagtattcaaatatatgtacttacagaatctcagtgttgcaaatggaaaataatgatgctgtcttcaaaatgaccccccaaaaaaaatcagagaaagggttcaagtgctgctgaagtagcagcctctggaattaaaggaagtgattgccaggccggggaagtgaagcaaacagaatagtcctgaacagaagacagccgctgccctcacttccttatgcactgtgctgttcagcccaggcacttactgtttctctaagtgtgatgcagaaactagcttgaccagggtttaagataatggtaaccctcacaggttttgcggtgctccactttctgcaaatgatcaaacttcactgtcaaagaaatccagattctcttagaatcctagcagagtgtgatatttgacttttttgggtttctaaattttgttttcatttctttgatgcagtagatgtatggcccatggtgcttttaaattctctgcagtctaaagtaaatgacagggaagaaaacaaatattctctggaccccattaatgaaagacaaagggacagcgagggtcctttagaaaagggtattaaaaatgatatatgcctgtaaaaggtcggggagggatctcatgggaagaaataaagtgcaatagagtaatgaagaagaaaaacggtaatgctgaatgtcctttaaaagatactttatttttcaaagaagtgtccagaattctaacttatataaacactagaatattgatcagttatggtagcagactttggtgcacaattctcagactgacacatgatttggttagcaggtaacagctgtaaaggatgtaagaaataattatctgagattccctatgcaaagtcttaaaaaaaattctacaccaatttctgtatctcaaatgaagagggcatacaaagagacaaaatgcctgatggttccccaggatactgtcccagcagcagggacagagtccttagataacatggagaagaaaatgaatgggcactaccaatgtatttgccaagatatgacatgtgcttctgcacatgagacttcataactggataaataaagcatcttaaagaacttacgttctttttcttccctagatacccattcatgtgtaaaatgttaccgagttcacgctattttttgtttgtttgtttgtttgtttgttttgagatggagtcccattctgtcgcccaggctggagtgcagtggcgtgatctcagctcactgcaacctccacctcccaggttcaaatgattctcctgcctcagcctcctgagtagctgggattacaggtgcacgccaccacgcccagctaatttttgtatctttagtagagatggggttgcgccatgttggccaggctggtctcgatctcctgacctcaggtgatcagctcacctcagcttcccaaagtgctgggattacaggtgtgagccactgcacccggcctgctctaactattaattagtctttgaacttgtaatgacaataatgcgaacttagtactgacagaatgaacttgtgtgagtgacctcttagtataggaacatgtacagtgtttaacactttattatgtcatgttagtatgtggttgcttcctttcagaacattgctttcaagtgttattgaatgttagtaaacatgaaaaaaataaataagaattttggtgattcttacccctcttacctctagggtttctgaaaactgacacagtaggtttagataaagatgtgtggtgttaatttgaatctgccatactttgaatttagaatgcactggacacgttgatatcaccaattagcattctgtgtagccaggctagcatgtgattcaactgttgtgtttaccctccaccccaacacccatcaccgctgatctacatgaatgttatcaagcatttgcagcctgaaaaagacatgatgtagatttgactcctgtagtttcttccaaatagtatcaagtgcggcagaacaatatcccccgtaagtcacttacattgtcatcttaatattatcatgattgtgaattctgttgtcttgagatggatcgagaactttgacatcagttcagtattgctaatggaatatattatttacacaagactttttcctgtctgcattcagccatgtagaaatatactaccatcttaagtgccagaagatgctgatccgaagtagaagttgttggcaggtattggtgccagttagatgagaataaactgccaaggaagacactggagtgaaaaaagatagtttgggccaagtttttttccctctctctctcactcttgaaataggtatctaacatgcatatacacaacatcagtctataggaaatatgagggatgcttgattacaagcaaacagggacatgtggggccaaactctgcccccagcccctatcttgccatatatgtttctagtagagatgaaagtgacatgtgggaatgatggggggattcatgtcttctagacttcacagtatgaaagggaccaggccttcccaggaggaatggccagaaactgaagctatagccagaaatcaagggatcttttgtgaacacctaaagcaggagtttatccagggatagagatctccaaatggtggaagcaacatacaggcaggggacagaaaacagcctccatgctgtgcaagcataagtttgtactgatggcagagcctagtttggtttgcatttaccgtaatttttactcatctacttttaaagtggtatttgaagtgattgtgaatcaaaggcatgataatgcatacttttcccaatttaaaatatactgttttatatatgtaactacatgccttgaaaataatgagtatttgaatcctatcacattttttggaaaaaatatcagactgagcatataaagatcaatcttttacataaccaaccagtggaagaaaaggggttttgtaaaacgtatgcagtttagcgcaagaaaataagaaaaaaagaacttgcaatgaaaggaaaacgaacagaaaatagtgagatgagaaaattcccaagtacatttactcaataaactaaaactttactttaaccagacaaaagcaaaatgcattctatatctcctgtgagtttaagatacactgggaagaaaaattggcatgactcatgacttaaataattaaaattttatataaaaaccaagaggttaacaaaaagttcaggccagaagtaaaataataattaaatgtaaagtatctgaactgcaaaaatcctgaaaaataatttccaccactgatggaaatggttttaaccattctagtggtgaagatcaagttgttgaaggaaatccatcagttattatgtatattttagtgtgatttgaaggggattacaggagtaaaattaaagaaagtacacacacacacacacacacacacacacgcacagaattattaaaatgtattgcactgaaggacaagttaaccatactagaatctagggagccatttctcaggagtacaacctaagaagcaggatggaagctctgcacactgcccagtacagctgcagaggcaagaggattcttacaagtcatgactatcaatgatttgttttgttctcagattgcaaaacaaggaaaatgctttcatagcacgtcagattatgtgcctactcaatagtctatagatctttagcaaccttagaattaggaatatgtgacatatacttcagaaggaaagctacaaaaacaaaaattacagaatcaaaccaggattgcctccaactttaggaagcaggaccaccgtataaagcttgcccagatcgtcacagctaaaagcctgttgagaaaagttgtctagggccaaagaaataaatattgtctaggcttgaactctagcactgccattttggggacattgggttgtggtagataagaagaatagggtgtagatgtctgaaattatcttctatataatggagaaaaatttgcttgattgcaaacacacaattgaaaatattttcttagttgctatgaattacttccagtgaaaaatatgccaactccaataatttatttacaaaaaaaggatatttgtaacaaacaagcaaaggcaaagaaggaaaagaaaactctagaaaatacataggaaacagcatggtaatagggtgcccctgttgtggaataggccaggggtattgcagggtgaaaggttcaagatgatgatggtgatggtgacaaggtgatggtcaagcaggactttagttttgtctaaaatgtttattttatttatttattttatcattagaaggttgccatgtattatttgtatatttaatataagtacacaaagagtagctactaagaagtacattctaacaaatgtataatgagtttaaggacagataaaaaaatttcaaacttttgttgaaggcaaaaacacatctaattgaaattctgttcctctgagcagaacgatcttcaagacatatgtaaaataatagggctagaagtaccttggaaaacatggacctgaaaataattcattatcccagcacactgaggtggctccacgtgagtctgtcatctcaggacagaaagtggtgttgtgtcctggcagtccaagttgaggacacccactgctcataaaaaaaatatgaaattaaatattcagcaataaattgttttgaggaagacaaaatgcttttaaaggatcaacaaatacctatcattgcaaaaaaaactcaaaccaatgagcccatacagatggatcagaggcataatattcatgtgtaaagtatttggtccaagttttttttgtgtgttttgttttgttttgttttgttttgctttgtttttgagatggagtcttgctctgtagccaggctggagtgcagtggcgtgatctcagcttactgcaacctccgcctcccgggttcaagcgattcccctgcctcagcctcccaagtagctgagattacaggcatgcgccaccacacccagctaattttttgtattttagtagagacgaggtttcaccatgttggccaagatggtcttgatctcctgacctcatgatccgcccgcctcggcctcccaaagtgctgggattataggcatgagacaccgcacctggcctgttccaagtttttaggagcagatgaagctgttaaactttttgtttgtgccacctgtctatattaattctctgtattttccccatatgcttacttgcatacttatatggttattctctgtgtatttcctgtttcttttctctctttttttctaaatgtattgaaatttctgagaagatgaaaataccacctttatggctactcctaatggcaataagcgtagtcaccaacatttatttaatgttggctctttgttcaattaatctttgtggcaactgtaaaggcacaagttactttatctccatttgggggttaaatctgttgaaactctgaagaagaaaggaatttgtctctaggtcatgcaactggaaaccctggacttgaacccctagcactgatatatcctaggggttctagttcagattagactgatgctagaacccctgacctggtctccacagacccctcaacactgcttcacgtgcagagcaggaagcaccaggacatccttcctaagtggtgttaagaacttgatctgatgaagtatccatgtgtctttgagtaagtcatttaacttctctggaagaacagcttctttacaaagtaaggtcacatgcctcttagttcacacatccttcccagttctaacttttctgtgattgtattttcttttactgccctattctcaagaaatgtatttattatgaacacatgctgcagtttccctgttggtgggtctctatgtgtgcatgcatgtgtgcatgtgtgtgtaactgttgcgaacacttaccttctaactgctgttggagctgcttccagctaagtaggtgttccaaataccaggctgctcttattatggacttggtttaaaggaacgcctattctttttttcacacatgctaatacaatgtccatctttcctctcctaatagcccatgagtcttgaacttggagtcagcaaagtgctgcctttgtacagcacaaaagaacaccagttttgcttttttttttttttttttttttttttttaagaaatcacacggggactgaataaaaagcttttcgaccattcagaggctgcttgcattgtgcagctgttccttgactgctgagaacatctcccgcggacaatgcagtacctgaagagaacacggcacatggagctattcaagagttgcaggacctgggactggtgccagtgtcctctgtggaagatcgggggcctttcttcttggtcagaccctgataagcatattgcagtttgtggcagttgttgttttttgttgtttgcctgccagcattagtttcacaattttattgcaatgatgcattcccaacatgctggcacttaggggattttgttctttcctcttttggtcccacctccgtgaaatgtacagtgagactttgattggtcatagtccacttacagttcgcaatgcgttactgtgtggactgagttcccatgactcgggctccccaggacaatgtctctttcttcaccaagctgatggtaaatatctggttagcttcatctatttaaaaccagccaagcaggaatcctagtgctggagagaggattctttttttttttgtttgtaagtaaacaatggactcagttcttcctaactaaaattaaattccaatcactcttaaaataataccagaaggctaatccaattccaacagggggtgggaatggggttgagggtggcggtgggcggttaataatggcaaatttactgatgctggctgctgcttcacctctgtgcccaacatctgttttcatgactgatgattctaagaactttcctatgcaaaggaaattattatgttacttgtagttagaaagaactggctgaactaaaagccatgtgggcatctttatctgaaaccatttccttttgagtcagtagaattgagttgactgagttatttgggggttggtatttaattttttaagcattttaaaaatgcctaaaaactaaaaggctacgcaaaatgaccagcatatcttcttgctttagaatggcataaaagacttctgctttaagcagtctcagtatatgaaaatctgaattgttgaaaaatcaagagagtaggtgtaatctgttttacaaaatcatttataggagcagtctctggagcagaagctccacacctgcagttataacatgacctatataatagctggacatttgttgaaagtgctgcctctttcaacatccccctcagctcagtcttagcctgtttttcaaggtgtgtcaggaccgcatggaattagtaggacatctattataaatggtgattctttgtgggtccccttgaaccttagctgataggataggacagttagcataactgtggtattaccttgatcacagtttctaatcattcaaactccaaagatcacatacttattaggaactcctgctgcttactcatacatgcttactgcaacctcctcatgccaccatgcattttgctcatcactgcagtttctatttatctccacccaaatcctttctgtcctcttcccctaaccagctgcaaacacaattttgtgttgtgcaggacttgcagttctgcatcccactttctacccagcttctctgtttctcccgcaggtcagtgaccttattagttggtctaactttggcctccccatctgggtaaaactctccccaccatcactccacttccttctccttccaggcttttgtgctgtgtgctcctctcactgagctagcagcagtccattgccaggctgccctccttccttccttcaggccatcctagtcactgctcccaacacaatgtttgtgtatttcctgcaaaaggatatgtatttgtattatgctaaatgcttttcttccccaggctgagaggcctgatttatgtatatgcaaggatgagttagcatcttttctgacatttcaaatgctacaaaacctaaaatttgaatttcttcaggtactcttttttgagttacttgtctggtcagatttctgtagtccttctagacagtccttctgcagaaaagtataaagtcttcatctgttcattcattcattcagtaataacgtgcccattcctgggctaagcagcgggtgtccagtgaaaaaagggacatgatccaaggactcaaggaactcatagcctagcggggacaaaagatcaaccatccagtaaacatacaagctcatttcccactacagcttctggtcactagtatgaaaggagagaacggggtacattaaaaagagcagtgtggtgaggaggggctatcaggaacccacatagatgatgatttggtcaaagaagctctgtcctaggcagtaacatttaagctaagacctgaaggtggagaagccagccaggagcagtgaggggaagacttcactggggagagggagcggagtgtgctccaggatatttgaggactcaaaagacaggctggaatgtggtggagaaggaggcatgagctctccggagctgagcatcagagttgtgagccatgtagatgtggagtctgtgtgttgttataagtgcagtgggaagcactgaaggtgagtgacatggtctgatttatgctgcacacatgtgaatttcagcaaaacaaaatggtggcagcaaagacagggaagggaaggaattctagttaaatttaggaagaatcaataaggcttgctgagataaagccataggatccagtagatagtctgattgcctttttgaaagtagttttggtgaagttacagaaggaagaaaaagatagttttagaatgaataagaggttaggaagtaaatgtaggttgtgcccacccttggaaggtgtttggcaatgaaggaaaggacttttccctcaagggaagaaaaggtggagagaaaggttcgtttggaatagggagacaggcatatttagggagtatcagtgaattgggagagaatgaaactaccagagaaagggcatagagatggctgccttgtggaggctggagagaatgaattcccagcataggtgaaggagaggcagccatggacctaagtggagactggagggagtgaagcctggaggtgtgagggatgaaaggtgagggctgctggccccaggacctttgtttgtcccctgataaagatccaggcttctgcttaaagggcaaaataaattttgaagagagtagtagggtttagctacctcaggatactgagaggtgctgctttccagctagagaaaggagtgataagcagttagcagctttgctaaatttgtttcacagtccttccaaacagctacatactgtacaatttttctctgacagtgccgcctcgctccagagaaaagtatgctgatatactttggaaagattttcaataaaaagggctttctaaataacttttagtttaaccaggaaatcattcaaccagaacccccttcccccaagtattctagttagtcaaagttttactgaaacatgtcagcattgaaaaatgcaaaaggcagctaagtaggtctgactaaaaaggtgtaagaaatcccacatctgtgcacagagcagcagtgtcgagtctcttcaactgttaggcatttcaaacctgccatctccaatgcacgactagtggaaaaaaaaaaaaaaaggaaaaacaaagaaggaaatctatgacatagagtagaaagcccattcagagggttccagggcacatgtgtgtatttagttgtacagagcattttgaaatgttgacttagcaattaactcaaagctttgcatagtttgaattaacagtaaaagatcaaaaggccaaaactttaccaaatagatgtgtgataggatttattttcaaacagtcctgtaagaatttctgccatgcctacacagggccaagttaagatgtgtttgtgatctcttggcagagggggtggagaaacctgatcctgcactttgtaaattataaactgtttacacctgtcatctctgtctgtgtccctgttaatgataccttaacaattggctaagtgtgacaaaatgctaagagctggcactttcagagcaaccacatccagagggatgttattaatgtccactggagtttgagagaataacaaagcaccgtgacatacagaggacttttttttttcttttccagtaccgataagtctttactgattcattgattttcctagggaaaagagaagggaagggaaaagagtcagcatgtgttacaagatggttagaaaatgggaaagggagtgtccagcacagcaaaatcaaccatcaaataaacacaccccagtgatggggtcaccgaagcccagaggggctccatctcctgcagttcaggactgggggggagggatcagaaaaagaacaggcaggttacaggctaccctctctccctccccataaattcaagatttcacacaaaactttggtttctagcagtaaacatggagttacatttgtctgtctcctattaaacagtcttgtggccactttgacataaatttcttgcacctgcataaaagtatctcagtgacttggatatacattcatattccctttgttggccgcctgaccccactttctataccgaaggcccccagttgcttctttctactttaggattaaagattaagtaggcttgatccatccaaaatacagcagtgtcttaagtgtttggcataaatcacatcaagaaatggtgttgactcaggaggttgggaatgttagaaatgcttgttcctcggtgccacaaagaaatagcactcgaacataaatttaatttcctcagcaaggcaatttttacttctatagaagcgtttgacttgtaaatacagtaatggtgagagcacacttgaacaagggaggggaaggggttcttattcctgatgcaggtggtccctacctctgtgttgttcccctattggctagggttggactgcacagtctcagctaattccagttggctcttttaaagagagcaggggtatgagccagagtggcagggtgagtggcttggtgggaaggacagttaggaacaagtaactaaaggtgacttaggttacagcaggtgaccagaggtgactcaggtcaaagcaggtgactgggatgagtcaggacagagcaggtgaccaggggaacagatgtgaactactgattaaaactggtggaaaaggtttactgaaactagaagcaagggggcaaacagaaccaggacgttaaactttaaaatggagaatcaaagaataagagggctgaacatactgaaataattcaacaagaacccccttcccccaagtattctttgaagagaaacttgggaatcactatatctaacaggagcaagggatggaggacacctagcgtcaaaattttacacaaggactttcaccaccagattttgaatgtttttaggaaggtcctgggaaatgtctccagtcgaacaggagggcctttacacaaggtagattgggcccgggtgaaacatccagagggctccacgtgcctcagagacactgcactacaggtcctacaattcccaaaagctggagggaccaatctgcaaagtgcagcgtttactttgtgttgtagtcattgagtcatgtccatctgacctgcagaactgtgtagagattgcattttttaaaaaaactttattgaccccttttctctactctggatccccccaatccccaccgcctcccccaaccccacactcaactctagtatagtgccctgcacatagattaattggcacttattaaatgtttagtgaaggtaagattagggaaatgactatgatcagaggggcaatacacatagtacttaagaatgtgagcttcagagccagtttgtcccaggttcaaatccctgttccccaacttactagttagcaggtgaccttgggaagtctccttatctgtcaaatggggataataatggcatatatctaaagctattgtgaggattaagtgagtcattacacatcaagagctaggtctgtgtctgtcatacagtaaacacacaataaaatattactttgcaaaaataaattcctcttgggcagagagagcttttttgaaaatataccacctaaagaaaaggcaagcatgtatttttggtcactgattaagaaaggtaatacaacttctgcattttcattggcctgtttttaaaggtaaaaattttagataaatgtggggttttacccatcagaagtccaaacagttttaaataaaactgtatacagttttatcttaaaagcacccatgaacgcaatatgagtctactttaaaaataagcttctaaaatatttttttctcttaaaaaaagcttaccagattctgtttcattttggaaacaaattcacatctgggatgccagatttcaatcttaatacggtatggaacagctgagttataattttttaacctcccagaacacacagacctctgatgggaacatgggaaaggacatttatcttttcagctgcattaatatgaaatccgtgatattttagtgagctaagagaaaatacatattaaaaattaagaccatgcataacagggagtgcctacataactacaagactggaatttgcacaattactctccgtacagattataatgtcttttactaattactggaagcaatagtgcctttttatgttggcatgaaagtaatgtaaacactgagatatttctcttctaagatatttaacatttacaacatttagttcaaatgagtatatcttcaaggatattgaattatagccactttctgattgggaaaacaaaatacaactctgaaagaaaagagggaaatgttgattataaaatcgttcaattaatgcctaatttttgttgttgttgttgtcattatttttattttttcttctacttttattttaggttccgagggtatacatgcaggcttgttacatgggtaaattgtgtgtcattgaggcttggtatatgaatgatcccgtcacccaggtagtgagcatagtacccaataggtaaccttccaacctatgctccttcccccaacccgccctcaagcagcctcccgtgtttattgtttccatctttgtgtccatgtgtactcagtgtctggctcctgcttataagtgagaacatgcagtatttggttttctgttcctgtgttagtttgccttcagctaatgcctagttttaaaccataaaacaactctttctttctctttcttttttgaaacagtgtggatttgtggaaattcttcatggttttggaaccattgaaaactgagttttaatcctgcttctgatgttctccagctgcgtggtcttcttttttccctcctttattattattttaaattgtcacataaaaattgtacatatttatgggatactgtgtgaaattttgatacatgtatacaacgtgtaaggatcaaatcagggtaattagcatttccatcacctcaaacatttactgtgtttttgtgttaggaacattcaaaatctgcttttctagctgtttgaaaatatacaataggttgttgttgttcattatagtcaccctacagtgctatagaacactaggattaattcctcctatctagctgtacttttgtatctgttaaccaacctctagcaagctctccttcttcccatccttcctcacctctagtaattcaacactctcttatagctgtgtctcaaaatactaaaataactggttggaatataaaatatttggttaatccctattcacactaaacagactctttattcacactggccagattcttttttggtgtttgtgttttgttttcatgcatgaggttaataacacccttagagactgtctgaatgtccacccagtaccagcagagccttggcttattattatgccagtttcacaacttgaatccgttagttaatttaacatggtcagagaaaaactcatttgtctttttcatgtgtttcacagtcaaagtgacacagggtcaggcattatctgctggaaggggacggcgaaattaaagtcccagggtacagccattcacagcggtagaacggatgattatcaggctggatataattatagagccacagcagtcccccacaatacactggctatctgcctagcacaaaggtttagatccctaatttgttgcaggctagaatatctgtgaagtagccatgtatttttgtgtaccatcaatcacaacttaggcaactgctgctgtttgcattttggaagcttggcggctgttaagcttctgcctgcttttcagacaggaagataggatgcagggctgcagaaaggcttttagtggcagaatgatgacacctctgccagggtcctatcgcaagctcattagctgagtggatatttgagcgcctagtcagtttcaatacatacaaagtcatctgtttcattaagttaatttacctgagctggctctcctgacaatcaactgcttctgcagtatcagcttgatattgtaaaggcgaatgaggatggggctgggcaggaggcattggtcagcaaggtactggggtctgtgggattgtacttccctttaactgggcacttccagaaatccacattatatttgtaagcaagaaacctggctggaagtttactaaggcttgctatttacttttagtttcaatgaatgaaattgggaaatgagaagcaaatcgggtactatattaataatttaagaatatttttccaattgttaaggaagcgaagaaaggaaaaggaagcaaaagaaaagactgcacatttgttggttagttatttaaactctactgttcctggagagttctaaattgctttacaactagattcacctaaatgatatgacctacaggaaattgtatctgcaacttatgtcttgcaaaagttgttaattaaggaaaaacctgtattgttttccttcctttgtttggttctctaattcgcatctttgttcttcttttaatatgcatttgctttatgctttttagatttgagtgttattaaaatagtaacacctgagttggacttctgcctttagattagttggaagctgttaaaatttaatcttatccaaggttttgtgcatcacagggttgacttttaactgaaagtcgttactaactgtcacgttatactgttaactctgactacgaagactaatcattagactcattagaaccaactggtttgacaagaaaaaataaaagaattgttgaaccacaaagaatatgttagaaaaacatttgtatacatttgaggttaaacgtacacattaccgacttctttctcccagcacacaggacatcagctcttaggaagaaggtggataagaatttcttcctcaacctcccttatactttcaacttttcatggcttattgggtataaaagatcattgttttgaaagtgcttatgtgagaaatacttccatgcaagtagaaaaaagcgcatgtatttcctcgtattgaagcattaggaatagtttattttattttgcaaaccccaaatccatttgtttaatttggcaatattcgtcttttggccatgtttaattttctttttccaacattttgaaagatccaactctatccattttttagggcagaaatattcaattgcttctttttttttagttcagaaaaaaatatataatgttaagtatgactgtgaagaattaacttgtgtttgaattgatattttgctggagctttaagtaacagtttaaactttattgtcgggagtagacacaataaatatcatcttttcacacccaggagattcggggccagctatatctttctcagttcttatttcattgtccatataattgaataaaatatctaatgtaatattaaggtcacagatttaaaaatacagaacttggggaatgcaaaatttacttttctcaagataacagttttttcctcatgctgggcattatatgcacttaagctgtgccctcagcaatgtaactaggtcagggatttcatagaatgtgaaactgctgtgttactgtaagaataccagcatcttacatttcatgtatatttcaagacctgtatttgcaagtagaaaggcaaatgctgggtgtcagtctgatgtgcgttacctgggcgtgtatatagaacaggagttttgagctagcactaaggcctttaaaaaagaaagcctagtgcaatctatagtaacttcttcaagggcgacagttcattataaagtgagctaagtaagtaatataagccccttggaaaagttaaaacttaaaatctatagcgtttttctttcttatacgacgtatgtgtttatactttattttgcagctttttattggtatacctgtctaccccataatttgtaaatcctctgaggacagggattgtattttagatcattcattgatccgtttgtttaccaatcaaacattcatttgcccttgccaggttcactaatggtgtggatagattagtaaacaaataatgtcaatttgattgctatgatagagctcactcaagtatttcgaaagaaaaaagagagacattagtggttagttgtcagtgggaatcaggggagacttcacagagaaggtgatgtttgaagagtgtcttaagaaaagggtagaaattcacaaggcagaaaagggaaaggatagaaaagtggagtggggaggggctgttaataggaaaatgattgaaaagaaaaaccatagtcatgggaagagtagttcaagacacaaaggataaaaaagaaggggggaaaaggcaaaggaagatccaataagagccatccctccaaagccctcacccacccacccaagtcaatcgaagagtgaaaaattcttaaaactttctgttaggggcagtttattgaaattctggtatatattcttaacctagggcagctggctgctaggtgaaaagattccagagaggtttttaaatgctgcttcctccagccagccttcatctttgtactggccacagcacctgaaacagttccttgctcatatagacaataaatgcttaatttgaattgctgaaagtaaatagaagtaaaacggcccctccctttgaggtgtttgtaatgcagttgggaagagaactacaagccaagtagataatgacttaccaccaatgactataggctattcctcctttttacattggcacggtactgaaaaatgtgccctctttttcccaaaggaataatttaagtttccacaaaattttggttaaacaccaaactgccgttaccatcttctaagaaatataggcagctccagtgcaagacacagaaggctgtgggtgggaagttttgaggacagggggaaattggaactacagtaggaaaatgtttttaggaaacaagggatggtatataggtataggaaacaagtatacaaaattcaaaatgctgaaaggtgaggatactttgagtttccagtgaaactcaaaggatacaggagactgagaagaaaatggaagcttacattaattaaataactcttcatgggccaggagctctttatcctaataacagctgtacgaagggaaaacatcattatcccactttagagcacagaaacctgagccttacacagattaaataacccaaggccactcagccactaatggaaggactagggtggaagcccactagaatataagctccatgaaagcagagacctcttctgttcatggggaatactcagtgtcgggaacatgcctggcacacagtaggtgctgaataaatattttcttaaacaacccagacttcaaaggccatgtttacaaagtgatcagggttgagttagtcacagagaagataaacttttgtccttgctccaggaataaagaattgtctagataggcaaatgggcagacatgcaaaataaatatcaaactaatggcaaaaacaagataagaaaaatgaagagttcagagatgccattgtctagatctttacctaaaatacttgtgctagtagaaaaatggtttccttgtttccttgtcattgacccaatagctataacacagcatagagcatctgatcctaacccctaaagaataagctctaaaaattgtgtgtgtgtgtgtgtctgtgtgtgtgtgtgtgtatacatacccatgtaattatacacacattctataggaggttaggaacctatgaaaataaatggttatgttgaaagatgtctttaaccctaagtgtagcatttgctagtggaaactctgtaattactgtaatgtttttggtggtgactgttcatgattttttttttttaaaggtctgacagctgccctcttgatatttatgtgtttcttgctagggaacctaagattcacaacccgagcttgtaatgaggaaaagaagacaatacaaataacttgaaaaggagtatgaactggatatggtcagagagacaaatcacatgttccatgctgctttaattggaaaacaattctttcatggggttactttcccttcagctgagataattaagtctggactgacactggtgaccagctactgatgataaatagtcagttactaacaatgcagcaatcagtaatcaaaatttatatttcccaggttaccagggcacagttgaagagaaaagtgggtttgataaggctgggagataggcttcctcgtgcagtattcacatggcttcttctccacagcatctgggtgggatcattaggtctgctttatttcaaccttgtcataaaagaaaacatacctattgtctgtgtttgcattagaaatactttgcacgccccatgctggaaaagaagtttctgtatgcctccctgtaatttttaatggattaaattatattctgtaagtgggttggcatgagggtaggtttcaatgtccagttgttattggacatgaaataaacttagatatttttaaagccactccatgcagctggcacaagtaaaggtttttgaatcatggctaattatccctggctgtggctgaaggcattgaaatgaaagggattaggattgtaatatggatgccatttgtatttgtatcagcggctccgatatttgtctactcactagaatcacctggggttctactaaaatttttcacagcccaggtcacacccaagccacttaagtcaaaatctctgggtatggaacacagacatctttaatttttgaagctctctaggtgattccaatgtgcaggcaagtttggaaagcactggtctatactcagttttatgcatatttttgcataaaaatatgaaactgctgtctaggccgggtgcagtggctcatgcatgtaatcccaacactttgggagactgaggcgggtggatcacttgagcccaggagttcgagaccggcctcggcaacatgatgaaatcccgtctctacaaaaaatacaaaaattagctgggcatggtggcgcgtgcctgtagtctcagactcgggaggctgaggcaggagaatcgcttgaacccgagaggtggaggttgcagtgagcagagattgcatcactgcacttcagcctgggcagcagagcaagaccctgtctcaaaaagaaaagaaactgctgtctcccaccccagtaagaccttaaaccccaagagaaaaagcataatgtgacccacccggtgagaaaagcaacctcaaagtggtcaaaatagactcagctctgaggagaaggagaaccaaaaaaggaggaaacatgcctttgctcctttcttagtgcttagctcagtgttagttgaataaatgaataaaaagagaaaagaggaggtggtcatgtgcagctcagttcccagaaagggtactgggatgggatggaggaaactcattgaccacatccttgcacagtgggcacctctccacactgccctcctcgctctcctgatgaattctttcttttctctctagtttagtcaatctcctgtcttctctgggagcagtcattctgagatggtcgaagatgactgtctcaggggaggacactcattcagcttttaaaatgtcaggtgtcctttggggatgcttcaaaagcagcatttgggcttcctttgccataggaaatgaacaggaagaaaggccagtgaagacagagaacaagggggcaggtgcctgcccagaaatcaacgtgcagatagagaagggagaaaaaaaaaagttcccatctgcagtactggaatcccacttatggagcataaaataaaaaatatgaaggttatttgctttgagctcatctgattctttgtgttagactgcactgtggcctgcctttctgagtttgctacatttttatttgaaagctaataaattagccattcatatggcacgcaggcgggtttatagtgctgtgtaaaccaccagccaccatatacatccatctgcatcacagatcgactagaattatcactactgacaccacaatgcctataaattccctcacccgcatcctgtattccagaatatttctattggctgaccatactgcgaagagacgggatcctgggaaaaatccttttttctttctagtttagtgggaactggcaggttatcagtaggtctaagctctaggtttgcctctagagacaaagagtttaaaaaatagtaactagttttattttgttctaaaaaaacacatgcacaagaaaaatattgtcaataaaacataaaaatgtacaacataaaaagtgagtttcttacccaaatctgacctcctacacctcctccctcagagacactgttactagttgcttatatatgagaactgcaatattcacgacactttaaaaaatcagtcaatcttggcttgtatttcaagtttcattaacaaaaaacagccccctttacaatcactggggtactgaatgcactgatatttaaaaatacccaaagctatttggatcaaaatcaacaaatatttaataagtaccttcaatgtgcacaatgttgcctaaacaagccatttctaatgaggattttacacatatatgtttcatactttttttctggtgtataacaactaatctaaaattatgttagtgaaagggtagtcagtctttgttttaaatgtttttctcagaaacaaaaatgatctctttctctccctcacccctctaacttctcagcctttcacacattctctcatttgagttctgttttacgccgagacatctgggtaggtggtatgttctggccagagtactctctctcataccttccccagatggattggctcaaggatctaatattccccaaagaaataaaacatcccccaactggccattgaagaagagctgcagtgctttctattctaaacacacatgtgttgaaggatgagagacggtcatgacagagccagtgtccccacccatgacttgtctgcagagggggagacttccagtctgtagcccactgcaggatactaggctgactgcacagccccgttacccctcaaactccagccagctacatctgtatgtcttctctccagctggctggcccagctgttctggtgtcaaagaaagttatgagtcactgggaagggctttgagacaagagtagagttaaaccatctcctggggtctgtgtgtcattggcaatcgagccttagtaacaagccagtgcttgacagtcccaggaaggccacacaaccagagcttcactttgtattccacaatccacacctctgggctttgtagtgaaaaagaggtagagctgtatagatgctggatgtctccatccctagagactttctgtcattggccatgatgttcattaggttcttgccatctgtctccttgcaaatgctttttggctgtagatctatatcctatacaatctggtcaaactgggagacaatgaatgaggattggccaaagcctgaggactttcttttggtcttttgattccagggacattattacaacagagccctaggagcagctgccagcaagagtttgagtccacagcaggatccttctggaccatctgtggcttcctgctctgaacagtacttcctcactacgtgggaggaaagacttgtcagaggatccaagaaccataggcagtcaggttctccatggggaccctaaatgttgtctggtctagccctgcatcctgcgtctaaattcctggagaatattccttctgtcctagcactcatctggcctccccatccccttaggtaggctagtccatgtgtgtgttacaggggctgctagaaagttcctccctattttgagcagaaatcatctttatagtttctacccattgatcttaggtctaccctcacaactgtcctctaggtttctcttcagatatctgaaaaatgccagtctctgccccttgcatctccccttttccttgttttagtactgatttttcagaaattgtcctgatactctttttttagagcttcattcactatttaatgaatatttgttaagagtttactgtacattagactttgttcttgaatgggagggatacagtgattaataagaccaatttacccacatagagcttacattctagtggaggggaggaacagacaaaagcaagtgaaaatctcaattaggaacaaatccattgcagaaatgtagaataaagtgatgaaaaaaaaaaaaaaaagcatcaggctgctttgggggctcagggaaggcctgtctgaggaagtgacattttatgatcttggaagaaagatcattccaaggtgagagagcagaaagtccatgaggcaggaatgagagcttgtgcatttgaggaaagcaaggcacaggggctggaacagagtgggaatggaacatgatggggtcaaccagttgggtggtgccttttgtgcccagaatagagggtttaattttgttgttaatacattaagaagccactggaaggctttatggaagggaggacataacatgatctatgtttctaaaagaccattgattgctgtgtggagattaaactgaaggagggccaagtggaagtagaaagactaagtagatagcaattgtcatgaggcaggagctgaggttaggttagattaagaggattgtaggtagaacatagggaagtgggcagatttggcatgtactttggaaatagaatccatacttggatattacgtctcttggtcctcttaactcacagtgttttatgtaagtctgtattatatgtataatgtatgtgtgtgcgtgtgtgtgtgtgtgtgtgtgtgtgtgtacacacagcatcgttatagccacttatgtatagtctgcagtggtctggagacttcccaagggcagaacccatgggtgagcccatgaccccaatatccgcactgttcccgcacagtgccttgcctgcacatattagaaactcagccatttctaaagtgactgaattcgatgagtgaatgaatgagtacaggaaaattactaacaaaagctgtttctgggtttaattgaacagtcaaaggaacatcctttcaatgcctacacacttgtacgatattttctcacatctcatgttcttgcttgtacctcccaaaacactaaaaaagtaccctgtggtgtacaaaagcagtgttcctttggaatagaattactttcaaaaaattggaaaaattattgataatgactcctcaaatgtaccttttgtgtgagaatggaggaggtgcccttagctcccttacttccaaatagtggagcagtgttccagcttggggaatcttgcaagactggagctcaacacagcactttgctctcttctcattgaggattctggacgacactcaacctttctttcatgtcttagtgctgctggaaagagctgattaaatagatatgtgaagaacacatctgcctattcttgcataacattttagaatgacttttttttttttaactcttaggagagataaagactatgttaacccagtaggaaaataccgtgtttgagaaaaaagtcattctgccttagtcttttagttattcaaagtgaacgtggggaatctcctctttgaaagacgttcatgtgttgttactctccatgtgttccataggtgtgtattttccttctcattgctcagaacttgaaatccttactagtgaaagcctggatgatgcaggttgacctctctgcttcccagtaaccagggctaagtagcttctagagacgtttatccattttctgtgcctccatttcctcccaaagaaaggcaagcacacacgtgcagggatccttgtgctatgctagagtgacacgcctaggcatgcctgcagggctgggtgtgtgtctcacactcactttctctctgatttatcacctctcttttgtctgaccctcagcactttagtttggtttcttcttgtcacactcaaacttattggataatttcacttttcctccttattctggtctggcagagatggtaattaaagtgattgctgtgctattaattatgggaatggtgatttttaaatttgatttaggggttaattggtgatattcatgtgctgtcttccctcctgataattggattgcagtaattaaccttgtatccaagttatctgatattaaccatttgcctccattttatttcagacttaaaattgattacgttgttgtctgacgcccagtgtccactttgggagaaagaaaggtgagggacagccagtggagggcacctcagagaggaataggagagtctgtcttccttctctaccacccctacctgttgtccaagataacagttgtcctccccaaatattccagaaatccaaattcttaattttagtaactagttcctaaacttctggggttattcatcaaaagaaaattacagatatttgaaaattaaaggcaggtacctgtaacaaagcagagggcagatactgccagttgacaattgcttctgatgccagggattggaaaatgccgtgaccaggcatattccattggggagaaaatgattacaggctctgacatcatggaatctcctttggagacaccatcaccaagtgcacaaaaagcctgtgaagtctgtccattttctacagagagaggaaggagtgctgactcccttgtagttggccatcagatgggaagaaatgcagctcactcaggtggaggggttgctgagcctggggaggcagtcacttctgctgcttctggatgatatcacttacttaggagaggctttgggaccttgctaccaagattacatctgctctgggaacatcacttattttgtggaagtctgttcttgtcggtcctttgtctggagaggggcctggaaaactgtcattataagcccagaacataggaaatgaaaaataagtaactcagtcagcaattcctcatctctgaattattcttgcaagtatgatacgacatacacttttaaaaatatgtgaaatcagattacttttttttttaaattctgtgagaatttcacaacacactgtggaataattaagagacgttctcattttagcaaaaccagtgttgggaatttactctcaaggatttcctttctccatcactttatatcctgtttttaatctctttaggaacgaaggcatgtagtgtcccaatcttttttttttttgaaattttttagattttggaaaagtaacatgggaaacatacaccagtggagtctggagcaatttttaataatcatacctgttcataatttgcagcaaaatgcataaatattcatcctaagagggataaataaggactacaaatggtctcatgccaactcaagcttgtcacacaatgagtagaaaaaacattttggttttcagggtttgtttttgttttgtttgtaattgcagataagaaattgtgtacctatactcctgaaatgaacttggcctcatccagatctagagaaacaggggatagcaaatcgtatttttctttaaacttaaggagcctcagggcagacttcaaaaacaatgaacaccaaaatgattcctccagatgctgccaaagaacaggactgttctgtttgtgcggtgaccctgaagtcacctgtttaaggagtcaagtcatcaagtggtagagacattcaaacaaacctataatttcgtagaatttattttcattcgctctaaggaagcatattttcaggatgtttggggataattattaattccaaagataagatttcacattaaaagcaaatgaacattttatgcggtggtatcctagagttgactctggtttgggaagaggcacctagtgaatcgtcttctctccaccacaattcaaactgataaactgcctttggaaaacacctacgttattttgctaagtaaatcaagccaggctaatgagtcactttttacataaaagtaaatgagcaaagccaataaagatattagtaattttcagaaaaaaaaacctgaaatatctatcaaatttaataataggttaaaatgtgtgggtttgcagttttcactgagctcactgagacataaagcaggcttttttcggataaacgaaatgaatttccccaaaaatgtgggaaaattatagaaattcaagatataattcttccatatcatgtctgttctcgatgtgtctggacatacacagatgaacagaaaatgtactgtgtatatagatactttactgatgataagcaccagtcagcatcaatatcatgcttggttatggagcagatcctgaaatgatattatgcctctttttgtataatcagaagcttgtaatcaaatagaaactctatttttggctttcagggttctgggaaagcatcagagctcatcgaaagaggcaggaaatacaatgagggctgacacaggcagcaaacaccaaaggacctgatgccaacattttagttcaaggaaatgttttcactttcttcctgatcttgagactgtcttaccaaaaatgttgacaaacaacaagaaaacagtaaggatttatagggttaggtcaaagtttaaatcattcgtgactgatgacattgttatttggggctgttattcagagctcaacggagcgacttgcaggttgttattaattctgtaggagccaggtttgaagttgacttctactctaaaactggggaaagaacacatccctgcagccgtttaggcctgagcaatcccaggcagagtggagatcaggaaggttcaagttgtgactgggagattgtatttctattaactatactgagagtaaacagaggagaaattattagggagagtcgtcctgtcaaagttcagcaattgctttattttagtttaaatcctctaaggactttgacaaaggtatgtggaaaactctaggtgctaaaatatctctggtttgctcctttaaagtcactctccagatatctttttactggctaggaaaaatgcttggattcaggcatactattttttgcagtttgcttcatttttaataaaattacaaagaaaaagttagggagagcaacgcaaaaataacccatatactcaacacctcaagcaaataaataccaatattctgagcttatacttcagagcttcccccaccccttcttctctgtcatattcttagaaaaaatagtaatcagacacaatctttattctcagctgtaatattttaaaccaaactttcagttaaaggaaaacatccatccattacttcagacaaatgcttgaaattccttaagcaaagaatgaactagtctaatttgagtgtctacaaatccaataagcatggagttgtctgttttaacacgctgctgtcttggcctggcccttctacctgaaatgtcttagttcccacctgccccctccacagtgaacagtcatgcaaccctctaaggctttctccaaccagaagcctttgccagtcatcccaccttacatgcctctgcaacatcttcactttccaggtggtattcttggcaacagagtaataatttctttttggaagattattgttaatttgtgtatgtgttctattttggaataatgagcaaaagctatggggcccatccactgaatagtgaggtcctgggggtgatgcaaggggaggggctgtttccatctctatctgcatcagcatcttagcacagagcctcccagtagaaaacagggagttggtaagatggaaatcaggcagtggtagtaatgaacatcaggcagcaagccaaggagaagtgaatgaattttggctcccttctgaaagtagcataaggcagggaaagagctcactaagagaagtcaggagttctcagctgctgctcatctttgccacttttgagctgtcctacattcggcaagtgacctttttggacctcagttttcttaacagcaaattataggaggcatttgtttctgcatctgaagcagatgtccgagttcagcaatattgtaaacagtttacacaagtttacaagaaaaaaacaaacaaccccattaaaaagtgggtaaaggacatgaacagacacttctcaaagaagacatacatgtggccagcaacatggaagaaagctcaaaatcactgatcattagagaaatgcaaatcaaaaccacaatcagataccatctcacaccaggctattattaaaaagtaaaaaaacgacagatactagcaaggttgtggagcaaaaggaacgcttttacactgttggtgggagtgtaaattagttcaaccattctggaagacagtgtagtgattgctcaaagacagaggcagaaataccattcgacccagcaatctcgttactgggtatatacccaaaggaatataaattgttctgatataaagacacatgcacgtatatgttcagtgcagcactgctattgttcacaatagcaaagacatggaatcaacctaaatgcccatcagtgatagactagataaagaaagtggtacatatacatgatggaatactatgcagccattaaaagaaacaaggtcatgtcctttgcagggacatggatggagctggaggccattatccttagcaaactaacacaagaacagaaaaccaaataccgcatgttcttacttacaagtgggagctaaatgatgagaacaaatggacacacggggaagaacagcacacactcaggcctgtcagagggcagggcatggaaggagggagagcatcgggaagaatagctcgtggatgctgggcttaatacttgggcgatgggatgacctgtgccgcaaaccaccatgacacacgcttacctatgtaacaaacctgagcatcctgcccatgtatccctgaacttaaaataaaagttggaaattaaaaaaaaaaaaaaagaaaatcaagaggaaggtttgggaatgaaggtaatgattacagtctggggacatactgtgtgagttttacaagtaagccatacatgtaagtagagttttccagaggaattgtacaaaatcaggtctggaattctaaaactaaaggtttagattaagaggtaaaaattagctgccttgccgggtacggtggctcacacctgtactcctagcactttgggaggctgaggcgggcagatcacctgaggttgggagtttgagaccagcctgaccaacatggagaaaccccgtctctactaaaaatacaaaattagctgagcatggtgatgtatgcctataatcccagctactcaggaggctggagcaggagaatcacttgaacctgggaggcagaggttgtggtgagccgagatcgcgccattacactccaggctggacaacaagagcgaaactccgtcgcgggggaaaaaaaaaaagatagctgcctttataatggatagccccatttaccctgatgtgattattatgcattgcatgtctgtatcaaaacatctcatgtaccccgtaaatatatacacctaccttgtacccacaaaaagtaaaaataaaattcaaaacaaagtagccacctttaagccaacaacaaacaaacaaagaacgtttacaaagatggtgatggcaaaaagctagagcataccacaggtaagcctggttgagactgttgcagacttttgagataaagacagagtttgccacaatactttcaggcctactaaggtcgtgactatagcagcagagtcccagtgggccatgagactgtatctgaaacatccaagtaaagtgcaataaatgtgcaataaacatccaagtaaactgcattggctcagggctgtgtgtttggggtgggggtggtgggtagagagaaagaaaacgaacataacagaatcatctgaaagaaaagacttgccttctccctcaaaagataatacgtatacaaccaacctttattttttgaaaagatatttttttctagaagtacttacgaattcagtttttctacgtttttgtgatagtggtttcagatctaaaatggaacatctattacacccagtcgatatttattattatcctccattgaatgccatcatcactctccaaaatgtgttgaagttaggtctgtggcatttccctttcctccaaaatgggtgcttttatgtctctcttaatggctgagagaaggaggaaagaaagaccagatgctttattaagaggctggagctatttttctcatttgcccgaaccttatatcttaatgcaaatatcactgaacaggcggccctcgtggttcctgcaaactgggtacaataaaggtttcaaacaggatcaatgggcccaggttgtttctaattacgatgggatgtgttctttgacccagctctgcatcttgtggacagcagcaccctcttaatgctgcggtccttgaaacagagctgtccaggtcagtgaaggatacctactatttaaacactcattacttctttaaattttcctctggtgcaagaatgatcagcagttccagcctctgtgaagcaggtctccagctggatattcagcaaaaacacctgctttcccatctctctctggacagaggttccttactcacttgagatatgtccacatctgtttatcctatcagctactgaagcaggcaacttctttcttaccctttgcaaatgacactgttctctatgatgtgttgatgttaaaacatcacggttgagggaggctgcaagcaggcaagtggctccacttaacacagtggtgttcatgagagaatcaatttctcctaaaactggttgagaagcatttgcatctttctatcaccttaaggctgcaatcacagggccataaagtggaatgaggctttgcatgcctacatgtttgggagcaactgtgtactccctttatagatttttatcaccgaagccattagggactttcagccacttcgtccacataagcatagatgcatcagcctatatatgaacttaagtgcagtttccttttatgccatcacctttctctttccaacctttcttctgttcctttttctttaatgccttgggaaggacataaactttggcattatacagacctggctttgagttttgtctttaccctttgactactgtgctgtaaatatagttggccctctctatccgtgggttccacagcagtggattcaaccaaccgctgatagaaatttttttttaaaaaattgcatctgtactggacatctacagacttctttttcttgttgcttttccctaagcaatacagtgaaacaatgatttacatagcatttacattgtattatgtattataaataatctagagatgatttaagtatacaggaggatgtgtataggttacatacaaaaactatatcattttattcaagggacttgagcatccccagattttggaatctttgggaggtcctgggaccaatccctcacagatactgaaggacgactgtatttactatgtgctgcctagacatgttacttaacctccctgaattgcagtttactcttgtgtttacaacacagataataaggcctgtctctctgggttgctgtgctgtttcaataaagtaataggcatatgtaccttgcacacagaagatactcagtagacccccacttccacccagtcctttctttattttccacatcattatatttctttgcattagtgtgagtgccatgatttacattttttaaaaaccacaccatgtttgtgtgactcccaagacaaactttccagcctctccaagtgaccacctccagagataagaagcttagtgacttgaagtgggtgggggagagagaaggagggagggagagaaggagacttctctcactgaagcagtagaacactagaagctaatctaggacctccccgagaattttgtaaggagtccaagaaaagctattaaaaagtaatttttagtgtctcagctgaagaataaataaacatttattgaggactatggagagtctccaagacactattttacccatatgaagaaggggaaactgaggctcatagagcttaagcatcttgctagaggtcccagctagtaagggggcagagggtttcaaagcccaggtttcaccccctgctcttttctgctctcctatgttattgcaatagtttgatgtcacgtaggagtttttaaatcaatttcaattcacttttggaggcagtcacactgtacagacaaagatgatgaggtccaaaaatttgagttaataaaaatgaaaattttagatttagtgtaaaactcaactgaagtctaaataagattacatggtaacaacagtgttctctgtggtcagattagaactgcttatctacttgaactgggtcctgaagttgagactaggcagtatagcatgctgggatttctttgctctcgcttgatgaacttttcaccacttttcatgatgtgcctattgcagtccagtgagagctacatggaagagagttcgttctacccctcatgcttgccacaaacagtaccacacattgacacgctgattatccctagagtttccaaaccacatgctgcttaggagcaaccaggaaagagtgtagagggaaaaatgagccctgttccccagtttgttttggaaaggtcacttgccccactgcatagaactttctctgcctgccctctgtggtgatctcagagagtggctgacacaacaacaagagcccaactacatttccagtgcctttaggacaaagaggaaagctgtgtggaggtccagcacctcaccccacctcagcctgggtccccttattccccctgccgcccctacctcatctctccaggtgatgttcctggctttggaatgtgttacatgacccagaggcaggccactccctgtaccatccttcctaatcgcatgctctctctctctctctcacacacacagagacacccttcttcactggggcagaatcccttagaacagtaccatcacagagccggaggaatcttatagactattacatttcatatcctttcattttacaggtgaggagactaggagctagtgaggctgactaacttgcccaaggtcaacgccattaatgtgctcttccctctgttaatgacagcatgaattgttggttatctttaaaacttcatatgatattagaaaatgagctttttaaaagaattactgaaacatggtagtaagtgactttgctcagggaaaaatagtgccactattatcatttcctttttatttcaagcccacacttggagttgttaaaagcattttgtatttgcaaatccagatatattatttttcacgtcactatcacttattattaaaatgttccttgtgtgccaacattctggaagatgctgccatgtctaccaaatcagacacaaattgtattcatacagtcaagtcctccatgcaacttgatgcaccaagcatttatgcaccgtttgctgcaaccggacatgtagacagttggtggggcagcccagccgggtctctaaaacaagcagtgttcattaatttgtgtgtatagacagtgggttccacatggtccacttgctaaggctgctcagccacttgcagatgatggtcaagaggaacagaatacctcacgcagcaacgttgatgtcctgtacctgggtagtataaaggttccctcagaaccttcaagggcaggcaggtgaggttaatgggtaaggaaggcctcctaagagagtgggaaggagtgggaatgtttccgtctggagagagccctatttggggcagccaatgctcaactccagagttttgtcaggtggggtcttggactagcaaagccaaacctctgattttttttaagaagtcaaaaatctggagtttgttaaatctcctatttttccctcaatattgctaatttagttgttttcttctctctgagtcagcttctgccaggtactacgagtttgtgagcccccgtagaattttccagggcaggatttggaggaatagttgggcagaggattagaactagtgtcaggggtgagcctgcgtggtactctggctgggtccacttgtcatggcttcccagtcctcgtggcttgttaaactgactcattagaagtaagatgtggcaattgatggactcattctctgactttgtaatcatttccagctccgctgccatcccttttgcttcatgcttggctgacacaatgacccgctgtacatcaagggtgtgggaggtaagggtgcgcataaatggaagctctagtaattgaaaagaatttattatttttaaaaaatttatcagcgtgaatgcattcacacggttttcagacagtccttttggtctcctttgtttcgtcttcaatctggagtacctgaaagctggtttcctgcccaattagcattctgcatggttcatttggctcatggcaaccaataatcacaacaccatttgtacatcacagttctgtgatccaatttgggcttaaaaactgtagggaaaaattattgtgaaaaaaaatttgggtgtagaaagtcaatacaaattagtttcagatgaacctaaatagacctgacaaattcaccaagcagatgcctattaaaatgaagaatgttcttaaggttttctgtgaatttgggggtttggggcaaattaggattataactttgtagtaatggtatgttttacaaaggccatttcacttcaggctaaggagagtgaaaggctgagacaagtagatggaaaattcagatataataggcttacttatgaagtaaatgttttcatttagaatccttatattgacagtcttcctttatctaattttctgaatagctgcttaagtctaagttatatttagcctatataagcacagtcacagacagggaaatcgacaaatgtttgcagatacctataaatatgctacatgtgggtagcacttttcaaagttttgaaagtgacttaaacagcctcttaaattgcagcaacactgctcactcaaggtttataaactcagtgttaagttctggtttttgttctcctgggctggtgcaagtctgtattgcgtcatcttaggaatcctgagactcaagcctgtgttctttggatgagaaatgacaatgttatggaattgggatccctccgcaaagtaatcatttcaacaagaaaatttattgtctacatatttacaagggttagggcccaaaattgagtagaaagggaataatacatcaaaacttcaactgaagaaaattttaaagtgttcatgtggactgaccaagattaaccaatacttccagagcactttcacccgtatgatgtacatgttaactacctgatgatataatgatagaaagacatataaaacagctatttttcctggcagagagccctgctgtaaacctggagatacttaaatgatgctggctgcagggatagccagaatagccactgacttgcataacagatttcttctgcatgcattgctcttcctgccagcttctggggttgagaattttgcatttgacacatgcaatcttaagatggaaaaaattaaaattgggggatataataaagtagcaggacattgtcttgttagcttataggacatttgtacaaagatgaatgcagttgttgaaggatggagactcgtttgtcatgtcaagaaaaattaagccttaaaagcatacatacatctctaaacatttctaaaggaatgagaattagccttttgagtttcctttctttcattatatgctgcaaattctctgaggcaatatgcttctttataatactattcttgagctcctggtaaaagttgccagttctccctgacccctccccctccccctcccgccagatgctttctctcctaaaatctaacagctgactggtgtcttgtttatgttttacttttgttatttatttctgccctttaatgctgtactgaacaggagccatgagaagcaaatcagggcacttcagagcttctttcctttgagttcagattttctaggataggaagaactggcaaataaatgaatgagtagactcttgcttttcacctgtctaataaatacatgtttatgtctcttcataatggttcacccttatgaacaagtaatcatttaaagtttaattttaatgtacacatcagagatggagacatggaattgtttaggcttttctctcaatctgtctccctctttgattttcaagataaagcaaattaattaatgtgcacttttcaattgaagaaatgattaagacccagctgtgtgtgtgaaattataagttacagtgcaacacttgggactgattaatactttcttggcatgaagaaaagagacataggtatataatcaaaatggtgttccaaaaagcgtaagttagcagtttgccaaattaactttcaaagacatctaggttactaagtttgacatttctacacacaaatcttaaatgattgatggattactgtaaaatagctttgttcaaaaaagataatctttggcaggtacttcaaagagtttactgctctggaaagatgaaaagaaatcctcattttacattaattttcatgatagagcaatgcttatttgcaatatgcctgagaattaagtgatatttactgtattatgagtctttttttttttttcactgtatccagcagtcccacatgggattgtttttatttccaagatttaggagaatttttctgcacataaagagcttcgtcaagaaaatacagatgggtagaacagtatatctgacatttttattcactacgatttcactgcaaggaagtattgagaccaaaatatatagagatatgactttttaaatcaacaataccgtttcagaatgcagtttcagattctccttgtagtaatcttcagagtgtgaaaggatctgcctacttctctttatagattgtgtgattttatttatttatgcctaagtcactgtagaatgacataagtcaggggtgaatatctcaattaagaagtcaagcaggtaatggaaattagtaaacaggatgagttatagatgtgtgtgtgtgtgtgtgtgtgtgtgcgcgtgcgtgtgtctgtgtacctgtgtgttggaagtggtgccaaagggaaactgtcatttaggtcagtatggcaggtattttgatttttacaaagaagctgaaaaatctagattaatatcagaaatctcctatttttcaatattggcagtcacctcaaatttctgagtgattttgaaggcagagtttcatgactgtgaaatagccatctataaaagcctaaagatggctcaggataaaggaactaaagctctttgttccatattggagaaactttgcaaaagggctcagatgcgtggggaaggaggtagcagtaggtaacgggtacaagttccaaacacaaaaatcaacgaatttaccatgtagaagatgtaaagcagaagcctttttttctctcgaatttatctttcagggtatttcattttatggcattgaacaaagctgacttggaaaaaaatctgttctttactttttggcagggtgaagtagagaaataaagtctccccgctgaactactatgaggtcagaagccttgctgctatatttcacactgctacactttgctggggctggtttcccagaagattctgagccaatcagtatttcgcatggcaactgtaagtacccatggtctcactcagtgtctccctttgagaacattttagcctgaatcagcctagcaaaaaataaaactgaaaaatgaaatagaataggtgacttattagtcctctgtatgtggcaaaggtggctaattcaagtctagtcaaattgataggatgatttttctataactccatcagatgttgttgtggggacacgtgtgaggatttgaaacgcccctcgtaaccctgatgaagtctcagctactacatcgaggctgccgtgttcatgccttaaaatcagctctgtgggagaatatcgctatgatctgggtattggcagtattactcgcttttatatataattcatatatccggactgttgcaaaatatgaacaaaaagtaatgaccattttggagtacttcagagaaaaattttttttggacttagaagttacatagttaatagactttggtaaagagaaattaatttatagaggacccattttaactgtttataactttcctttggtctctgcttcattgtcaggagtagatactaacatgattaagaattcagctgtctcctcaaaagaggagagtcctgcctatgtgttggatggaacattcaatttaccacttttttttcatgcccttcaaaaggcttaagtattttattacagtaaaaatgtaagagagcatttttttcctaaatatctcttttcatagtaatgaccccaaaacaaacactgagtgagccatacaaaggtgtctaacattaatatgcaatactaaggagatccaaatatgcccagtgttcagctgttctttctgggttggaagaaaatgaggtagcaaaactgacacacaaaacaattagagtccagagtcaaagggcattattaagaccaaatgtgtagttcaagttcatcattcctgaaatagcagagtccacctaactcaaggttccaaacttaataaacatttatttatttccatttgaggtaagttttctgtcttggatgcccgagtatagaagggactccagggcagggcgcggtggcttacgcctgtaatcccagcactttgggaggccgaggtgggcggatcatgaggtcagaggatggagaccatcctggccaacatggtgaaaactgtctctactaaaatacaaaagaaaaaaaaatcagctgggcatggtggtgcatgcctgtagttccagctacaggaggctgaggcagcggaataccttgaactggggaggcggagagtgtagtaagccgagatcacaccactgcactccagccttatgacagagcgagactctgtctcaaaaaaaaaaaaagaagggactccagcccaaatggactactgtaagccacccttcagtgatcactcaaatccatgatcgtagagacatttgagttgttttagcaatctccttgatgaatgggtacatgaaatttcaaagcagtggaagggaaagcacaagattgtcttataccaagctcccttgtaaataaaatatagtaaggctcctgataagatacccactgtgagtaatggtcagatactacaagggtgtaaagtgagggtcgaagcataaatctgtgaatggttttctagtcatcatttacacccccacccctctccagaaaacaagtgccttttaaatgtggctcatctttctttcctcctgagtttgtctggaggctcgccagtgctctggagatcgtaggtgtaaaggcagagatgttgagatgtaggtatttttaaaggccagatctcaatacagattggccactctcagccaaagagaagtgtaggaaaagagaaatatgctcattgactcaccaagtcagggaaaatttcagatcacctgactggctacactcagtttgaccctgtcctgtcaaagcccacatctctgtgaaattgttagccaattgcttaactcaagggtgaacttcccacagttcctagaatgccaaccaacctctcaggggctgccttcaatagtggattattccaactggacgcctgtggagactgtatttttcttctggctcctggacaagggctctcgcctccagaccacattgcatttgtggtgattgatgggaaggctgctttgaaatagttttgtcccgagacaagatctttggcagactgccccctcaggcttagctctacagaagatgaaaagaaaactgtggaagaaaagagcaccttcatgcaaagggttcactagcgagttgagccctgagaaagagagacaaatcaaaaattgtgacacttagaaatataaatccaggcttataattatctagaaatgaaagtgtaacttgatgaaccttaaggagcactcttctatcatatttcctaaaataacagactcatatggaaatggaaaatggtggcatggtctgacttaaacacgggtttcttttgtgacctgtctccctcccctccctaccctgtcaattcctggcttgatttgcttttcctttcttgccccatctcctcttttcacagatacaaaacagtatccggtgtttgtgggccacaagccaggacggaacaccacacagaggcacaggctggacatccagatgattatgatcatgaacggaaccctctacattgctgctaggtaaggggccttttccccatgtctgccttgagagtgtccaaaagcccaaggtcctaaatttaccagctatgcattatttttaagatcttgaggtttctaaatagagtgttatttaacttaaagcctcctttaacttatcaagcaatcattatttcaaaattgtctgtgtctgtttaaccctatgtggatttaaatagaaataatagcatatttgggcacttacactcaaataatccactgtttatcttgaacatatatgcaaatatttattcaagcacccattagaatgctctgctccttaatactctgtttgtttgtttgagatggagttttcgttctttgttgcccaggctggagtgcagtggtgcaatctcagctcactgaagcctccctctcctgggttcaagcaattctcttgcctcagcctcccaagtagctgttgtaacaggcatgcaccaccacgcctggctaatttggtatttttagtagagacagggtttcactatgttggtcaggctggtcttgaactcctgacctcaggtgattcacccacctcggcctcccaaagtgctgggattacaggcatgaaccacttcatctggcctaatacttatttgttaaattaaggtgaatgtgtaaacatgtattatatagtgtgaatgtaggtgtgtgcattaaacctatttgtatttttgcagttaacatatatatcattgataatctatatcatcactttgaaagaacggcaatgacaaccaaagaaagcattatatatatttcagaaggtttttatttggttttagtaaaaaaaaaatactcatccattggggaaatgttatttagacagacaggctgatgtcttaaggctgaatggcatggtaagaatacggctcaaacagggatcacataaatttaggcttttgttataattctgctcttaatttagccggaccacaagttgtctggccataagtatcctctgccaaatgagatgttgtatttgattaccttaatgaagtccctaaggagtccaacaatatatgatcctccattttgggagtgtgtagctattcaaaataattccaaatgaacagcaacatggagcactatcttgtagtgtcccctgtggtctttcctggctctacactgtttaatcatttcacactggggagaagaaatgaagattatgcttttttttgagacagggtttcactcccatcgtccaggctggagtgcagtggcgcgatctcagctcactgcaacctcctcccccgcaccagggttaaagcaattctcctgcctcagcctcctgagtagctgggactacaggtgcccgccaccacgcccagctaatttttgtatttttagtagagatggggttccaccatgttagccaggctggtctcaaactcctgaccttcaagtggtccacccgcctcgacctctcaaagtgccggaattacaggtgtgagccaccatgcccggtctagaattggagatcgtttctatctggcataaggaaagaacaagtaaataacagtggttgattcttctaaagcacttagatgttctgaggtgataagctgtgcaacataaagttaaaaaaaaaaggggctagactaaaacatcctgaaactgcccctaacttggctacaggaagcaatgtccaaatactttcctaaagttttactttacaaatacttatacagtatatacaactagtatgctctgcacatacaattcacaaacatagctgtagattctttatgaatgtcaattcatccaatcctggaaacaaccctacaagaaggagctattattattcccatgtcttataggaggaatccaagggacagataggtgaaatgatggggccaaaatgacagaggcaggatttgaaccaggatggtctcgctctagagtccatgctgtcattccctgtactatgctgcatactgaggaatagagctggtactgtttgtcctgagaatacccttgtaatagctgttgcccaagaacatggtcattatgagtagccattataaagcatttccataagatgctcagtagtcacctctctgatagaataccagctccttcttagatgtcatttttattttcctaaacgtaatagggttggaaaatgacatactcaattatctaagggctgatcaaaacaaatgataaaacattgaatctgtgagaaataggttgacttaagaatctcttgtgaattgttcactttccagttgagtttccgggggaaaaaatggtataacagactgcccttgtactcgatgatttagcagggcgtggaccataggtcccagggctacatgagtgttaggagcaaggtactatgcagacttaaaagtgaccattagtctagctcattaaaaccaagacagttttattctaactcctcaccccaaggaaggaaaggaaaagaaggataaaaagaagaaacacactaatatttgaaactatcaaataagctcatctttactaaaggtcaagtttgtatcactgtagcattgacatgtttgttttcacaccatacgcagccacttcctctcaacagacaaccttagaaaaattcttaaaggagttccatgcccaccatatttaggacctcttctctccttttaattttacactttatttttacacttccaactttaattcactttaattttacacttctcaacattgctctgagagatctaggtttctaggcagcaagtaacacgatttaaagctaaatccctccccgcaccccaccccccggccaacccccgcccgcccaggttcaagccatggcaacacaattcagtggtgcttgctggagggggaagaggaagtcctaggattaagtcagtttatgttcaaataacttaattcaggaagaacagcatatgagacctgggatgtacactaagatggttgggaatgacccctgaccctggtctgtggtttaccataaagcaccatttttatttgctagggccatgtgagcttttggatattgaaaaagattgtcattgtccaaaagaagatttcattcacagaattctgtgtttaaaaggcttcccagttcttctagacaattgctgtcagcaatcgcaagccaagtcccatccagaacccgggggactgagtgagggttggtggcaagaacccctttcaattctgctttattattatccactttgtaaattcctcttcttttttaatctctaaactgctaattaacataaacaggccatgccaaaagggggcaatctgagagctttctgaggagctgccaatgcatattaatcagttgttcatttacaattcatatgttcagctcaaacttaagttctgaggggaggcaggcaaggaaaagcctcgagtcatctcaaacctgatagcaaagtaataggcaattccattccaataatgagtctgaccacagcaccaccaataaagtcaagcaagtaataaacaaatgcaataaaactgccttgaaattaaagggcagggtgattctggcagcctactgaagtttgaagaaacttgcctattcagcaatttacaaaacaggcccctactcctccaccccttaccacgcccttccacccccttccaccccctccccccatgcacactcacagtagctggcaagggaattttctaagccaactgcccttcccgctcgttttatattcacgtgagtcggcctgttatctttctctgttgtatttttcctaaaacaaaaagcaaacagatttcccatgaactgaaaaaaattatatatatgtatatgtgaatcctgcaaataattcctttcttatcacctccccgctctttcttttaagtaacgaggggacttaaaagtctgtatgggagacgaggtcctggtttaaagctgtgggtaatttttcagccccaggacttcctgcattttagagaaagtcaatgttatttcaagggaaaatgagctgttttgctttccctcagtagccccccatctcctctgttgagtgtagttcttttcttttctttcttacaaattccagacaaaaacgcccttgtactcagctcacacagaaggggatgtttaaatatagccccacacctgagctgctgattctctttctccccttccaaggctagattggcagcaaattgtaaagacaacccaattctcagcaaaacaggaaggtgaacagaagcaagaaatgtaaactttagcttaagtacattttagactttaattgaccatcattatgagggaaaagagtggcttctggaaataattttacctttgtcgtcatccatcctgtcgatcaaatagtcacagttaagatggaaatatattttcaaaagagagagggcgatggagatcattttttttgttagccctcttgatgaacagatgtggcatgttgaataccaagtatttggtacgtgtatttgaagataatgaaagggcacacgaatccatctgtgttctagtctttgggccaatttaactttcagagccctcccttctgagctacatatatgcagatgctatagttctagtgtcagagagaagagctaatacaggaaagttttcataaacggtgttccttggagcacaatgccatgatttatcagaaggtgctaaatgggatccggagacatctcttgaaggctgcgctcttttcttcttgcatgtggatatcatgaacatggatatgggcttatctgccctgataagacataactcattaagcagaaaatgaactgttttgactctgtgtttgaccttgtattaatttttctttgcctatagggaccatatttatactgttgatatagacacatcacacacggaagaaatttattgtagcaaagtaagttgttttaaaactatatttgtaaaatgaaggacctttggatagttcttgaacagaatatgtattttaagtgcattaagatgatgtagctaatcataatttagagatgccaacatgcattttgtgaaatcctaattagggaataggttaggatttgatacatgttcagaaacagttatgtacttcatattttattcatcaaatatatgtgtacatatacattttgaagttttacataatttctacatttcttttataaaaatattgcctcatttatccaggaaaacatcagttttcataagtaaaattttgttccacaaatgtattctacaaaggtttcaatgttatatttccatgtcttgcagtattaagtttgatttgactgctgtggttcaggaacttgatcgttacccatttcagacagacataaagtataacctaagctttcctcataactccacatggggatattttagttaataaaacctgtgccataggagtagaagatcccttcagtccattaatctatgtgaaggagtataacctgaattaaatctttgtccacctagagtgaatgtcctctttatgtttaagaaaatgacttctgtattttaagaaaaaagccttctttataaaaattgatttatcaactgaaaggaaagggcaaggacatatattttatccaaatgagcataatttggcaaattaatttggatagtttatgaaaaatttccacactcttgtttattcttctttcttttctccttcatctttatctcaaacagaagaagaccattttgtggtttaatgaatagataggagttcaaaattaaacggacgttttcatctggaatcttttgttgttacggtgaattaatcatggagaaagggtgcagaaagctttcaataaatatatgttcagcctttagtctccccaagggaactcttacttctaaaatcaaacgcaacaacctctgggctctaattgatttctttcttgatccctgcagaaactgacatggaaatctagacaggccgatgtagacacatgcagaatgaagggaaaacataaggtaggcaattttcatttctcctgcagctgccactttgggttaagtttttgactgttatctccagccatagaccgtgatgtagaatggattgtgctttttcctttttccctcagtaattgcttttttcatcaacttactgaaggctttaatttgcaaaaatagtttgcttttaatgtgatgaaacattacaacagctgctaggcctgcatcatgaactacttaggcgcacacaggattatggacacaaagccggctgcccagagtcttgtcttctgagtgtacgccgatgcccacctccgcagtccaaggcccacagggagtctgtggaagagctcataaaaggctgccgcagacatgcagggttttgtgcctgtggtcatataacaacataaaaacacacttcaaccagcagctttgtacatcagggaacgctggagcatctggcattaaaattaatatgatgggaggttggcatttccaggcttgccttccttttgtgacataaaataaacacacaatcttccattctatgctttgtttttatttacgttgaaagagtaatcgttgatgtcggcatcatcttgtggttaacatcaggaagaacttgaacttttaatgggagaagtcctcagccacctccactttaaccttactgtcagccaaccatggcatacagtgaagaatcagtttctgtactgaatggacatgatacaaaacagtttgaattatttttcaggatgagtgccacaactttattaaagttcttctaaagaaaaacgatgatgcattgtttgtctgtggaactaatgccttcaacccttcctgcagaaactataaggtaaatgctatttgtcggttggaaccacactgccaggaggcatttcataatttactgtgattgtacctgcagcaacctaagaggggtaattcaacaccacctgagttcctctcacttgttcaacttaatgtattgctccacatgagtgatcctaagcaggcttctaagcttcctgtttgttcaggattgattgacacatctttaaagagcctgcctagcaaagttagtttctgtaagacccttttctctattgttcagaagactgacatacttaccacgtacaccatgtggatttcctctattttttttctccctcccaccccactatctaacctctgagcacaaaagcacacttatatggtgagtgatttctattctaaaaggtatctcaaaagcacggcatttgaaaccgtagactttcctacaagaacacaggaatttaattccattgagcactcagctttcttgaccacggccttgcttactttggctttatgcaagggctggaaaaagccctcttaaagagttagtaaatctagctggttttgatgcagctaacagaggtgctgatgaaggagcagggacctcgccaggcctggaagcagaggtggcagtgatctgaggtcttggctgcaccactgttagccttccttgtacatctttctgccagcctttgtctcaggaaacatgtactgtgtttctactgtggcccatcgctgaggttgtaaagacagacaggaggcctcaacccttagggaagccaggcagggagaagaaaacaacaatttcatggggttgctgccatggtgacatcatgcaatggattatggaagcacaacacaaaagttcctgccatgcatgaggtgaggagtctgggaaagcttcagaggatgaccccgtgtcttcaaactttcctacctgttgttcccacatcgggaacacaaataccaccgcccttaagaaacacaggctctacaagggcagggatcacatctgtgattctccagaacctaacatagtgcctcccaaacaggcgtttaattaatttttgtaaagcactgaatgaggcaatgcctaacctttgtcttaaagggtaaggagaagttagccaaatgaaggaagaaaagcattccagttagcagggaacagcatgaacaaaggcatggagtaagaaatggcctattgagcttgagaaatctcatttgattctgaattgtgtgactgtgaaatgacaagtgttaacagaaaaaactggagatgtagatagccccagggatgaagggaagagaatagataaaaccaaaccggtaggatttaataatagataagcacaggataaagagagagagaggtgagtcaagaatgactgctaggccatctcttggcgagtagatggatggggctgccaccaattcagacaggaaataaaggaagagttgtgagattggggttgggggttgggggagtgtgaaggtatgggctccattttgcacagtatgagaatgccaagcactgtgaacggcactgcctataggacatgaatagagctatctagcaagaagatggatcagtaagctttggtttagagacagatgtggagagaaatatagatttgggtttcatcatcataaagtgaaaccctaggagtgggaagaatgagaaaagcaatgataggctggaatccgcaccaacaagctcaccagaaaaaccccctgtctttttttggcatgtacagtgaagggagggtctgtttgaccctcatacttatcttccatcttacacttggaaatgggcaccaacagggccaggattagggtggagcaagtgaggcatgtggctcaggcacaaaatagaagggttcaccaaaaaattccgtaattaagatgttagatttttaatgcaatattttttaaaaatcaaaattaattaatacatacaggtctgtcataaaccaaagatcaagtttttaagtataaagacaagattcatcagtttataatagaggtagccagtctagcccagcatttactctagctagtgacagcatacagataaggtttcaactttaatttaccacttaatattccatccctgtttgtcattgtttaggactcattaagattaatgcttctaacaaatcccaaggaattccctagatggaaagctatcttttatgacaaagtacaggttttcttggcacagtaatatacaggccatgaatggtctggcttattcttcctgtacatgttccatttcccatgattctacacttataataatgccgtcacctcttgcttgttcttgccacacctgctgagacatgctccagtagcccaggcctctcagaagccacagatgggatgttgctcatgctcagttcccaacaatatgcctagcgctgtgaatggtagtaagaacccttggcattgctcagaaaagtgtatttttagactcaggggacagtgtgacattgctgatgatatgggacataatgtatttggctgcagggaaaacgacagcttctgtcttaagtgctttttatcaacagatcaggacaaaggttcaaagtgaaaacaatgaccagtcttccagtgaaaaacccaagtcttatcatagcacacaagcatcaagttgattagagtgacatgaagcaagagagtgacaaattttcagtatctgcctctctaccatgccctgatctatattaatttttataacacaagtaagctgaatgtgttagaaaggttatagccccaaattagattatcaagattatctaggggagagctttgaaggctacccactataaatctaaaagtgcactccctgcctttttcctcctattctctaaaccttttgaacttctgcaaaaatcaggctgggtctttgtataattatctgtacctgatagctgtttaacttcccaggagctgctgctgtgaagtctaagatttgatgactgcttcaagggttagttttcacttcttggaaagaggaagtcaccatggcttttgcctctggacctttccaacctcacaaaccgaaacatttgtacttcactacttcttgcctttgaccagctataggtatagccactttttttttttttttaggttagttacattataaagaaaaccatataccccttgtctattgtttcctccttgctaggattagagcgtgcacagcttaggataagggcatttccgttgcatcactgtgtgctaagcatcatttttgaatacatgccagacccacagaccacagagtctgtcagagttcaacaaaaagctcttggttggtataaaatatctgaaaaggactttcataaaaaaatgtgctgggtggaagagtacactgcttgaaagaatgtctgatttgaccatctttcccctaaaaatatgtttttaacacagctattttatgtgattctcaactacagtttaaaagtggcttcaacagggtccatctcaaagtgattacagattacaaaaggcctgtcacatcctggaaattatttctgagggtttagggcaaaagaaaaggttgttgtttgtaattaagtctgattatttcatttagatggatacattggaaccattcggggatgaattcagcggaatggccagatgcccatatgatgccaaacatgccaacgttgcactgtttgcaggtaagcgacctgatttctcctcgttgcacttgcttttgcttgtttcatcctgtcactgtgaatctgctctagaggattcgtggagtcacagttgtgctttgattctctggtgaatactgtaattaagaatgcctttctgtttgaaattagtatgaaaattgtacttttgcaagtctttgcttcacttacccatgtgtttgtgccttcaggaaaggataacagcatagcgctgaacatgtgatggatcagttagggaatgtttgggctcaaataatagaaaatcccacctcaaaccaccaatgtaaaaaaaaaaaattaaatttaaaatcccctactgatgtgcctttattgtttaaggtaggatggactttgggattggctaggttcaacaactcaacagtgtcatccgggaggcagctccttttcattcccatgctctatgtcgacctcatgatgagactggtggttctcacagtcagaggatgactgccagccccaattagggctacatgtcttcctgtccacatatagaaaagaaagggaaagaaacaaaaggaagcctctggaagctctctcagagcaatgaggccacatacccccaagcttccaacaaacatcttctcaaatatcattgacctgattaggttacacacccatctctgaccaaaagactatggtgggtgaggggagggtgctaattgcttaggctgacctctactccccaacactactccttctttccactgcaaaagatataaagaaatagcaaacagaccatcattttcagatgtagtgggatttttgtgtatgagtttgtgtgctttaattagaaatttatttaggaattcattaccagctgtgtatgtggaggtgggtgtaagagaagtgttggtataatagtgattcttatagcttgtaataaagcagttagctataatttccatcacaacagctaaaaactggcacatactagctggatgagggaccctagggctttgattatgaaacaagattagttcctggcttcctgaacctctccctcagtgtcattcatttgtgggcctggatctgcagtgatagattgtcaagttaagaagggcaggttcctcgggttctccccctaaatgagagcacaggattactgagaagcagttccgtcaagaatacaaagtcttgtagacctatttgtaaggtatgagcaaggctagtggaaagagtacttgagcatactcccaagtacatgactactgctggaggtcctcactgacacttggaacctgcattagttggggccttggagaatgtgggctgcaggggagaatttaaatttaactgtagggccaggagtggtagctctcacctgtaatcccagcactgtaggaggccaaggcggggctataggaatatagaatacatattctatagtcttatataaagaatgtctttatgacctggggctcaaaatccataagaaaagttatgattcgtagatattttttgggccaatttaaaggtttgctctctgcagtttaaatctaccaaaacttattgatatatagctgttaatattgcagatattaagacatctctaaattgaacctggacaaattttaattattttaagaccaaagacagacatcgagatctttgtttaaatatatttggatatgagtttttttaaaacaaacaaaacaataaaccattatgtttacactacatataaaagagcttgaacagtactatgttgtatgtaagtcactttgacatacaactaatgaatatctgcaatccactaaaagtgaatcacggaagtaatttttttattttgaatataattcttgtttccatgtaatcaacatagattttgctattctagaacaccccttttgattatttgttggcagagtgtttgctgagccaggaaggaaccaaaaaggtctagagactaatcttcagtctgctttattctcttatgcctgggatctaccctcaatcgtatctcccccaaagcatgaattactaaagaaagacctatttgaactcagcgtaaccccttcccctttcttcttggctttagccaagctgtgtttcggaatgtttttagtttgtgactttggagatgcggaagcaaatacctgttattgaaaccagattgcgagggtttagtgaactgtcaagcctgaggtcaagaggagctgttactctcaggacagtagcaatttagtcagcccgtttttgcttatgaaccctctctcttcaacttctctcacctgatcaggctgaggacttctttacttatgcatgtgcctaaaatttctggggacacaatcagcatctatctttccctgggctctcacctaatccagtttaccatggtgtggtggcagtagtagtgtccaaggatccttggccttgaggtttcagtcaaggtccagctaatcaagtgaagcagacatctttcatctaccctgttccctgagctgctgctgctgctgccgcttaaaaaaaattgccatgcaattttaaaatgaaaaatgtttcatctctcatgatcccaatttaaaatggttaggaatgtgggccaagagttttcccagcgactcttggatttttcccagttgtgctatctcatttgcctgatgttggaaagcaatctaggggatgtctttattattcctccacccccactgacttgctcccaccctgttcacctcttttctttttcttctaagatggaaaactatactcagccacagtgactgacttccttgccattgacgcagtcatttaccggagtcttggagaaagccctaccctgcggaccgtcaagcacgattcaaaatggttgaaaggtgaacaaacaattaaaagaaggagggtcggaggggaggggaatacacatcttgtgggagatttagagtctggagggaccagactgtatcttcatttgagtaatggcttctgacagacagaaacatgtaaattgcatctttggcttcaactgatttatttacctcccttttttccttcccctgagtttctggagtattaacaaaactaccaatgccacaacaatagaatacattacattcatgttttcttgcttcaagctctcatttctgagttctgcatgaaaagaactgaacaatgtattcatggaaggggacaggggcttggaggtggtggagaagaggagaaaagctattcacaaccctgtatgagtcagggtgacaaggcaatgtatacaaaatcttctctgtaataggggcattccattgtggaaaataaaattacagagatatgcaaaattccatatttcttcattgttgattgcaaagcttctgaaagagataatgtgtaagtgtgaatgccttgtgaaatcaccagcacttgcatgtgtgaagtcatttgaaatggttagtgttaaccaaatgtctaatggtgctacacttttaattaataacatgtctttggctacacttgattgaaattctgttaactctgtttgacatgttcccaattaaagtgcctgtttgtctacagaaccatactttgttcaagccgtggattacggagattatatctacttcttcttcagggaaatagcagtggagtataacaccatgggaaaggtaagaggggatgctgtccttggctcagtttgtaacattttcagaaacccacacctttggtcaaatgttgttataaatgatcttgaaatgagagccataaatctaataacagagtgcggtctggaggccctatctgctgtttcagaacagtaacgaaatcgcaggaaatttcttaagtatttctatggaaaatttatgtttggttggtttcatgctgagattcaagtatcttttttttctttttgagacggagtcttactcagttgcccaggctggagtgcagtggtacaatctcggctctctgcaacctctacctcccgggttcaagtgattctcctgcctcagcctcccgagtagctgggattacaggcatgcgccaccgtgcccagctaatttttttatttttagtagagacagggtttcgccatgttggcagggtggtctcgaactcctgacctcaagtaatttcacctgctgcagcctcccaaaatgctgggattacagacatgagcctccgcacctggcccgagattcaagtgtcttgagatgtggtttccaggtatactcaacagttttgttttttttttcttaattgagttgctccacagagactgtaactatgcagtatctttaatcaaattgagttttgatttttgtctttattgcaaaaagcaatatacaacacttaggggatgtccattttagttctttttaccagagagtagatcaaggtccctaagttggagggtaacatagaatgccagggtggcttgcacagattcagggcccagaggcagctagtgaggatggcagagattgtgcatacaaagtgtgcttttgtttgaggaaataaaaagctaagcagtctgtatggaaatgactttatgtggctcggagctgattccctgaaggatttatgactctgtattaaatgccacagccttatcttttaaaacatgctactctaatgctgagttttcctctttttttcttttctttcttttttttttttgttactgattttagaaacagtattaagcaccttgttgttttgtttctgttttcaaggaatgcagattctactaagatctccttgcaaaatgaatgcatttaattttccctatgtgtttttcctctgcaggtagttttcccaagagtggctcaggtttgtaagaatgatatgggaggatctcaaagagtcctggagaaacagtggacgtcgttcctgaaggcgcgcttgaactgctcagttcctggagactctcatttttatttcaacattctccaggcagttacagatgtgattcgtatcaacgggcgtgatgttgtcctggcaacgttttctacaccttataacaggtaatcatgccctagctgtgttgacctcatcaattcttcctggcttccttctcccagggggttctcttctaataaaccatatttgcaactgactgaaaattgcattcattgtgtgtagctaagaagcacttaacacttagttttcatcaacaaattaaaagtagtttataagcactattaagttaggttttaggggaagtaattagataaattatgacaatatcttctatttatataagcctggtatataaacactttttatgtgttatttataaatccttctagtaatcctagaaactagataatattgtcttctttttccacttaaggaaagtgagctcgacatattatactacctggtctaagtagtcagtagatggaagaggcagtttggaactcaagaatgttcgtcctgtctcttctaggtcatctaataatttgcagtatttgacttttaatattctcatgacgggatcagtaccttttgaagttaaaacattggaaatgtattaaattgctacagggtgaaatctaggattcaagataaaggactttggttattaacctgtccaacaaagccacccttgggcaagctcactcaccaagttgggccacaacccagaccccaaccacagcaccagaatctgactctggaaggctctagtgagaatttataaatcatcaaacattgtacctacaaattatgagtgtcagcctagtcactcctatttttgtatttacttaaaactaagactttgagcaactaaatgatgcactggtaattgttcctagagcagtgaaaatgtgtatagaacagaaggaagataagcattagtgtttttccttagtactcagctctctgttaagccaacaagatttcagagtcctcgtattgttgtgtgaaaatgatcctaacagtgtgcatggtcgtgaaatctaaattcatgcactgtgttctcatttctgtgcagaattttgggtgttctgtattgagtatgttcctctagtaatactgttttgctttgaattataaaactttttacaaaaacttttaagaacttgatgagtgcctaaatgacaggcaccaaaatgataaaactaaaggataacatctagaaagaaatgcttaagaacagagcaaacttcatgaaggatgaaatcatgttcctcaattatacagcggatgagagtcaagctccccactgaaaataatatgaaaatacgaacccgtattgcaccaagaagtattcagttagatataagtaagctttaaacatctgtagggatttttagacttgtggataaaaacgatatttaaaaattcaggcttttattgctcatacatcagagcctatctctctaggattttgaaaaagtatactgtcttggcacatggaaatgcaggggctaccggaatctaagaccagttctagttttctagtttctgttttgttttgtttgttttgtcttgttttttaagggtgtgggttactttgtgattacaatatagtagtaagcccttaaatattatagataactccatttacagtattttcttaaacggcccctaagaaatatccacttagtgcatgattatgcagtctcagaaatcatatttgtttggtaatctgtacccacctaaaaatatacatacccattgtcatctataaattatagtccctctgttttcactttctctggtttcatccctctacttcatgctttacacatgcaaacttggtcatgtcaaattgtttcaaatccatttgccctgaggataaagccctagctctctggcatgacacacaagcccccacagggtctggccccatttccttctctagttcatcccctcccatcctctgccatgcagcctgtgccatgggctgatcggagcaaagatctgctccttgaatgtgccatgctttgctcattcattgctttctgcgagatttgcccacctgaccaacatctgcccactaaaaccctgcgggtacttcaaatgtcagctagtcacctcctatgggaccttgtgcatacttctttcatactctgctcttaccagaccgtcctgaagatgttgttgttatgatttttgttattattattattattttttttttcctgagacggagtctcgctctgtcacccaggctggagtgcaatgagccatctctactcgctgcaacctccgcctccttgttcaagcaattctccttatttttgtcattattcttatatttgcctccacactgaagtgtgagccaactgagggcaagaccctatgttgtttgtggtgcacttactgccttaagtaggggttctataaacatatgttgaatgaacggaagatgggaaggaatgaaggaaaattgaaaggaaagaaaggaacgaaggagagaaatgtaaggaaggaggaagaaaggatttcacaactgattctaacctcaggaagactacgaaaccctaggatatctttagttattacgaggtgcatcagaaaatacttcaaatagtatttatcctatttttcttaatatataaagaaaatactatatgtaaatgtgttactttccgaaaaggaatatgtgatgagagtgttacgaaatcaaataaataatgcaaaggttctgaaattccaaaacaaatgagaatcactgtcttttttttttttttttttttcttcagacagagtctcactctgtcgcccaggctggagtgcagtggcttagtctcagctcactgcaacctccacttcccaggttcaagcaattctcctgcttcagcctccggagtagctgggattacaggtgcccaccatcatgcctggctaatttttgtatttttagtagagacggggtttcaccatgttggccactctggtcttgaactcatgatctcaagttatccacccacctcagcctcccaaagtgccaggattataggcgtgagccacttcgcccggcctatcactgtcttatacacttaattctgtgaacaacatatgtacatgtataaatttataagcatttaaaatttattttgccaccttattttaaataagcattttaagcttctccctatttcttgctttaagcaattattattaagcaattattattcaataattttcttatgaaattaaagatggaataaattctcctaatcatttatgaagttatttttatatctgttcaacatttgcaaaattcaagacaaaatcattctctctggatgatattccctgccctggatgatgttcccacactgcagggcacccgtgtctcttgtcctgggcgctcttgccatgtaatgacccactatctcaaagcctgattaaaactcttggccagctggtgcctgtaatttatttgatcaaaatcaaggagcaactctagtcaaaaacaaatgtgggtccaaatgtaaactgtgcacccagatgaatgaataattcattccttcccatcattgattaaaaaaagaagcctaagtccttccaggggtgccaggcaaggatataattataggtggagctgatggccattattgttatttatcactttataaagtactttatttgcaaagtgatggcattttagaaacttaaattgtttagtcttacgtaagtaatcaggaaggtaaaaatttaaatgtacagagactaacataaaatttgtgtgggtttccccacaaacatattctcacaccctaagttcttggctcgaaaaaccaaattcaaagaagcaatatgtggacaatgggagagcatttttgtttcaaattttcaccaatattagtgacacagaacgctctccagagacttcagagaggtcattaactgataattagtaccagggaattcatgaaacttctatcactagctcaacaattcttcttttataaataaaatcagttcaagaagcaatgtagacatgaagagtttttttcctctctgtgagcttcctataactaccccattctttaaggcaactgatgcaaatttgattgagagaaatattttctttgtgtactaagatcccttatatttatagtgtccaaggtatgaactttaaatttcatttgctgtaccaggaaagtttctctggagtatgttccaaaccacatgcataaccattgcatgagtaacacttgatgtgaaatatcatgttgtagcatccctgggtctgcagtctgtgcctatgacatgcttgacattgccagtgtttttactgggagattcaaggaacagaagtctcctgattccacctggacaccagttcctgatgaacgagttcctaagcccaggtatgtgcaaatattcatatggctattttaaactttagaaatggcaaagcttgcacctctgataatgaacatcctatgaactgcgcaccagtgccttccatgccagccaagcagattgccttcatctcattaaccaaaacccaaagttaccttctcatatactcaaaccaatgttcctctagtcttctgcttaacctccatatatgttatttatccaacgtaacactacaatggtggaaaccatctgaggtgtcactggcttatagttgggaaaactgaggcctggagaggtaaagggtattgtacaagttcaatagcgggggttgggggtggtgatttccgctgcttctttatgcttcctttcaattttatagagacccatgtctttaaacccaaataaaatatgaaatataaatagtgttttccggatttgtgaccaagctggatcagagctcagtctaggactctagaccgagggtgagaagaatccagcgggtacagtggaccattaagatgtctctggtctgccaggttttggtctgttttgggtccaaatacagtgcagtgtcctcctccccaaatcatggcttagaattcttttcatgggatactatggtccagaggcaacccagagacctctcagtcctatgtagtctcttcccaaacaggctaattcatcctaactgggacaggagggaagtccccgctaagccctttgcgtgcctctcttctgtggcacgcactcacacctccattgcagcatttgcactccaagtttcatagaaacaacccatggtgtctgtcttccccaggagttgtgtgcctctggaaggaagcccaatgtcttactaatttttttgtttttcaactctcttccgcaacctccagtcctccccacaacatacctagccaagtacacttacatgaactaacttagataatacgaaccacttaaacccagaggagaaactcatccatcttcattacctgaattatctggcatgttgatattctgttacttatggagagcagactaggtgtgaaaagcacaccccagcaacctcagacagatagtcttaagtcattgcctgggattgttaactaccttctagatagttctagatagttccttctagcaggaaggggagttcagcctgagggatcaggtttcagtaagttcttatgtaataccctctccttggtatgtaaagatggtgtcactcaaccaataccagcacacatactttaagtgattttctactaatggcagtgagtttaattaaacatccttccacatgcctgcctcgtccctcttgcagcagtcaggatgctctacggggctggctgggttagtgccttgagacagtgtggacataggagtggttcatgctggtgtcgtgagggtccaatctcctcttctgcaccacccaggcaaaccaggtgtctggacaagatgggtttcagtgtttccctaatctgactttgctgggatgacccttgactcctgaaaccatagaatttcttgtagaagcaaatttttatggtcgtcattcaatgacaagaaatgacctttcaggaaagaatctgatataattggcttttcatacctgccaaaatcaaacaaaaataaaaacaacaataagaaacaaaaccaaaatgttctctgagcgagccccaggtaatgaaacatgattacacggagtcttgctggcacataccctggtgagttttggagagtcttttctttctacacttgcgaaaacgtcaacctaattctttccctctgtagagtaaatgcatgaggaatctctagcagcctttttggataagtaaaaccatccccgagatatgtgcaaaccacactcactcacttgtttcaagctccatcactgtttactgaggtttgtttgtgcttctgggaggaagccagcctgcccccagctgaggctgaactgtgctggctgaggctcctcagaaatgaggaggcggctcagaggaaatctcagcatattgtgcttggtggcattctgcattgttcaacttcctcctctcaggctgcagtacattctcctccattccagatgcttagagaagcagttcattcaaagaatttgccataaggcagaaaataagctccctccttcctcaccctttgtttcattttaggccaggttgctgtgctggctcatcctccttagaaagatatgcaacctccaatgagttccctgatgataccctgaacttcatcaagacgcacccgctcatggatgaggcagtgccctccatcttcaacaggccatggttcctgagaacaatggtcaggtgggtgtcaaacaaaccgtgtcctgatggatttcctaacttcatctcatgtcggagaaccaatcagtggatcatgctttgaaatgccacaaacatcttctgctatcctgggcattcattcagctgtgaaatggtggccgattggttggataccactaaacccctatacacacattcccagggagaagagttccaatattttcaggctagttggacacatgccagcaattagaggaaggaaatacctttccttctggattagcccattgatccaatctgtgcaaaaatagaggagcagtgaaggagaaccagtgaatggatgtggatacctgattggttggaaatgattacaaaacttgcagcagattccacctgagcatggctcatggattgtttgctgtcacacagagcacagataccacatttgctggtgtgaaggattcatagtttaatattctttttctgaactggtggccaacagcgaagggacagccaattagagatctgtggtagtattaaaaaactcttccttgtatttattcagagcttatttccaagcagttcaacaggctttcccaagtaccatcccactgtggtagccatcaaacaaaatgttaattaactttaccactatttttatactatgactttattaaaacatattaaagcactgtaatagctctggcacacaaaatggaaaccatggtatataacttgcaggagggtctatgttttctggttccagctatggtgcttaggacaactaggtccccatggagtgtcaaatgtccaagggatttcagagaaagcaaattgctagtaggacttatcccaggtatgcccttcacctttagctttaaatggatattgtttggcttgcaggtccttacagtttttagtagtgccattagcaccctacctcctcatccttcagaaagctttccaatcaaacattttgttgatgaaggccttgtatctcagaggaagagtatggagaaatcgcagtcattgcttttcaatgttaaattaaaggttaaatgaatttcttattacttcttaccctcctcataggagacattagtcttttccttgttcatgaaggggattattgctaagtggtttcaggtggttttggctattatagtacttggcctgcaaacacacacacacacacacacacacacacacacactctctcacacctccttcctcccctttggagccacactagtgctctgcaaatggaaataaagggccagaaccacttgagaacattatttatatgcatatatttttcttgaggttattactagaaggctatgtcgcagctgtttgaagtggaacagggaacactttaatgatagaccaacaaagagataagaaatgtggtcctgtcattttagataccgccttaccaaaattgcagtggacacagctgctgggccatatcagaatcacactgtggtttttctgggatcagagaagggaatcatcttgaagtttttggccagaataggaaatagtggttttctaaatgacagccttttcctggaggagatgagtgtttacaactctgaaaagtaagtggaatatttggttctttcttagtaattatttgttatgctattatggcccctttcattcagagaaaatcatgaccgactgaggttttatgcatttttagatgactttttagtgctgtttgtaaaaatttaacacctaaaaagcattattttctccttgccaatgtgtgtgtgtgtgtttatatagatacatatatgtgtgtgtgtttatatagatacatatacatgtgtgtgtttacgtgtgtgcaagagcagaagggtttgtttgtttcaccgccagttagattaagagattgccttgtgggctgggaagtgggatgtgagggtggggccgagaaaaagagaagagtctattaatgatattatcttgcctgatgaaattagatgcagctatgatggagtcgaagacaaaaggatcatgggcatgcagctggacagagcaagcagctctctgtatgttgcgttctctacctgtgtgataaaggttccccttggccggtgtgaacgatatgggaagtgtaaaaagtatgtattttgcctcattgacaattagaaagtccatggtggctaggaaacagtcctaggtagctcatggtcatcctcttcctgcagaacctgtattgcctccagagacccatattgtggatggataaaggaaggtggtgcctgcagccatttatcacccaacagcaggtaggcagcctgaggtgtgggagagggtgaagtggcttccagccaaggtgtattctagatgtaagatttgctctgctcacacacaccaccacacagctttctgtgcaaactccagcaacgggactgtcagcctttctcctaccctttcccatttcatagagcctcaccacatcacatgtggcagatttccaattgattaatcatcctcggactgattaaaaacacagaatggaaacacagtgggcttcaatgtattccctggagagagagacaagaaggtgcctgccttgatcatcatggtgggagaaaagcagagaaaaggagcaataggataccaattagattagtgagtggtttgtccagccatagcaaaaccggcttttgtaattgactgtgcagggctgagaagaaattgcagaacatttgttaagcaatgtaattgtactgcaagcatggtgtatacatccaataaaccttttcctgcgctgaagaacagttgaccctattactcatcaggccgtcaatcaattcttggcagttctccaacagatcagctagatgaggccagtccaccatgcctatgattttggtgtttaaaattgttaccctggctttaaatgcttagatggcattagctaagaggtttctttttatgcttttacttcagtggatgtgaaatccaaaataaatttgcagaagtattcaatgtttatctttgatgggttgtggcaggcagtttaggaggttagacagcacagatctttcttcaacacagccatttcttcaacctcctcagatccaaagggggaacagaaccatctttaaatcactgtgagcctcccttcctatttcagaatagctaaacaaacagatcaagggcatatctgatgaccactacctgcataatttgaggacaagtactctcgtaaacagagctgatgataactataaaatctgacctagaaatttgactaatgcaaaaggttgagtctctgtatattattagaacagctttgcaagtagcattattgacatgctataatcttagagctctgtacctttgcatgggaaccctcaaggtggaggagaaaggatcacaaagcatggtgaggggagctatgagatgacctatgtcctttctatgttcaacatgtgaccgaaggctataagactgaattttaaaaaattattgttaagtcaatataagaaccccaaaatagtttccttaaggtttgcattcatatttcaatgatgctggcattgcttaaaacatggggcgttccctttggagagtgggctccagggcatgatgaatattggctgtcattaccactagaaatcttcatcttttgagggatttgatttttaatgtggcaaaaaagattagaaaccaaacacggtggattattagatcaagctgtgactttcaaaatagttttcctatacggctcataaataaactctgaaagcagttgcaaaataagagtttcaattatattatgggaatatgtacaaagtgcccccaaaggaaggtgactctggtgtgcttattttaaaaatcaaaatagcttttattaaaattggttttgttaatgtcatgttgcttgtacagcccaatggtgacctagtagacttggaagaaacatgagcatgtcaaagagaatgagagtaatactcccaaggactggggcagggctgggagtgaacaaataaccaagcagtctccacaaaatgcaccaccggctcctgtcccctcacttggacctttgaacactttatcgtccaagtttttggctagataaatgtctaggcaaaaaaccttgcctaggaaggcaagggtaggagtgaaaaagagaatagagaaaaaaagatttttctttttaatttatagacttccatattgtttctatgaggcgtgtattttaacatctaaacttcttaaatgtttaagaaatgctcagagaattagagtaaagaaggatgtaaataatctgcaagctaattatctccctgaataatatctgaattcactgcttaaaccatggcttctctttggagagtcacctaagactcgtttctataaacttcagagataaattttaaagctgttatgtatttcttttttgcacctgccactcaatttatcaaactgtgttactgtctttagtgaagcttgactcatttctgaagactcacgttattgtattcatttctgtctctctttcccttccttttttaaaagactgacttttgagcaggacatagagcgtggcaatacagatggtctgggggactgtcacagtaagtacagtcttttatccatttttatctttgggcaaagatgctttcagtgaatggcctagaaacatcagctcacatgtggaactgagtgcagctgacactaaagcatgcgtaaatgacggaaatcatcttctaaataccaaacaaagaaagcagtgcgttctaaagccagtgttgtcaatgttgtcactataaatgctggcacctatttcattaattctaatgcaggggaaaaaattcaccctagaggatattaattgtagcaaagcagtaagttaaatcagcatttccattacaaaatgacagttttgctgtttttaaaaacatgcttttatactgtcattttccgccaaataataataagattgatcattgtactctagctttttaattgagtgggcctgttttattcttgaacatatcgactaacaaaagcaattatgtttttaaattagatttgtgtctattaccatatgtaataggaaaaaaaatttcagaaataacccacaagtacaaggcaattcaaaataatctttttataggaattggcctactatgtaaatctcagagatagttattaaatggtaacattttagttagaactttacgtaaaggatctggctcaaatttctgcccagttgtcatgtgacccgattaatatcaatattctcctgaaaatgctttattaatgctaatttaaagaataataccatactcttggaaaatatgtttagtttgtgctgtttcgaatgttatatatgctgaatttcaagaagcttgcattcaaaatggcaccaaataatagcttctaagggaatgaagctatattatcctgatatttgattctataacggaagtcacggacataactctaaatctttcagtcataagtactgaaatttcagactctaaagtgtcattcaactttctaccttatcttttttagagattagttataatcaaataaagagggctaaaggcagacttatctccaaatctttgccatatacatatttttcatttacaaatattatatattggcaaaaattcttattatgtcttacacacaaaattgatgagttaataaataagcataggagaagtgtcatcactaaaagatgtatgttacgtgtgtgcgttcatccgtatcagggaaatagtttgatgtttgatcagtggaccttaatcatcttggtgcattatagctttatttgcaaggaaacaggttttaagatgtgtgtgtgtgtgtgtgtgtgtgtgtgtgtgcatgcgtgcacgctttattaacagcttagttagctgatgttaatgagctattttcatcatatttatattacttgcaatagtggtgtctgtagaaaaataggggtgtagatttggatcaaatcagaaaatacgtgaaacatgtaaagatggttggtactgtgtctataaaatgtccactataccagtaggctcacacccttatctgtgttctcaggcagaagaacctaaggaagcctctgtatgtagcataggggacgctctcaggtcccaaccctgtgctttactctttatttccagagtaatcttagtggtcaagcaagcccctggatctgccttcgtgctttgtagtgtgcctttgacctttaaccccactcttgcggaggcacttgccaagggtgcttgctcggggcaggaggtaaggctgcccctctgcctgcctgcctttgctcatggcttctcctctccccgtgttcctgctgaagcatgaactacctctattagacagacctatccccacataggtattcagggaggatttctctaactggtacaatcattataactggtacaaaattaacaggattttaaagggaaatgaggaaatcacaaagagccagtgttagaggctgagtgaaccagagatctgaccccaacacacagcacacacccagatatgttgcctaatatgtgtaagggtttgttttttgttttaacttccaaactaaaacccctgatgatttcagaacactgtaacactggacagtttctcacagcatggttgtgaggatgaagtaaaaagagaatgtaaagaataagtgttttctttgtaagtgtggtccaggtatcacttatgcatatgcatgtccctctgtataaagaagggtttaaactctcgaagtcacctataattgcagttaccatttcgtctgccaactcttgcattttctctgcctcttggcaaaggcagtgacttggaggaaattcacttggtggaagagatatggaggtgagaaatcggactgagtagaaggcatcttacattacacgcagaaattaaaaagcacttacttagtatcggggaccatacgctggcatagttctgtgttagctcattcccacttatgtaagtcgccccaagcagagcgtaaaacattaagtaaccttctcctcccttttgtctttcagattcctttgtggcactgaatggtaaggaagatattactctcataattccatactggtggaaacctatctgagaatgtctatttcattaatcctcttgagtatgttcaaatcttaagtttctttttaattaattttttatcctcatcatttttttatagacatttcaactcctctaccagataatgaaatgtcttacaacacagtgtatggtcagtttacggattttttttttttttttaaattcgtgaagtcattcatccagcagtagtttatagttttcattcctaaacatcatggaccagattctttgttactttagggccccaattcactaaaattatttattaatttcaccgtccttcaaaaattactctgcctatgtgagacaattgatgtgggagactgagtcctaaatttttaatccagataacatgaaatatgccaaccttagggaatttggtgaatacatttaatgagttcttgagggagaagaaattgcttttgaacataagtatatccaagacaaaggaataatgctcctaactgatagactatagctcctcagctgatacagttcaccatcccccaaaatgctggcactcaggacaataccctctgctggcgaaaatctatacaggatacacaggtcaggctcttattagacaaaactttccaatatagtatgaaattggccactgaaatttaagctcaaaaagagtatgaatatttagatatgttttcagtgcgatttcttcagaatgtagacaaggaagagtgacgcagtggaaatgatgtgcaaacaggatttatctcattgttcttggtctgaaatacacaatcactatattaaacaaagctactaagcccataaacagaatattctgaactctttatatgagaagttgaaatggagctgttccatttacatttctcaaggtacccccaaatatttattagggtaaactatccatgtgtttttttaaagtatgatatgaaaaacatccatgtgatggcaaatttaagcctctgcattataatgcaagctgtgagtttcatgtatacacagccattttatagtttgtgtgtttaagatatataatcaagcaacagatccaggacagtctttaagtacagaaataggtaaataagggagggagaaaaataaattttaaaaaagggaaaagaaaagaaacaaaggggaaggaaaagaaagcaatgcaggtttatgatccaaagaaatagttcctgatggctacaaatgtgtttaatagctctttgtaaactctcactccctgtgtcaaattagcatacataaatagcctttttgaatatcttaaagactggcttatacattggagctgtgtaggtatggaaaacagtgcttggtttctcctgactggcctccttgtgaagtaaggcagtgtggagtagataagcccacagaattcatccaactttaatgttccctcatctatgattgaaaccagaatattgaacaccaaagactagaagaaaaattgctcagaaggcaaatgtcacctagttgagactgccttgaggaaaaaaccgcacttagcatctgcttttttccaatatgatactttgcgatcatttcctataattgaatagtcttcatcagattttgagaaattaagatcttgaaacgaattgaaccagcaacctccccagcattcatcaatcataccaagaccaattttaactcccaggtaatttcttaaatagacagaataattaaactatgagatactcttatgaacaaaaatcactacctaagctatgttctctcttatttcctttacaaaaggaaaggtacttacttattaatgcttccgtgttaacactttaagggatgatgctcattcattttcaggtcttgaggcaactaaagaagaggtggaatttttctttcagctaatgatcctatccatttcaggctaaatctattcagtgtgaagcagttagatgattaattgaccatcaaaatgagagctggttcagacagtacttacaaaaatattggcaactttttaaaataaaccattgcaagggatgttaattttggagttaataaacccagaatagatttcactaattcattcggcaaatacttgttgagcaactactgtgtcctaggcactgtactgggcactgtatttgtagcatcgaaagaagaaacaaattgctaattgtatgagcatggatatagacaagaaagccaattccaaagtaaaaagtgcatgcacactgtttctagctgtatcctctgcatgtcctgcactctgtggctgagtgtaggctcatagagccaactacaaaaccagaactgcccaacccaggaaaagggatcatttcaataaacgatgcagagtttctgcttgtcaaaagctctgtatcacaccagttacatatgcaagaatcccttttagtgaattgggccctgattattttccttctctcttcctctcttgtattgatttagtgtctctgttttgtgtctaattgtctacaaacattgttaataggttagagtagtatgaagggtatctaacctctggaattacaatgacttgtagatatagagaaacaatatgatgcattaacgttaactttcaaaatatacctatttatttgtattttatgagaatgataaagcataagctccattgattaaaaggtgacctttcttattggactgataagacaaaaatatagattccaaatctattgacatatgatatcacatccacaaatgtttgcctatttttgtagcattattttggttgcaaagtctcttagggaatgcacaaaaataatacaaccttaaaaatcagactagaagatggaatataagtggtttccttgtaatttttttttaagcttggagaggtaataacacatctttgaattcaaactgaggactgctgcttaatggtgcttttacagggtggttctaaaatttttgagagtcaggtattgctttctctgactgtttaattcaccactggcacgtgtttcctatcctcaagcataagtttaaaagattacaaacctcatgctgctcagttttttctttccagtaaatcagatgcatggtttctctagatttacatatagaaaatcgagatgtggtgggtattagactaacacttcagtgataggaagaagagactgatttctcatatttgtgtaaaacattctcttacctaactaccatctggtccacattaatttcctctcatagccatagctttccattaccaatgagttttccatgtattcacagcatatgggccaggaaatctttctacagagaatgtgtcccttaggcatatatttcccctagattaccgtattaagaaatgttctccctaaaccatacttatggcattaccataaaattgcctcttgaacacagttaaattgaaagtgctcaaaatgcgtatcaattcaggtaaaagaaatcttgctacttggaggggaggtattttttattcttccccactttctctttctaactccctacaaagctatttctaattatttgcttatgctgggcactgaattttctcttaggctgaccatatattttattaaagtagtcttgaattcaggagtggaaaaaaaaaagttatgttttagacctcaatgtaagctgaaaggaaataaaggaacttctatatttccatttctcaggctgattttccttcccctgttctcttatctgtatcatgacatgagatgtgaacctcagaaatgtaaaaacaaaaagtctagaataaagcattccttgaattttaaatgaacatgcttttagcagctggatacgaagcagactattttcaacaaattgaatgtttcccacttgtgtgagagccaaacaagtgccatacagaaagggacctcttcaatgttaccaaagctttgtggcagcatttaagtgtggtggctccatagaagtcactatagcatggacgagccacttggcttgctttttcctgctaatcaaagttttaagaagataaaaagctatctttgttatatatgttttgtctaatttgcaatattacagtctcctggggggaaatccaacttccaataataattgtaaaaaaaaaaaaagaatgcactgtacttattcttttaatctgtctttctagaggccaatattttatttatcatgtgcatggtgatcatacttcaaggctggagcttttggagttgttgtgagtctgccctactttccaccaaaggcaccaattatacatgcacagtagttgcccttgtatcttttaaaaattgttcaagaggttgttctgtgtaagccaataactccacttgaaaatcacgaggaggtcatattttatttctgccagagagaacaggtatcattgtgccagcttggatcaaagcacctgatacaatctgtatttaaccttgtggaatgatggagggagagcttacaaacgaattcacaggaaatggctagagtttctgctgtaactctcaacctagccattcttctcatattatcctatggtagcttatctgaacctcagaaatctatccttttctaatttgaatcattttagtcaacgcagcctcagaaacggaaaccatctattgaaataatacacaaaagggacagccgtaatagcgtgtagccgttgaagcctccattccaatgaaaagacagtgggaatagatccctttggaaaccactaactaatcccagaaagaggaatgcctgtgaagttgagttgaacctgaagactagacacactgtagaacctccataggaagggtgcagagtaactgagttacttgtgatagggacaagacttacccactaccagaaacctgccccatcggtcacaaatgggattcccagagtggacactttctgtgtttagtgctgccatgggaatatcaaagaaggacactggcctttcttgagcacctatgtgtcagacactgtgcaagatgctttcaccattatgtcactatcctcccaacaccgagaggtatctttatccccactgggtgcacaggaagaggttaagtgattccctgaggcccacccagcaagtatgagagataggatctggcccttcattttctaactacaagttcaatgggctttctgctgaacacaccccacaccaccaccaccaccaccaccaccaccaccactaagccgtgtcatttctagggccatctcctctcagtcttacagccagcttgggtgtcccacctccaggcctctgcgcaaagggaatgtgggtctctctggtgatgttttcctaactgtatttgtgatgaaaacagggcattccagttccctcttgcccagcacaaccacatcagattcgacggctcaagaggggtatgagtctaggggaggaatgctggactggaagcatctgcttgactcacctgacagcacagaccctttgggggcagtgtcttcccataatcaccaagacaagaagggtaaggccttggaaatgcctcttcctctcgggggagagggagggaaaagtggggaggactgtgtaactgcttccagctgaattttggcagcatttaaggaacctccaatgcgctatgattgaaagtttctcgaaaaagactgcaaccccatcctctatgtgaggcttgatcctaaattattctctgaccaaggaaaaaccacacaaaacaaataatatgtcctctgagcttcctctacccgaaaaaggtgtggcttggcccgaagcagatgctggcttctgacatcccttgccactcttcttagtctcattctgtgatttttggaccgtcttttcccaccataatgtgatggaatgcagttcgggctttggcaagtgaatgcaattgaagtaaaggccctgttaatcagtgaattgagaaatagcaggacaaagtcttttctggctggtagcatctctcactgttgcatggtgctgaatttgaatagagccatgttcctcagacgtactgtaattgcccttagaggatagtagctaagacaaaaatatgttatttaatcaagcagaattgctatgcatttacaacggaaaggaagccacactaaatgaaagggactctactgtgaactgtcctaaattctcctttgctttctttgcttagctgcagacaggaaatgtcatctcttttcttgccatttgctgcttctggtaacacatcctactttagttgcagctgcaaccaaagaggcctttacttgtccaaaaaacagtcttgtaaatcagagactgaaaagcccagttatgttgctgagctgtttctccccattcagaattgtttacttctatatgttttcaagagtttcatccaagcgggagtttgagtttcaagggcagagcagccactgtgacccttggaagacagtcgctattgcaccctcccccagagtgttctgcatacatatctccatcttcacttttagacaatgctttccggtcagactctcaggctacattttcatctgcttttttgcttctcatctcctgagagtgctgggcactctgctgctctatttgccaagtcaaaatataaagatggagccccttttgtcttgttcttgagcgtgtcctcttaactgattttattttcttctatagacttcctcttagtaataagccctgactcaaatctttttttttttttttttgagatggagtcttactctgttgcctacgctggagtgcagtggtgcgatctcagctcactgcaacctccgcctcccaagttgaagagattctccctgcctcagcttcccaagtagctgggattataggtgcccgccaccatgcccggctaatttttgtattttttttttttagtagtgacagggttttgccatgttggccaggctggtcttgaactcctgacctcaggtgatccacccgcctcggcttcccaaagtgctgggattacaggcttgagctgctgctcccggccaaatcttttttttttttttttttttttttaagctggttttgtctcatctccttctttcagtttgagggattccctgctctttccatcccgagaaagctccaggtagaagagaaactgtccggacagattacaagccttagcatatgccattatttgttatgtgtggctcctgacctcagatgtgctagtcctgactgtattctcaagaagagaaaactcagtagaaatcactttgtttttgcccactgcgttttttctgaaacaaaataaaacagcctttccaataaagcattaaatatgccaactaaatatctagctgttggttgcagtaattttcttttcatttcactgagaggggtagcgtgaattttctctaatcgttaactccccccaaggaatggaggttctcaaaaagtccatttaacactttgacacatcattttaaaattcggcattgttcattctcttgggtcttattatactgacaaagctggaagcagtctacatattgtcaaacaatggtggcagaggtgactgcatgggtgtttaacatgatcactgttcttgtgctagtaactccttgccttgccctgtcaaatttgagtttcttttctgtgattggttgtatgtttgatggggcaatgccaatgagttgttgtgcagaaattttaaagaaaagatgtagcttaatgttccttttatcatagtttttatgattttaatttccattttgctccaaattgttttttgtttaatgttcatgatttattttcaacttttgtttcattttgccaagcactgtgttatgacttagtgatggcgttactccgttggaaaagtcttgttccttttctgactcatgatggcgtcccttaacttgaacgaatctgtgatgccctcgcttcttttcattccctgatgtcggtgccttaatgatgtcacatccgtgtatgcagcatctcccgggatgcaagagtttcatgggttttctaagggcctgtgacgggtgctctttctactgggtcgattgtctcatgagaatgtgacatttgtgtgccccagctttaggagctaaatatactctggaattgtttctaaaatccatcacatttcctcactaagcagaaaatgtgcccgctgaccagctcactgaggagtcaagtgtccattgcccattttattttggccactggtaaaaatgccagtgagcaaggcatgcccatggctctactctgcagatatgctgactgccagtgagctggtcccattctttgtccacttcatcctccaaacaattctccatttccagagtatgtttgctgcgtttttctttcttttccttgctatgtctttcgtcttgatttaatcctgtgcgtccctcacattctgtcgaaacacccttcctcaccttgcagcctaacccccttctgctaccattgttcttagcctccccctttcaaaataacagacccaaaccctctgcccctctgtggaatgttccaaggctctttccttctacaccgtgagtagcattctgatgctgtatgtatatacagtcatactaacaaagcgtgagaagagacctgcacagcacgcggaagcattatcatagaaaatgaagtaattttctctctcagtaactggccttgcccttcattaccctactggccttgtctaatgtctcttgtccttgctgcttttctttaaaattgcctgatatctttcaagccctggattcattagtaaaaacacagccaactgctctgttttatctctggttctctagatgtctggagcctctagagcgagccctttaatcaccaagttgataaatgagatgcagccctgactacttctgtcttggttttgccacattaaaaaatacatattatttattcctcctataactattgaggtcgtaatgggtagttacaaaggggctctaatcacatataaataagaaagaaaatccagtttatttttagatctggcttattctccaccaccgcttcccacagcaaaagaaataagagctttcttttttaggttaaacaatactgagaacaaatagctattcttgtgcctcttattccttaccaaaagtaacaatactttaaagctgatttccaagaagtctatgaggtatgtaaggaaatcagccacatccagagcagccaagagagctgtgtagcatacacataaaatgtaaatgctgaccactgctatgaggacacaagaatatatcctgaatagaataaaaatcccctacttcagactttattttataataaagagttcttgtgagctctcagaaaacagacaaaatagtaaatatagagcagttcccatttaatcagaaatgccagagttgtagtatgcttctatcttttgggaaatctttaaagtgagatattatcacattattacatttagtccagaaaatatgcacattaaagacaagaataagatgtattacagaaacagaatttaaattagagattaagtgaataagctaaaatggatagcaaatgttgaatatattttaatcaatgtacaagctatttgtataagcagtttttagtttgggaaataatattccggtaagattcataagatctataaagatgattagtattgtccacatctcacaatcctaaatggaattttataaatcacagatgttatcaataattctctttatagttaattatttaatctttaaatttgcagtagcctacagcagtatttcctccgagggagatgagtagcaccttacatggcatgatttaggtggcagggatgtgatggccttcaagagtattgagtcatgtggtggaaatttatgcccttttcaatgctctttcagtcttctgcgttatcttcttgattatgtgaaaggaaaagtctcagtttggtgttttctcattaacaactccctaaacttgctactatctctttttgacaaagagagaatagggtttacactggggctttgtcttccaactggatctagctggaattaacattgttttgctttaagttaatttttgttttactggttacattttatcgttgaaaagtgacactttttttttatttgtgataatgatatcaagtttccctttgaaatacattttaaaggtaatttaaatagaatattaagtaaataatgcaggagttatgagggatataaaaatactaagtaaataatatggtaggtgagattcattgttatgactaaaattgtagtattggtagttgaatgaccaaagtttaggtgactgtgtactgtagcaattgaaggagtccagggaagattaaactattaccaagaactttgttctgacatttggaagaatgaggtttgatgaccactataccctctcctggctgggcttgcaaaaccaagtgaatacatgcgtcactccaagtgttgtaattatacaatccagtgcccttctgatttctttgctacctactgagctttgtgtttggggatggaaagtttcatgaaatagaaatttaaagtaacatggatttagactaataagaaattagccactctaggcttgttaagcatctggcaagttttttctccacaccagcagcaagcaccctagtgtggtctgccgctagttattactcaaattgtagcctagggaaagttgatgaaaagcctttccacttttcatctattttgctgatatccagaaggactcttgtgctacacagtgttgcccggcctggcaatagcttacccttgacccttctccttttctcccgttcaaactttacctattctaagttccaagccttcagtgtcagctgtctttattaacagactgagaaatctcattttaggtgagtatagttaatcatagatcctaccccctggttactcttacattttaacactctcccatgcttaaaatgtaatggatttgggattttaaagcaccctggttctcccaacacagaaggtaattttttggctcctatcaagtcatatgtaagtgattttatggacagagaaaattattcctgatgacagtaataaaggaagaaaaataggcctctcctcttttcctgactcttaaacttgggcttaattttctctgccatttcttcagtaatattaccgttaacaaaaacattttctgaggtgtctcaagcagaatttatcactggctctgtggtgcaatttggatgccaataaagagtaagaggctgtattagagatagacgtagttcctgtccaagaaatatcaaacaccagacagatggaacacaggtagacacaaaagcacaccaaaaggcctttatgaccaacattctctttgtgaaatgccaaaaccacacaccacagactttaaaaaaatatattagacaagtaaagacaacttggctgaacacatcaaggacatagaactgtgaaacagtttttcagctcctttccttcagttctttccctcagtaccaatattgtagcaataacacatcacctgacaaggaagacgaggaaagtgatggatgtttggtaaaagactcatatttaaaatttttgtgggagtgttggcaaactcaggcttttattttttttaagcctaagctttatttcaagaaaaaaaaaactcatactaatttgcattccttttattagtaaaaatgatcctattgcagtcgtttttaaatgtgagagtagagcaaggcagtttcaaggagacttcagaaaaagggctcctgtcttggggagtactaataatgggagggtaagggttttcacttccactcaacaatggaaaattaactgagtcaggtagaacgtgcatggtcagaggcaaggaacgcgaagagatagtgaattgattgtgacggttccaaaaactcttttgaattagagatcacttatttctgattttgaaggttagaggaaaggcatcttcaaagttcgtaagaaatttggtacataagctggtattgttgctgactatgaaaaatacagttcttaatatttagttcatcagtattttatttataaattgtgctatacacgacccataaagatttatcataatttttattgctctaaacttttagagattaaaaagtttaatttttagagagtaaagatttagcatcatttttattactctaaactgcctgtaatctcagctacttgggaagctgaggcaagggaattacttgaaccagggaggtggaggttgcagtcagccgagatcgtgccactgcattccagcctgggtgacagagggagactttgtctcaaaaaaaaaaaaaaaaaaaagagattaacaattttaacctctgaaagtttgggtgggtttaaagaatatttgtgggagtcatttaaagcacactgtttgggaaaagaagagtagggttgctaggcaaaatacaggatgctcagtttatttgaattgcagatacacctgaataatatttttaatattgaaacaaaactaaataattgttagtgtaaatataccgcaaatattgcataggacatacttttaactaaaacatttttgtttatccgaattaactgagagtacttaaactttttgctacctgacaattctatagaagatgtcactgataacttactcagtgaatatataagatctaatttatatattacatttggcctttaactcttagaaatctagaataatccatattctgatatgtttaagaaaaaatcttattccacgaaaaatattcttagcatacttgagttcagagaatgtctatgaaatattatatatgtgtttgaaatgtgataaagagtaatttaaagattattattgaaaacaggctttcaaatgccactttcaagtaaggaaggctcagaaatcaaattgttcttaaagaggagcatggttaaaactattggttcttttatgttttacttaacctcaaaattttaacagctgttatgttaaccatatgtattcctttttccttcctaaattatatggctgccctcctttttatttttatttttatttttttatcattttcatggctttggaggggtagaactggaattccgaaagcactaaaaaataatagtttaataatgctgacaatctcatctcaaagaaaggcaagacagcaacctttcctttgtttcttttttcctgcattcaacagaaattgaacaaacatgtgctatatgtaaaccttatgctgagtgttacagaagatactaatttgaatttcacataaacctgatattcagacagcttacagtttagtgagggatacccaaaggtgatctaaatgctggggcagagtgaagtctgacagtaagggaagtcaaggaaagagggggagggagagtactaagggagtctaaggggtggcacaactaattccaagtgggggacacaggaaagacctttcaaagtcttgaaggaaaagttagatttcacaggaggaagggcattccaagctgaataaagtccatgaccaagataccacactgtgaaattacagagtgtaataataaagaggcaaggagtgtgtggtgactaagtgtatggacgactagaatgggaaatgagattgaaatcctagcctggaaccttaaatgccatgccaaggagttttggctttagcaacaggaagtggaggatgggaaggtagacgttgggaagaaagggaccacaggagggtagaagtggggaaagacaaagatagcaagattgacaggtgatacatatataataaattgttcatttaatcatattaggttattaattacatgtacacaataagtttgggaaatggaattttgcatcaattttggatctaaagtgtctgttactacacatcgctggcattttcctggtagatgcttcttgcctatctagctctatcctaggtaaaaccccaggcaagctgaactccaaacttggacttcttcctctctttagttaaaacagtggggttcagctgagcacggtggcttaattaataatataatccaggatgccactgtttatttttactatattaatatttcttggtcacctacgagaaaaggaatctatatgtagtctccgtcttttctttgagggactgaggaaaatgatattgtgagcaagtcaggtgctgggctctcaaatggatgatgtgggtttccatgtttgaacgtgtgcagggggagagggtccagagccgagaagcccaagtggcaggctgtaattgttctttcagtagtgtgggcatagatgtagatttgatataattaattttgtatccttttgacaacttgctgaatttatctaaggtcttgatgagattattgtggaaagggtagcaggaaaaaaaaagttaaatgtcagccatgtagaaagctgtttcatctctctgcctgcctgaatttgcacacccgtatttgagttttcttttctagggataccactaaccttttattttttaacctaacattcattttctcaaaaaatgaaggacttaaattatgattatggagacttgaacttttgcttttaaaacgccaacttaaaccttagggtattaaaaaaatcaattcaccttctagaggtgcttctcacctttaatctctagccactttttcaagctgcatctacttgacatgacactttacccccacccttttccctcagtctctttttccattctctcccatcttttctacaaaaacacacacaatgacaaagttttctgacagcttaatggaactttcaaggactacggggactaggttaagtgtgatcttattaacagaacatctggagtggttaaaaatttgctctttaattggttcaacggcactgtgttcatctagattttgttttgtcctaacgataaaattgtgaagaatcaattagtagtttgcattatgtggaaaagtgggaaaataatatccgctttgtctcagacctttctttctgatagcctagtttcaccaagttttttttaaaaggcttgttagaagttttactttgcaaacttcactgctccatagacaaactagtccacagagggcaaaacagtggaaatcaggtaatttcctgagaatagcttctcttttcttgacattatacctgagactggcctcaaactacgtagggcttgctcaaactaactacatcacgcatgccattatcctggaaagacagaggatgaaaaaggtgtgttcatttgttggttccagggagatacaggttatgcaagtaatagataaactcttgcaaagtgtatgggcttctctagggactgaaaggagccatgtgaacctcatcatatgtaaatctcttagcactttaaattgtggaaacgccctgaagtatactaccgaaatgtagtggatatattaaaatatactgggtgcacagtagatgggatcttaattggtgtcagaaagccaattacaggcaatgtgaaggtttgtcacccttaattaatatttcttaagctcttataagtctacagcctgacaactatctttgtaaagagattcatttttaatggggtaataaatttttttccactccaattatttttaaatttcatattttttaaaaggatgcattccttttcaaacagatatctgcaattacttcttttttactgaaatcagaggcagtcattatgaacagtatagaaataatggaagttcggtatagtcaaccactgacaatgctttattagaaaggaaaatggtgtcgagaaatttatagggcagcaaactgcattatgcctaaccttttggacgtattaaagcatgtcatttccagtcttacagcctcttgttattcataaataatagatagcactggacacaatcatctgacatttgttaaggtaataaatataccctaagtgctgatgggtctcgcactccatgatttaaaagcacacagcagaaatttaatgtaacttaaaatgtctcatgtaattctatggatttgcagattcagttcaactcagcagatcaataagcacagagctctgttgagtgaactgttgtgctaggcatcttttattattataaagcaggaccttactttggtgaatgacacatgaactcaagtccctcttttcaccccgggaatataaaggagaagaaccttcgtgagtttcttttctctcgtctagtcatgcagagatgaaggtaaagattttggcatcccctaaaccattctcaaacgttgcttaatagctgtaagttgagttgagggagtgggttttgagatgatattagatgcaggcctttaaaggaagccactctgtccaatggtgggctccatcaagcattctgcttcttctgcacttgagaaccagttatgcctgggctgacccaatctaggacatacgtgagctctgtggtaccaaccactatctgacggccacagttacagagatgaggagtattagaaattctcctccaagtcttcctaccagagcaaatagagaccacaagcattgtttcagcagttttggtgcaagcaaattgggttgattcttttgcaggagtagcagcccagtattttgagctatatgccatgcttttgacagatactaagggaaagtgtttgttaggaatttgattgtctttccaataaaacaaggtcgatttctattctttgtcagagcatgatacccacagtaaagaaattatccaatgagaccttagatatgttttctggaatattatttatgttatttcaggacagcatgtctcaagctttagagaacttaagaatcatctggagttctggtttctgggcctaacccagagattctgaggctgaaactttgggcaggacttgaggatttctgtctctaattagttccaggtgatgttaatgctgagtggcactgattcagacattttccacgttgctgatgggctgtcttatttaagttcactagtcaaggttttgttgtagttgtaaatccttatttttacacttttggctaacacagttgaaccctaccaaagtgttgccttaaaatagtctaatcttggaccctgtacaagacaggcaacttgtcaaacattctagaaatactgtccttacattattaattgagcattaacacgttttctgcacaatgccaactgctttgtgttcatttattcaacctatttagtccttccaacaatgctcatcttatagccaacactactggggcctggagaccgagtgacatacccaaagtcacacagttagctatttgtagagccaacacgcaaacccaggtctttatgagctcaaagtgtatgttcttaaccagtaacacccagtctcatctttaacccagatctcaagaactacatttctagaaaattcaagttggaagatttagcagtattgaaacagacctgtttcttcatatctgttttatctttgctttatagagaaaattcaaagcaagtaatcaaataatccaagcaaagacttgcccaaatttcacaattttttaaggaggtccacttctccattttgtggctttgatgccttttgagagagtaaaggaaaaagatgggaccaggaagttggaaaatagaaatgctttgtctggttttagaaatcacttagatgttgtgtttctcgtcttatttaagaaagctgatgaaagaaaacttcaaaaagcaggaaaatacgccttgcagactctgctaaaactttgccaatgtaaaagaatcattacctttacggggacagtaacagttctaacacatgaaaccacaaaccagcattccagggcatggcttttaaaaattatcttatcatgactcttagtctagacatcagcccgtgctctggctgtagcactcccattggcaatgccatttctaaagcagtagagcagtggaggaacagtgaactgagcgttcccagcacacagggaaaaatgaagctgtttcttctctaaaaaaatgaaatagaatgaattccaggctcattctcccttctatccctgtgatgacatcccaaccaaaaatgcatcacttttaaaggtgatcgaagtggaagtgggttcatctacagtcaaccactccaagcattatttcaatatgtgagttttaaaatagcttctgaattcaggacattaaacagccaggccaggaagctacctccactttggcatggtcagtcattaactttatatatcttgaagaccatggcccctcctggtacctaatctgtagcctgccaggaaaaacacatacatacacacacacgcgcacacacacatgcacacacacacacacacacacttaaaggaaaaggaaactttaagttataaactccaagcctatttccatggctgctggcatgtcagtttattcctaagccatctggttcacattatgccgtaagacaagaagaaggctgcttcctgcccagataaccacagagagttcccatttcactttcagcgtggtcacctcgactggctggggtgtggctttgagaataaattgtctccagttagggtttttcccttgtttgttttcttctcttcttaatagggattacagcgggccctgtgtggttagcggggcgatgcttggctagtgattagttcattcatttatactgtcttgcaggaccgtgagcctggaattttgttgcagtaagatttgcaaacaagaaaaattgggctgttagattccattcactcaagttgttatgaggatttcaaggaaattgtaggcttgtcttactataaagcagaatcaagaatctatttttaggggatgctactccggggcttttcttggtgttttgccatctttcttagctctcagacccaacacaaaccctctctggctcagtgatggaggaaatgtccatcctcctttttgcctttgcatatttctctaaaggacacagagaggctttgttgtctttgtggtcaccgggtccactttacacagatgcctattaatcacttcactatggagacagacacatccatcatatcacagcagctcagaaacgggccgtccagtgaaagggggtgagaggggaaagtgcacacttaaccatttcgagttaggttactggttgcctgtgtcttacacgcttagggtggtaattggggtgggggtgagtagagctcttcctttgtatttagcttaataggtgtgattaattttacgtatttttgcttgtctgtttgcttcacattttgataggacagataacatctcccagctatttgtgtaaggtgcagggcattagtatactttaagattgagagttttaattttaaaaacagtaataataaatgcaggtagactagctgtgcttttgatgcaatgatactgactctttgaagccaagagttttgcgataatggattcaatgtggaacagagcaagccgaaagttagctttctcaggcaagagaaactgcagataaattaaccaagaactttccttctatgagtggcagatcttctaaacctcttttttaatcattcaaggctgtccacagccttccaaatggtatttctagctcttgctcttgtattttctctacaagtgctcattcatgtatgcattcctttactatttatttaaaagatatttactgagcacctttctgcctgaagattcagtggtgagttttagcagtctaggtgagaaaaacaagtatcatactagtgatgattttagaataaagggaatgcagagctctggggacactttagaaggaagaacttaactggcctaaggagtcagagaaggcttccccatttaagctgagccctaaagatagggtctgatgagtgggaaaatgagtagggacattccaggcagagagaacagcctgtatgagagccatgaagcaagcttgagtatggaagggtggctcatgcctccagcctaacagactagaagggagttagaccatttgctattactcactacggccttccctttccttccctccaaggctcagttcttgttgctctctctgctccagctaagatcctgtgcatctttaaggcttagctcaaatgccatttccaatgtaaagcttttgcccactgttgaagcagaagtgatgtaactcatgacatagccacactttggacagagttgtatgcaagcacttgccttcttccctgctggtttatgcctcattcatcattgtccttccccgacacctagtgcagtgcttggtaaatgtttgctgaaggcagccacaaagatgcttggagccaaaaccttgttatactaggagagtgataataaagaaacaacccaaccctaagttaggggaaaacatcatttctaaagcaaattgtctcagagcctggtgctaggttccctttgcacggaatagtatccatgagcaggactactagaaaacattttttaaaataaggaatgtagtgtttgatatttcaaaatttattaacatggtcatcataggaaaagtcagaattgtattgggcttcctcttagttttcagtttacaattgttcttattttgaatcacatgttgcagggtctaggggcagggtccttcataatcttttcattgctttggactctaaagaacttcaaatttcctctctgaggtctccctccagcatctgaaaactctcacctcaggaaaaaaaaaaaaaaacagtggagattctattctttctcagttctgccaatttaagacatgatttcagagaaatctctaagccagggtgtgccttgcttcctgcaataggaaggtggaaagactaaccatttagcaccttatgactggtgagaaatagctggtggttaatgaatcaatgcaaaggatttttcaaatactgttttcattactaatgccccattttcaattggtaagagcagaagaggatgcaggggttggcagaggaaggaatttcaagaccctagggtagagaagccaactctgattgttctctctgcagtgggaggatacctgcggaggggagtacaccaccctccaagggccctttacttgcccagggcttccaggcagcatctgaagcaagggatactcagctctagcctgttgccctttgccctttgccctttgcagagatgcattttttttttttctaattattcagttccactggggcactctgttgttgtaaataacccatttatcgtcatcgactcttttggatttttcccagaactaatttcatttttgaaatagtttctcttcttattgttttgagcaaatactgagcaccattatagatttatttttgtttgtctgatagatgctactattaaaattcttttatatgattggagatagaatttatttccatgacttcaaaagcaagggtgatagtcactctaaagattacctcccaagtttagaagttcatttaaaaatagctctacaatgtattgaaaacccatttattcagccatcatttgttgagttacccaactaagagctctgtggatggcaagggttataaatgccgaaaaaatgtggtacttgcccaggatttgcactccactgagaatccaactataattgccaacattttccacttctgttgttttaattatttcaaaattcagtaactataggcatcctgaaacagtatgcattcccttatattgcttcgaaatctcatatcacctttttgactacatttagaaggcacgaagtttggacctggaagcacaggtctactcctctcccatgggagaccaatagcaaatggaatccaatggagcagctgcgactatcacttggaagccctctgtgagccactaacccaccacttctcctttgtggcttcttttgagctttagatttgtccagcaaactacagcatttaagctctttcctattttttatttcctttgattcttgtaacaatccagtaaggcagtaagattaggtgtgttcacctcatgctacagataaaaaaactgaggcccagagatgttaagtcacttgccaaaaggtcacccagccagtaagtgggagcctgcaattccaagcccactgagatcttctctagctgcttttatcaccactactgacaagtctgctgtttccaagccttcacaatggctattccacaaagttgacttgatcatttctgtgaatgcttctttggcctttttcatgatataagcagaaagctttaagtttgaaaggcatttccaaaaataacgtttaccttatcttcttcaactgcactttcaacttactctctgatctgtttccatctttggacgtttctgaatttacacaagcagatgaggaaagccctctgcctccccatggatagatgaagacatgcaaaaatgtttttaaggccactctttatataacaaaatgagacgggggaaaaaatctgtctgagataccattttcctgaaaggtcagatcctacttaacttgttaacaaccaaaaacctgaactcaaatatcatccactaaaaaagagttcttcccagtgaaagaataagtagctttcatgagtctaaaatagccaaggaccttcagacatgaaagaagaatgatatttgggagctaaaagtaaggctaagaagcaatggatacatgtgaaaaatttgcagttttcccagtgaaaccaatgaattgctctagctttactctttccacgttccttttaaactgagagggcagtttaaattgtagaatgccaaagtcaattgtaaatagcttcctattataatacacatttattgggaatatccagtccccctaaatttggtagcctggaagggtttcatgaaatactcattgccatgaaaaaaacacctaatacacccccaccccattactggggccgtctagcctgtgttcaactcccactgaaatcaccaagtcaatgagagaaattaaaaccattttatccacaggtgtacatttttgtgcaattatatgtagggggttaaaaacggtgttcggtagaaccccatacataatcaaaattgaagaaaaatcagtagctattttagcataataaggaaatgcaaatttaagaaagaaaattttcattagcacatttccttggtgaataggtactaaaatatatttgaatgcaggacaccccactgtttggggagcttcacacataaaaggtgtgagttacagccaaatttccggctgttttttgcttctcagtttctaccccttaaaagctgatggagataaatctggaaatatttgaaaagtatcacatttgaaaattatttgatatcttaccgtcttgtacactctttccttatggtgaattgccttgactgccttttattaccaagggtatttgttggatcacagaatctttatttcttaagagatatttgctgcttctacttaagtcacaatcctttgtcacaggacaatcatttccacagcaaccaactgtgatgtcacaattgaagggaggaggacccttaggaaggaaagaaaaagagaatgtacttttcaggctaaggtttctgggttttaaaaccatcacttcagaaatcaaaatattttagcagaaaaacccccatgagaaagcttcaaggtctcggctgtgacaaagacaacatttcagtagaagtttaaggttgcgtgttgtgggcttgggaaggggtagagatctttatttcctttcattctaattctgtgccactgatacctgccagtaaaatacatgaaacatattccagaaagagttgatttagtagatgaaaaatgcgtctcccgagaccagagaaggtaccttttctgtcttgctatcatttccataataggaacaatgtttacatttcctcagcccatgcagtgcctctaatgtattcatgttctttcactctccagaggcaggaattgaggtattagagattttattttttagcgactgcatcaagcacttaagatctgacaactgtgatgtgtattctcacttggtattaaaaaataaaagcttctgtgtttgcatttgattagagtcactcagctgggtggctgattaagcaggaatagcgaaagcaccttccttcagaaacactgaatcctggttaatgtagtgtaagattacggatgggtgtagtcacataatttttattaaattgaagagattagctctgctgaaaaatcccactgtgacagcaaactctaggtgcaataatggtacctaacacttctcaaacccactacagggccccaaatggtcttatttctgaatcttctttcagttccagtgagaaagcttcattcaaatattcaggatagttacctgaaattgagtttgcactgtttttttttttttttttttttgagaggtgatgcaaaatcagcacaaacatttgtagtctgtgaactttagctatattctctcagtgtaaataaaaatgacacacactctctttcctctagttgcttaaaaggcaaacacttttccccagacggaggctccggtggccacaagggggccgtcggaaaagatcccaactggaagcccagagtgtgtgatttgtttgtctaacatgcataaaattgttgcctcttcctccagactcaggataacttggttatcccagttctaggaagggaaggttaaaaagccataaagaaggaaagaaagataacttttgaaagccaaaacctcccatattccctggagtgaagcagagtagaaagtgcaggtactggaaagagtgaacagcacttttctttctttctttttttgaaacggagtctcgctctgtcacccaggctggagtacagtggcctgatctcccttcactgcaacctccacctcccaggttcaaacaattctctacctcagcctccggagtacctaggatcacaagcccccgccaccgcgcctggctaattttttttttttttttttttttttttagtagagacgggggtttcaccatcttggccaggctggtcttcaactcctgacctcgtgatccacccgcctcggcctcccaaagtgctgggattacaggcgtgagtcaccgtgcccggcctgaacagcacttttttagacaacaaagaaggctacaaatggagtccatttacatactgcacacgaggggcttggggaggattaattggttaatgtttggcaagctgagcttggaagacaagttgtgcagaggtgctgttgtcacttactactgttattaattaacaaggtgaatgccaagcaaaaacaagcctcggggtgtgctttcatttcttaacgccatatgcgatgtctattgcaggagtgattcgggaaagttacctcaaaggccacgaccagctggttcccgtcaccctcttggccattgcagtcatcctggctttcgtcatgggggccgtcttctcgggcatcaccgtctactgcgtctgtgatcatcggcgcaaagacgtggctgtggtgcagcgcaaggagaaggagctcacccactcgcgccggggctccatgagcagcgtcaccaagctcagcggcctctttggggacactcaatccaaagacccaaagccggaggccatcctcacgccactcatgcacaacggcaagctcgccactcccggcaacacggccaagatgctcattaaagcagaccagcaccacctggacctgacggccctccccaccccagagtcaaccccaacgctgcagcagaagcggaagcccagccgcggcagccgcgagtgggagaggaaccagaacctcatcaatgcctgcacaaaggacatgccccccatgggctcccctgtgattcccacggacctgcccctgcgggcctcccccagccacatccccagcgtggtggtcctgcccatcacgcagcagggctaccagcatgagtacgtggaccagcccaaaatgagcgaggtggcccagatggcgctggaggaccaggccgccacactggagtataagaccatcaaggaacatctcagcagcaagagtcccaaccatggggtgaaccttgtggagaacctggacagcctgccccccaaagttccacagcgggaggcctccctgggtcccccgggagcctccctgtctcagaccggtctaagcaagcggctggaaatgcaccactcctcttcctacggggttgactataagaggagctaccccacgaactcgctcacgagaagccaccaggccaccactctcaaaagaaacaacactaactcctccaattcctctcacctctccagaaaccagagctttggcaggggagacaacccgccgcccgccccgcagagggtggactccatccaggtgcacagctcccagccatctggccaggccgtgactgtctcgaggcagcccagcctcaacgcctacaactcactgacaaggtcggggctgaagcgtacgccctcgctaaagccggacgtaccccccaaaccatcctttgctcccctttccacatccatgaagcccaatgatgcgtgtacataatcccagggggagggggtcaggtgtcgaaccagcaggcaaggcgaggtgcccgctcagctcagcaaggttctcaactgcctcgagtacccaccagaccaagaaggcctgcggc

SEQ ID NO: 90 - DNA, 9369 bp, Homo sapiens
gcactttgggaggccgaggcaggcagatcacgaggtcaggagttcgagatcagcctggccaacatagtgaaaccccgtctctactaaaaatacaaaaagttagctgggcaggtggcaggtgcctgtaatcctagctactcaggaggctgaggcaggagaatcgcttgaacccaggaggcaggggttgcagccagccgagatcgcgccaggcacaccagcccgggcaacagtgtgagactctgtctcaaaaaaaaaaaaagcaaatgaacacataatacctgcaaagcaagaaggcatcttccttttaatgttttattttgcctttgttttgcctgttagttgtgcccactttgcggtacaaaaaaataagtgaaataaaagtaagtaaaaatgatcatttctgcttacgtttacagctcatttcatattctgcaaaatgttttcccgtctgctatcaccgccgccatcctcacagcagcctgggagaaaggcagagccaaaagtctcatctccacttcgtgcatgggtgatctgaggcccagttaagaaaagtggctctaccgaggtcccagagttggttgctggaggcactggcaaaggaatccaggctccagcccccttctctgcctcctgccatcttccagttgcttttttcctttctctctttctctatctctttccccttctctctgccttgaactctctctctttctacttcaactttcctctccttgctccaaccctcagattggagtcagctttgcaagttgtccaaactttttgtcactctggaaacctgccagccccatggccacagccccatctcatcaaaagctcagcatctgcacctagagcaagccctttccggatgtcagcgtgcaaagattaactctggtctctccatctggccctagataagataagattaggagagcggcactataaataggcccccatccttcctcaggcgcaggccccagccagctcaggctacactatcccaggatcagcatggccgtccgccagtgggtaatcgccctggccttggctgccctccttgttgtggacaggggtgagtgggcagaacctggattctctgtggctttgtgttggtaggtgagcttggggtgagagcagaagcagggcctggagcaccctgtgaggcctcagctttttccatgtaccttcattctgcatatgcaccctccactgtgctggggaaagttctgggctgggagaaaagaaacttgggttcaaatcctgactggcgcagaattaccaaagtcccctaccctcttggggcctcagtttctccagctgtaaaagagggcattgttccagttcaaagctgcactgagcaactattgggctggaggctgtggggacagaagggagcaggtaggtcccagctctcaggagagactgacaagtatgctgggtgcagggtggtggatgctaagagagacctggccgaggtcttctgagctcccgatctctctgaaaggctgtggtttgggacttgggcagccatgtgagcacgacagagccctttcccaggactggacacatatacttggggcagggccctctcaggatctgggccatccctgcaatctcacagctaccatgtcaggcactgttctgagcccttaagacagattagtgacccaaacagaaaaagcacggtcctgatggagcataaatccaatggggtagaggaaaaggggaaaggcaataaacaagatggttacaatgtatgttaaacggtatgttagaagctgataaaagttaaggaaaaaatacttggcagggtgatgggcactggaagggggttgcaatttcaaatcaggggaggtatctctgagagtccgatgtttgagcaaagcttgaaggagatgagggactaagccatgtggatatctgggagaagattccaggcagagggaacagctcaggtgcaaaggacctgaggcaggggcatgcctggagtgactgaggtactgtaagaccagtgtggcaggaggggacattgtacggagtgataggagaggagatgagagaggcaaattggaactgtaccgggaaagaccttgttggccaacataagaacttggcttttcctctgactaaaatgggaggcactgaaagctttgagcagagagttatgtctttcaagggttgctctggttggtacattgagaataaactgaacagggaagcggggagaccagttaggacccgcctggacaaaagccataagttataaggcaacgcctggcaggatccagggccactgacctcatggccagtcccacacccatttccccagctggaaacagacctgggcacagggggaaagggaaacgggtctggggacctgttcaggagcagcctgcttacgcccagcctggcacctacacctacctactccttgagcagttgggaacactgaaaagcctgctctgaagaagtttggtttttgtttgtttgtttttgtttttgttttttgcacatttcagactactgcctgggctgagtgaggagggggcattttgggtcaaggtcaagggcagcctgggggtaaatgtagcttttccccacatcccccagaaagaaactctgacatcttagagttctgaacaccccctcctcccaatacactttaatttttttttttatttaaacaaaaatttttttttcaagacagagtcttgctttgttgcccaggctggagtgcagtggcacgatcttggctcactgcaacctctgcctcctaggttgaagcaattatcctgcctcagcctcctgagtagctgggattacaggcacatgccaccacacccaactaatttttgtatttttagtagagacggagtttcaccatgttggccaggctggtctcgaacttccaaccccaagatttgcccgcctcggcttcccaaggtgctgggattacaccaatgcactttagtattcaattcctgaacacccacagtgtaggacattgaaccaagtgctgcgcaaaggcagacataaaggaaccccaaggagctcaggtgcatagggaggcggggtgacccagtgagtgggacagtacatggtggtgtgaaagaagcctccatccagatctgctcaggaaactgttggggacgtcaaggacagcttcactggggggcagcatcaagccttgaaaggagggtatgattcggcgggaggagaacggagacgaagacatttcagggaggggacatggcatgagccaaagcagggcccaatctaggacccgtgagcagagaggaatagctggggcatggagaggtgtactgggaagtcagcccaagaagcaagtttagggtcagcttacgcagtaccctaaacataagactaagcagctcaggtccatagggaggcttagtgatcaggacagggaaccacggaagggctttatattttttaaatgcttttcttttccctaacagttaaatatcaagaaatgcacaaatcttatcactcgatgaatcttgacaatgtatacactcgtgtaacccaaacccccatcaagatacaggacctcttgagacaaggacttagggaagaaaaataaatacagaacatttccatagccccagaaattcccctatgtcagtcaatccctgcccccatcccagtgctctgacactttttttttttttttaagagacaaagtctcactctgttgcccaggctggagtgcagtggtgcaatcatagctcactgcagcttcaacctcctggattcaaacgatcctcctatctcagcctcacaagtagctgggactacaggtgcgtgccaccacactcagctaatttaaaaatttttttaaatttatttttatttatttatttatttatttttgagacggagttttgctctgtcacccaggttggagtccagtggcacaatcttggctcactgcaatctctgcctactgggttcaagtgattctcctgccacagcctcctaaatagctgggattataggtgtgcaccaccacgcccagcaaattttgtatttttagtagatatggggtttcaccatgttggtcaggctggtctcgaactcctgacttcaggtgatccacctgcctcagcttcccaaagcgctgggattacaggtgtgtgctactgcaacctgccctcattgttaaattttttgtagagatgaggtcttgctatgttgcccaggctggtctcaaactcctggcttcaagtgatcctcctgccccagcttcccaatgtgatttttttccatcatagattagttggcctgttctaggatttcacataaatggaatcatagggtatataatcttttgtgtgtggtttcttatgctcagcaaactatttttgagattcagccacgttattgcatgtatcagttgcttgttttaattgttcagtagtgccccattgtatttatttatccattctcctgttgaaggacatttggatcactttcagtttgggcaatttgacatggaagggttttaagcagttcagtgacaggtctaggtttgcattttgataccccaatgccaggcttaaacagcacattggggtgacttagtctaagtttctgtttccctctctctgtggaaataccctgtaatagcatctccaggaaaatataaaactacattgccttgcacacctccagtgatgggaaactcactacttctggagaaagcctctttcactgtggcatagctcccactgagagaaaattctgcttcatatggaacccaaacctgcttccctgcagcctcctcacagagatgggctctgctttgtgaggttgaaaagagtccatctctccctcagccccaggatagcccttcagagacttcagggagcatcctgcccttctctaatttacataaacgcccttccttccacctgtgccattagacatagctccagttccctcatccacccatcatgcttgtcagtcacatcacagtttgctcatgtcctttaagcagttcagccagaccttgaggggtacaccagtgtatgtagaaagagtcaggctctggactgcaacagacgtgtgggaaaatcctacctctgccttaacaaactgcattgcgtcacctctttgagcctctttcgtagttcgttaaactgacctatgccccaggaaacagattctgagctatacatgcaatttactggggagcgttcatgggagtaacatccatgaaggatgagggaagttgacttccatgcagcacaacagaggcttcagatgatcctacaggcagctttgggcgaggggatcaggccctttgtaaccacatcaacccgacatgggatatgggctgttcctgggtagtggatgcagccctgggcaaggcagcttcattctctgagggtaattcctaggaagagacttgcagtgagtggtcaatatttctggcagcaggggaaatgagtgcctcagacttgcgcgagggctcttgatggcagaacacagcatccactactatctcctttcttccctctgttacacagcagtaagataggggtggagaggagttaaaatcatgtgttctcaatgcccggcacataataactgctgaattgctattttataattattatatgggacacaacaattccagtgggatctaactaacaaggaataggctggactgtcaccttcctaatttttgaatttctgtctctgtttatggaacccaagatcacatcagctttctggcagccccattgtctggtggctcatcacctttccttgaggaattccaggttgggtagttgctggaccaagctccctgaagcagaagcagtcctcagacccctagacctggggtctagagccggcataatctaattcttgcttctttgtgtttcagaagtgccagtggcagcaggaaagctccctttctcaagaatggtaaggcagctgcgtgttgttctcaccttctctctgctgagaggagtcctctcgtccatgctgagaaaccagttattcttctccacgatcctgctcagacaccttcaatggctccaaggtggccaaggtggcctcctggcctgcacattccccacattagcccccaaggctgagtaggcccagccccctcacccaagtcccaagattggcctcaaagcccttatgatgtcccccacctggtgtccaaggccccttccatcagtgagatctccccacccaggcttagcaggacagggtgtgctctctgctctgtatagtgcagacaggcaggccacagagttcaggccaaagaggggaccctggcacactgaaagcacctgtggagtgtgccagcctcccaccaccacattccatctgattgtctaaacaccaagttgtccccgaatcctgattccaccttggcccttggcctaatgcccccagtgacccagaaggcagtggtactggcatccttgagactcttgagattgccccttcatgtagtggaatgaggaggctcggagccaccttcccatccacagcctcagcatcgtccccgtcagtccatcagaatccagccccgcttattcagtgccaaagagccaaatagtttacatacattatttcaattagccctatgtgagagaaacgccactattataatttttacagatgaggaaactgagactcagagagtggaaatacctcaattaaggttatacagctaatcagtggcaaaattcaggtttctagggttcgggccttcacggttgcaccgcacaacctttctcagcctatccctgtctcaggcactaatgccagtcctgactgagttctcaccttgacctcaggcctgtcctaaaaccctttcagacagcctcaattaagccccaagctctgccccatttcttcagccttcgcacactttgcagcctttctgacatgggcctgatagatcatgcaggccagggagagttcaggagcccccagggagagaggggcctcctgggaatgatgggtggttccgtatcctggggtcttcaatgggaccagcagaagttctgattagtgcctctgaagagggtgtgaacaagtccccaggagcttgagggcacaaactcactccacacacatagacataaacacaggcatacgcttgaatgcctgcacaccgggggctccagagacacaggtacacatatgtacacatccagccataggcacacacgtggtcatgcacacgcacatacaagcaaacacaccaaggggctctgagtggttggtttcatcttcactggacccacactgggggccttcttgactctgatacctcactggggccccactggttccgagcagaacccctgtatccctccccactgcctctgaatccctgagtcctctccctcccttctcttccacagcccatctgtgaacacatggtagagtctccaacctgttcccagatgtccaacctggtctgcggcactgatgggctcacatatacgaatgaatgccagctctgcttggcccggatgtaagtctgccccacaacccctgcttgcttgggtgggccccatctctggtgcacagtctgaaaggagcaagacttgacctgcttcttccttcatacacgcttgacctgagaagagtcctccaacatatgcccctaatagaatgagtgccagattaactcaaagaaggcacatggttccaagcagaaatctagaagctggtggtggatagggagtaggggcagaaaccattttccttgttctgccttgattgactaggtgacctcatctgttttttcattcgtctagccagcaattatttattgagcatttactatgtgctaggcactggggctagaacagagcctaagttagacagcatcactggccttctggaacatacaattggtgtaagggggaagccaggctgatagtcagccaattgcagcacagaattttttttttttttttttgagacagactctcactgtcactcaggctggagtgcagtggcacgatcttggctcattgcaacctccgcctcctgggttcaagtattctcctgcctcagcctcccgaatagctgggattacaggcgcccaccaccacacctggctaatttttttttttttttgtattttaagtagacatggggtttcaccatgttggccaggctggtctcgaactcccgatctcaagtgatccacccgcctcagcctcccaaagtgctaggattacaggcatgagccaccgtgcccggccttcagcacagaattctaagggatcagtggggcacacaggaataagtagaaattagctaggaaaaaggagcaagggaagataattccaagtagatgaatttgaaaaggtctacaaggaaaagtttacatttgaggaaatataagaagttggacatgttggagtataaggtttaagggagaatcagggagaggcaagaagtgagtccagaaagatgagcagggctagaacatgacctccctacatcagatcacctattggctcttagtttcttcatcaataaaacccatcttctatgatcctgagaactaaatgagaccatggaagtgaagaaagtcctcggaagctgcaaagctctggatagatgtgaaagtttgtatttgaggaaatataaggaacatcaggatgttgtcctagcttagagaaagatcatgctaatcaaagactcatggttaggaggtacattgggagtggaattgacaggcttggtatgtgactgtatgtaaaggctgaggggaaggaggcagcatactggtttctgatttgtgggcttgggtggccagtggtttcatgggctgagatgggtggtttgggggtctgtaccagttctgtggggggcagtgatgtttgtggacagttgagcccctaggacatcccactggatatggacaactgcatgaacaggtaggacataggtccgagctggagacagatttggcagccatcagcgtgcgctggtggtggaaaccccaggaagctaaaatcccccaggggaagggtgtacaaaaaaggaaaagctgtagaaggatgtgcccatggacccttgggatctgccctgtatccatacactgcatatgtgggcgacgctcagcaggatgtctggatggactgtgccaggtccctgaatggtacactacagctcctgagaaggtagcctcatgcctgtcttctttgatcctagaaaaaccaaacaggacatccagatcatgaaagatggcaaatgctgatcccacaggagcacctcaagccatgaagtgtcagctggagaacagtggtgggcatggagaggatatgacatgaaataaaagatccagcccaactg

SEQ ID NO: 91 - DNA, 64829 bp, Homo sapiens
agctttttcctggctctttcatatctttcagggttcagcttaaatgtcacctcctcctttcctaatcacactatttgtacttttcctgcacaggctttatccaaatttgattattttctcacttctttattgtctgtctcccccactagattacaagctcccagggcagggtgcgtactgtctgcagacaacgctgttatcaccagagcccggcactgagcttggcacatggcgagggctcagtaaactgaatgctgagtgaatgagacgccacgcgccgctttgccatcggtgctttctgagtgacgttaaaacgctctggatggtggcactgggattatggatggggcttatttagctccctccggcttgctactaaggggaggggtcgtcggtgggcctttcggcgccgctgcaagccaccgggttccgaagtcggaggccgaaacggcgtgggccccgaagcggggccgcttttcagggagtgcgcaggttagcgaggaccccggtgaggcgagacgccaccctcacttggctgtctttgttgctcccacctccccagccccagccgcctgcagtgattcgtgactcccgcaggcctctaaggaccgctgcgcgagggagggggcccgaggcgcccccggcccgccctcctcccggtcttcggatccgagccggtcctcgggaaagagcctgccaccgcgtccccgcagccaccctctccgcgtgcccggccctctccagtggcgggggcacgtgggcgcgcggggtgcgtggcaagccgcccctctccccacgcccgtccggccgtctcccgcgcgcgcgccccgcacacagcctccgtgcagtgggcagagcccggccccgcgcgcgccccgccccgcccctggctagccgcgcccgcccccgcgctcctgcttcctcccctctttccctccccgcctcccaggcgcgcacccctcccctcgcgcccctcccgcgccctacatccaccgcccggcggagggggctcagtccgcagccgccgccgccaccgccgcgcctcggcctcggtgcaggcagcggccgccgccgccgagacagctgcgcgggcgagcatccccacgcagtaagcccgctttctttccgcttgtgcgcgcgtgtgtgcctcccgcccgccggcgtcctgggtcccgggggagcggctgcccttctgccccgccgccgccgccgctcggggctggtccctgcggtcccggctgcctggccttccagggctgggtactgcggcttcggcggcctcgctgaggccgggggccaggggccgtcccgggctgcggggtgcgggacgagggactgcgagtgcgaggtcccccctggtgcgtgcctcggccttccctgggtttttggctcgatggggactaagaggcagtggggtggaggtgggggggatcgggagtgaaatgggggctctccatgttttcctgtgcgggggatggtggggagtgaggagggagtgaagggggggccctggttttgtcaccaaggatggcgggcagtggggggtggggcgaggtggggacacctcttggttctttcagccaggatagctagcaggggctgtggggagcgggtgaggatgaagcggtgggtcgactcccttggttttcccatcaaggatggcggggatcgtggaggggggagatgggagacctgccttgcttcgctcaacgaggatggcgggggtggcgacgaggagtagacgtgagggggcccgcctcggttttcttgactgggatgcttgtggggtggttggaggatgggggtggggtgcagaataaggagggagggggagggcccgctgtggttcttctgtccaagggggatggcgcgggtttggcgaatgggggtggggagggggtatttcagctccagcgtggaatctagagaagcacgaggaaggttctatcacgggggttgagccttagaaggtgggttttcaaaactgcagggcgtgacctctcccgcctcgaaaaacgtgaaatccttacaaggtgccgtctgttctaggctctgggacagaggtttctgctttcgaagtttctcttcctttcctctctgctcttagcgtccaggactaggtaaaggttaaaaaatcatcaaggctaagcgactgttgtgtcgttcgtgttgagcgctgtattattttctgcatttgggaatgtgcgagtttctcaggtttgttttgattgccttttacaataaaaaccccatactagggagatcccttaggaaaagaaaaggacaaggcttattaatgggatgccaggtttggattttgaatttcctgaagggcaggagatacatccttgtagcatttcgcttggttttgagaagagtagaagtagtagaataagcgtatgtatttgctggaagtccccttgtattcatttaaattatcccttcgggattatccgagccccctttgatttgggtttggaatagatccagttttcctaattggagccatcatcttgtaattgcttgtaattcttctctgggttatcaagtctatggcaagcttatagaacagcaggaataattttttccgtcatcttaagacagttttaatgtaaacgttacggtgttccttgcaaatgtgaacatttgcagaatagcacaagtttaaattatgggcccccctggaattttgtaaagcctttcctgcctcagctcatctccaagaaccgggccctcccgatccttacactgaagaagcaagagcttctgggatggtagctttgcctttacaaactcatgttcatgtttgcttaagaagaatacgtattaagcaggcatttgccttttatgtggtgagactatagtgttttcccatttttggttacataaggttccgatcaagtctttaccttcagtctttaaaaatgcttatttaacatttttaagggcaaatataatctttatgcaacaggaaattggtcagataggccatgatttgtgcaaaccacctcacgataagtacatagtctaagactatcatatagattctgtaaccatatatggtttttgaaattctaggctaccattcccatatttaattttcagaaaaggaaaatatttttttcagccaagtctagatttttgagtgaaactaagaaaaattgtgtaagatttaaattgataaaattcctcctgtataataccagtgcattggaggtaatttaatatatattaaatgaatcgaccgctaaaacaaaataattattttttttcctggaagtgttaaactggaaatgtttaaggggaaatagatttttagtcacaaagaccgacaaaaatgcatttatttacactattgtattataatgttagtatggtattcattctgtgcccccaaatagcaattgaaaaaatagcatatttttataataaaatttaagcataatgtttttttctctgaggagtagaatgcagaaagtggtaaaaaatcttttacagagagaagcatgttgataggaagtgggctttaagtttctctctggacagaaggtgtaaatggcgtatcttttacctggctttttgagaatctgttgccctctaggacatgaaagacatttcaggaattaacagaagtcggatcaaattctcttgctagatgttcttaaagattttgctgatacgcatttgaaaatttgtaaatcacgttttcatgtaagaaattaaccctcacctctaaagtttgagcattaaaaaagtttgttgaaggcatggaaggtaatctcctgtgactgaaccctgttttcccactctccacctcctagttcccttcttccccatgcctctcctttctcccccgtccggtgccagcaacattggcttttataaccttatgggagttgaaccaaatattcctgcttgctcgaacttgaggccttatctttttggctgctttccccagcttttgcctactgaacttttttttgttaattgaactatctagttgtttggatttggggtaaaagggagtagactgtaattgttttttcttaaaagatcttttcttttagctcctgtgggacaagagcagagaaaggttcttttttggtcagtggtgtacttaattaagcagaatatatgacttttcgtttattcaacaaacatttgccgagttacctcctctgttggaggctccatgctaggtgtggagttatttggttgataagaaatggcttccacctttctggtgaagttatgaaaatgaaaaatagacagtgaatctgttgtgagtaatcaagaattgtctggagttttttggacagacaaaaaagatttcttgatgtttacattcagctttgtattactgtatagagtagggagaagtggatggccagcatcccttcctgcgacttaatgcatctctgatggcaaattgggcctccccaaaatatttttctggggtcaactttgaattatggatagtaatggatgatggagcccagaagagtggatagtcctaaatagtagctcgaataaacctttgaccttctacagggttgcttcctgagtgcctggagaaatcccctctttgtggatagtgccacactggtggttttcagccagggcgcttttgccccccggggtcactcaacaatttttgctagatgcactccactggcatccagttggtagagacagggatgctgcttaaatatccaacagcgcatagggcagtgcctggcggcaaacaaaattatccagcctgaaatgtcgatatgccgaggttgatgtaatttcctctacataatgtagcagaacataattccaggagagtagagaacaataacagcgtcttgaggtgactgagtagttggcggagctcactttattcgtctcaaaaatgactagtttcagccaggtgctgtggttcacgcctgtaatcccagtactttgggaggctgaggcaagcggatcacttgagcccaggagttcgagaccagtctggccaacatggcaaaatcctgtctctactaaaaatacaaagaattagccgggtgtggtggtgtgcgcctgtagtcccagctacttgggaggctgaggcacgagaatcgcttggacccaggaggcggaggttgctgtgagctgagattgcaccactgcactccagcctgggcgacagagtgagaccctgtctcaaaaacataaaataaataaataaaagtgactagttcctgcataccaacctgaagaattaaagaaaataacagctaccatttatggcacttactctgtgccagaggacttgtatacattatatattctcttcattttataaatgaggaaccacactcagagaggtagaagatcttgcctggagcctcacagctggtcaaggttagaagtagaaatcaagattaagattattactccttttaagttcatggttttaagcacaactatgcattatctcccttgcggcatgcatcattcaaaatcttatgtaacaaaatgaaaattactatatgtcctatataccattgggcttgcctgagagtaattaaaaccatgaatgctaaatgtgatcatacttggagtaagtgacaaggagtaggggaaaagggaaccaacattaattgaacacctactaaaatttcaggaagcacgcaaattaaatatatactcattgtctaatttgattctcagagcaactctgcagttatgatgcacattttacagatgagagtgggagatatttgttaagtaacttgtctaagattgcacaactaataagcagcaaggttgggatttgagatgatgtcccacaaccaagccactctttgctgcttactctaaaggtaggaagtaagttgagcctcttggagaaaggaaggtaactggctctgggtaaaaagtaacttcaggcagagcgcagtggcttacgcctgtaatcccagcactttgggaggccaagccgggcagatcacctgaggtcaggagttcaagaccagcctggccaacatggtgaaaccccgtcatggctaaaacacaaaaattagccaggcgtggtagtgggtgcctgtaatcccagctactcgggaggctgaggcaggaagaattgcttgaatccaggagtcggaggttgcagtgagccgagatagcgccactgtattccagcctgggcgacagagctagactccatctcaaaaaaaaaaaaaaaaaaaaaagtaatttgagaggtaacacgtagtagacgttggattatattcaggtagagaatggagagatgaattgctataccttcctcatctgataagaatcgaattctacctggaatttgttctagagatctactcaaattgaaacagtgattgtcattttgtcaaacttcattttctatctcacctgaattttccaagctgtgctttgataaccatgaacctggaagttatggaaatctgtgcttaacctttcggtagctcaccttccacctttcttagggctgtcctgtagaacttaggagtgacaacatttggtttttgtcttctttttacacaatttaaacatttgtgcttgctatggaaattgtttttataatacgcggcatcaaattcattcttgtgtttttcatatggggttgttttgttttgacaactaaatatttactttaagttttaacgtgttttgtttcggagcacaaaaagaggaaacatttaaaaaacagcccaatcacaatcattttgtctgaaaagcatttttttgcgggaggtgggggggggcaggaaaaggaccacatgtttaatttcatttgcttcaattggaaaggaattttaaccacgattctcaagggccaggatgctggaaaaaaatgttatttagataaaatgcctgttttgatatccacatagaactgtgagccatagattctgattataataataatgtcctgattctactacagcaatcagccacttgagtaatcaaccactgtgtatagacagacatgcatggtggtaccatctgatttgtcccatcacccattgattcattctagagtagacttgagagatctgatagaacttgcaagaatgaatgatccttttgaaaatcaaatttttcaataagaatggtacattttattgtaggaaaatgcagaaaatatagaaaagcttcaagaagaaaaccaaaatcagtcataatccaccaccccaaaattaatgacaatattttgtatgtcctttaaaaatggagtactttctaaaaatggtggattcaagcccattgcaaaacctccaacttatatagtgtgttatttttttttaaatgactagattttctgaacgactgctacatctctagatggaagtcatggtcataacccatgaaaagggaaagctgacaggtagttggagaactatgctatagcctcttcctggcagctatgtaaagaagcttaagggtagctccttcaaatttctcctcttccagcttgaatgatcaagtttcaatgctaaaagaggctgttagtacccaccccccattattttacagatgaggaaactgaggctcaaaggggtcaagcacctaatgtgctaacgtcagagttccagcttgaatttttagattgtcttcataggtaggtaaattttttatttcctaaagattcttcacagtcaaaaactttttcatggcctgaccctcaaaagaacaagctattgtggtgggagtatactataaaggatactaaaaggccaagtataataacttgctaatttcagaatatgttccgaacagctgtgggcagtacaggaatttttcatgttatttgctttattgtaattgaacatttagtgatggggaacctcttggatgggtctagctctcagtttaattttctctagcctatgaggcaagtgccaaggcatatgaagtatgcctataggtacaaaaatgaaagatgacattgaaagagtctttagacatggtagcctggaagatcgcaattagggcttttgctccatgaaagtatttttttcctttataaagggagatatctgttgaaattgtgggatagagattttaaagattgcatctgcttccaaactaaggtcaaaagttaaattgtagtaaatgtgtgcagtgtggtatcattaaactgtacacacatacgtgaaattgttgttttaatctggcatcttttttttttttttgagatggagtctccctgtgtcgcccaggctggagtgcagtggcgctctctcagctcactgcaacctccgcctcctagcatcaaccgattctcttgcctcagcctccctactagctgggattacaggcacgtgacaccacatcttgctaatgtttgtatttttagtagagacggggtttcaccatgttggccaggctggtctcaaactcctgacctcaggtgatccactcacctcggcctcccaaagtgctgggattacaggcgtgagccaccacgcccggccttaatctggcattcttaaaaaaatcagttatttagctttcttccccctcttctcctgccccatttcatttctttctgtagctgtgagggtcattctctctttgtatctgtttcactctcagggtgactcttttttcagtccacctgactgcactcactttcctttttccaggctctccgtggatccatatccttctatcacattcatctgccactgcatcttgcccttgtccccgtttgccagtgttaacaattaccccaccctgggctgggccagggctgtttttcagcttaggccgggcagggaagctgatctccagggcagatgtggagtgagaagagttgttgtcactctatacagaaatgtcattgacagaataggattaaacaaaatatgtacagagattacataggctatgtatacatgtaaacttgtgaacacaaaatcattccttctttacagctagggtcccagcaaatgctacagctacatgaaataatgagtatggatacctattgccgagggcttactatttgaacaagtgagagaattgtactcttgcctaggggtgtatttttaagtagtttttgctcctgttccttattattgcctgctaatggatacgtatattgtcagtaagtgaccaactctcctagcttcctgtagtacactgtatttctcttctgaaaatggattttcctctgtatttaaaccacagatttacttgtgcctcatttttgaactactatagataaaaactcacagataggaaatacctgtggactgtttgaaatgcagtgaaacctagaaaaaaaaaaacaatcaaaataataagtatctcctgtcggcattttactgcttgtagaattgatattctatttgcccacataaaatctctctggatgttattcctattgcaagacatagtagcttttcttcctgttccttattattgcctgctaatggatatgtacattgtcagtaagtgaccggctctccacagcttcctatagtacactatttctcttctgaaaatggattcctctgtatttaaactactgagatttatttgtgcctcatttttgaactactatagataaaaaaggcacagataggaaatacctgtggactgtttttgaaatgcattgaaacctagaaaaagaaaataacaatcaaaataataaatatctcttgtaagcattttactgtttctttttacccacataaaaactgtctggatgttattcctgttgcaagacattaaatgttctatagccttttttttttttttttgagacggagtttcgctcttgttgcccaggctggagtgcaatggtacaatcatggctcactacaacctctgcctccgggttcaagcgattctcctgcctcagcctcccaagtagctgggactacaggcacccaccaccatgcccagctaatttttgtatttttggtagtgacggggtttcactgtgttggtcaggctgatctcgaactcctgacatcaggtgatccgccctcctcggcctcccaaattgctgggattgcaggcgtgagctgttctgtagactttctaataacaagaatttgtaacagtcacaaggttttaaatttccttttcagtactaaggaaatgatagctgggaatgcaaaggctttattggcaagattgttttgacaaggatggcacaaaactaaatttctatacttgattaatttataagtcttgtcactcacttttagttttagagtgtggataaagctgtttgattcttgtcagatttgaaatgtatgatttatgagacattaaggattggtttttcagtgcactctgccaggtctagttttatgcgtcattctggtttgggaagctgagtgcaagtctgcctacagacataatcaatcacctgcactttcgggtggccaggtggactgaagtaacaggtttccccccaggtttctcagagactaaggaatacacacacacacacacacacacacacacacataggcagacctgcaaattatcggtccaaaaatatttatatcactaagccagagcagtggatttagacatttgacttaacaaaatttgtttttcaacacgttctagcaactaccctgtaaatgatcgtcatttcacctacaacaatgaaaagataaagtcctcagccgcatagcttctagaggctaaagaggcacgttaagttgcttgtcaaagactccacaccttcagatgccagggtcaacacaagttttcaaaccctagacccaatcccttctaggccacagaaggtctgcctcttgtaaggaaggaattttccaatgcactaagcacagctaatcacactaaggaaagaaaccaagcagccaaactaatatgaggaagtgaaagtttatacttgcatcttatagcagatggcctttgttagagccacttttaaaatatcaacttcaccgagcatgatttaggtacaaaaaccggcatccaattaaagcctccaatttgatgagtttagacagatgtatatacccatgaaaccactgccccaatcaggatgtggaatgtttttatcacctccacaagtttatccttgccccttttccagtaacattcttcccccagcccctttcccccagatatcccgttatgcttttgtgtgagagccactttcaaaactcagatttgaaagtttgtggatcttcctctataaaaagactatatttatgtccaaaatgcaattgtcttctctatgtttaaaataatactacagagaaattctaggtattgatttcctagaatctttccctcatcctctgcaagtaagctacttagtaaatagtttcattatgtacttgaattgaagagaaattacagccaagagaaaaacaattctgatagacagaaaagcagtgtatgttcttctcaagtagttacagtgaggtgttaaatccctcaagaaccagagaagtaaaatttgaattttgcttcgtacttatttgtaaagtaaaaatgaagactgagaataaaggttttatatgtatctatctgtctaatcattcatccatccacccatccctccagctagtgtgtgtatatatgtttctgtataaaattactatgtattaataaccctatcccttgaggattacaaaagatttgaaggcttcagagggaattttctgtgcatgaaaggtgtactgtctttacacacttaggtgcaaagcaagcttttcatatgctgttattactctcattgatatatttaattgaactaataattattgagcaatttaaaggctgctgcattgagatggagtttgtcccttcgtttgtcaccttctagaaaaatccaagtgtcaaaaaatatctcgctggctctctgttctgttgctattacttcggcatgcgtcgtctcctcttgccactctcgatttctactgtttctgccctatcttccttccctgattttcctcctccatgtctttcccgtatcctgatgccacttctcttgcactgctctgatttctcatgagaaagccatttttataaacatctccagaccgagagggcagcagactaattccaatgtgtcagatagcatcttggaggctgtttctcctgtgatccaacacttttttcacactcctttccagtttcgagctgtactggaaattggagagttgtgaaaggatggtttttggataatcaaagttgaatatacttgctgggctgtgttatgaccgtctttgaagccacgaatcattaaaaataagtgaatagtttacattataatattcctaggaaacttcctttgataattgtaaagcaattaaaattgtcctgagataaggtgatttattgtttttcagaatgggccataaagatattaaagaacccattcaacatttgtcaaaacccataaaatgcacaacgcaatgaatgaaccctaatgtaaaccctagactttagttcattataatgtattaacgttggcccatcaattgggacaaatgtaccacatcaatacaagatattaataataggggaaactgggagatggatgctaaggaggtatacagaaactcagtacttcctgcttagtttttctgtaaacctaaaactgctaaaaaaaaaaaaagtctactaattaaaaaaaaaaactcttcaaatgtatgggtttcagaaatacaaagactagatcaggagctttttattattaccgtgtggattaaagtctactgtttgtggccaggtacagtggctcatgcctgtaatcccagcaatctgggaggctgaggtgggtggatcacttaaggccaggagtttgagaccagcctggccaacatgatgaaaccctgtctctactgaaaatacaaaaattagccgggtgtggtggcatgtgcctgtattcccagctattcgggtggttgaggtgggagaatcacttaaacgcgggaggcagaggttgcggtgaaccgagatcacgccactgtactccaacctgggagacagagtgagaccctgtcttaaataaatacataaataaataaataaattccagtgtttgtttttcagaatgagtgaaataagagatgtgtttctccttgagtgatgtaacttgtggcacgagcccctgaaaaggggaagtatgaggttccaggagagctgcccagtacctccaatgctatgtctagttgcacaatagtcagtagataggtcagtgggagcagtgggttgggacttcgcttgccacccttgaaacatcatgccatctttgcagtggagtcccagatttggcaaattccctgccctacaacccagtgggccctcttttgacccttgcatttgtggtatcattagcaacagtgacagttggtgaacttatgccaactctgagccaatatccaggtcagagtttgattgctttgggccaaaggctattattgcatggcttgtagaagcataggcccaatgccagaacttccatgcacttactcagtatggccagctctacagtaaacgtgtgtgaaaagattcggtttttataggcattaatgtaaatagtttctttatattggacctgggtaactatgatgggcaattacaagtacccattgctttcctgagttggctatgagaacagaacattctgtggtacgtggtagtgggggtgaggggaggatcaggtctaagagggacattgcagctgcaaagggaaagaaaaaaactgagaagccatcaaggattagaaggcaaatgggagccatcactcaagcactgtgtatcttgaagtggttgtctgtcaggtctgtgataagacctggggtgaaaaacctcatagttcatgtgattatctgaaaaataccaataaagggaagagttgattatagagttcgcctgtttagtttttttgtttgtttgtttgttttttttgaaactgtgtcttgctctgtcacacaggctggaaaacagtgacgatcgtggctcactgcagtcttgacctcctgggcgcaaacaatccctctgcttcagcctcctgagtagctgggactgcaggtgtgcatcaccacacccatctaatgttttagtttcgtagaggcagggtctcgctatattgtccaggctggtctcaaactcatggcttgtttagcttattaaactttattttgtatattggaaataattctttgtgtacagatctgttaggtgtcctcattgttacatctattgttagacagaattttatttttcttaatttcattggttgcctgaattgactatatatgtggtaccacctgttaaaagcagattttgatgaggaaggggagaaagaggataaaaataacctctccctcaagtcccatttcatgatggaagctaggattccagttcagtggccaggctaaatggtcacttgatgccagtagtgagctactgccactggatttctttcagtcagcttcacaatcgacaccaaatcctgcagctgacgtgactttactgcaattcatgttgattggaaaaatggcaaaagtcaccatctaacccaatcataatatgtttgtttcccagatatagacaggctgggttcgtcattaggcctagtgtagtcatgctccctaactactgtgagtatctggaaggattggggaggtatagtggcagcggcttgtgggacaggcatgtgacagcatccttttgcccccttgctgctcacccacctgcttcttgccacctattggctcctctttgtcttcccctcattctgtcttctctttatccttaatccagttacttttgaattttctgttaaggaaccaggagagcctcagcatgaaaataattggcttaagtattcaaagtaccagagcaacatactttataattcttggactgcctgattgttactgctgcagtggtttgttgggtattaaatgagacttagggtattttgtaaacgttttctgacatacaatttgaaagttgaattttgtcaccttacaaacttagttattcctgcaacttttaaaacccccctaaattttccttatgtgttcatgattatccccatagcagataatggccacatgcgtgctgatatgaaggatttgctccagggctaattgatgggagcagagctgcccagttgctgaattgtaaggaaacagttcatggagcgccaatgccaatttaggaaaagtatggggctgagtacttagtaagatgaaataaaaaaatatttatccagtgcttactctaaggagaaggcacttggctaggtttgctagatgctgtggggagccttaaaacaacagtgatctcttcaaggccgggcgtggtggctcatgcctgtaatcccagcactttgggaggccgaggcaggcggatcacttgaggtcaggagtttgagaccagcatggacaatatggtgaaaccccgtttctactaaaaatacaaacattagctgggtgtggtggcatctgcctgtggtcccagctactcaggaggctgaggcaggaggatcacttgaacctgggatatggaggtggcagtgagatgagattgtgccactccactccagcctgggcgacagagagagaccctgtctcaaaaaaaaaaaaaaaaaaaaagtactagcgatctcttcaagcaaagaacgcccattctaattggagaagctgttaaagacacatgaaggatgtggtggaaagagtattgaactgcatagggtgtggggagagagtcaggagttttgaatcctagcctgagttctgccactaagcattggaaactctgggcaaatcatctccccactctgggtctcagtttataaaaaggcaaatgaacgagatcatctctaagatattctgtagattgattcataaatgtggaagagattctggaaaacggaagcttgagcccaggagttccagaccagcctgggcaacatggtgagactctgtctctacaaaaaatacaaaacattagcctggtgaggtgatgtgtgtttgtagtccctgtttctcaggaggctgaggtgggaggatcacatgggcccaggaggctgcagtgagctatcacctgggagcttgttagaaatgcaactttcatgggccccactccagacctagggaatcagaaacgctggggatggggccccgccatctgtgtcctaacaaggtcctctctcaggagattttgaggcacaataaagtctgacaattacaggctataggaatttgggtcagtggttctcagcctctgccatacaatagattcatctgggggaactttgttgggggtggggcgctgactttgtttgtgctgctgtaacagaatatctgagactggataccttataaagaacagaaatctatttctcacggttctggagactgggaagtcccaagatcaaggtgcaaacaggttcgattgttaagggctgctctctgcttccaagatgacactttagttctccagcctccagaggggaggaacgccctgccctcatgtggcggaaggcagaagggcaagagagccaaaggctctgttgaagctttaatcccatccaccagggaggagctctcccggtttaatcaccccacctcttagaggccccacctctcaataccatcacattgtccattaagattcaacacctgaatcttggacacatgaaaaccgtagcaggcacccaggcatcactagttgctttggctctccaggtgccgccaattttgagaatcactggtttaggggaaagtggcatgaaccaagacttctgtcattctctagctgcaatgaacgtcagatgcagggagtcagccaaagccagaggcttgaatttcactcaaagaaacttggcctttagattacaatggagaaaggtttttggcaatgggagtgatacatccgaggtggaacatttgagagatgattctgatgctagctatgtgaagaagagggcatacccatagttaagaaatctgatgaaatagtctggtgtgaagtgataatgggccaaattaggaccttagaaatgaaattataaggaagaaaatgtatgaaagctcttttgcaggaaaaatgggcagggtttggcgatggttgctggggtgacagcaatgttagaatgtctttggttcaggagtacctctcagacttctgggagggccagtgctctctagatgcatctggcaaaattgtcatgtatggatctgtacaattctttgttttttgttgctttgatttaggagttataatgcggaggtgacccacagcaagttatagaaaaatacagaattacagtcacctcaaaagctactcatggtcatcatgtcagagggaaaaaatgctgtttttcttttaaggaaagaatgcttggagttgtgggaaagttgtagacttggcaatgagtaattcaagcctatcagtcaattaagtgagtttttattttatcatttgttttatttgggagctgctgtaatagtcattgagaggacatcagtcttcatatttttaaaacaaaacaaaaataccattgaacattagggcaaaggacaagaatttcaaggtttttaccttttgacttcagcaaatatttgctgctccatttttcttgctagattttgccatttgacttgtgtttttcctttgttccaatttgttctttgtgcttgataactgtagtgtactctatttttttttttttgagacacagtcttgctcttttgcccaggttggagtacagtggtgcaatctcggctcactgcaacctctgcctcctggattcaagtgattctcgtgtctcggcctcccaagtagctggaattacaggcacgcaccaccatgtctggctcatttttgtattttcagtagagatggggcttcaccatgttggccaggctggtctcgacctcccaaagtgctgggattacaggcgtgcatcactgctccttgcctctattctattttcgatggcttttttattcataagtattcttaaggttttaatattccagttaaaaaataaatatatttgtccctttatgtttttccccaatatacttattcttcctttatgaccaaaaattattcaaatttgcatccagaaatggctcacagaaagagctccttggtatttatttagggcatggtgggaccttttgttagtttctaggtcatgccacatctggaaggaaagacaccttttatttactaatttgaaaatctatgaaagcagactcagtattttacagggttgcatatattcctatgcaaagttgcatatattcctatgcaaagttaaaaatgactcactactccaactttggtaaatgtgtgcactttagtttttgaaagaagtgcaaaaatctgcagaaaaatctggactaatcataacttgaaatttttagtatatctggtagataacttttaaaaatataacccatcttttcccaaactggatagggataattcctctctttgcaaattgtgaggaatattatgattgtatcatataaaataaatatagaaacgtgtagaataaatgatcttccagagtatatagaggatatcaccagataatactctgtactaaatataaggacacaaaactggactttattatatttctataactggtaatatccttccagtttttgcttgtttattaaatgaatatactgttaaagatttggttatgttgtagatcttaattatgttggaattattaaaaatgaggcatctttaatctgtactgcttatttccaataaattattttgccgaatgagagccagtttaccagttcttttgttaaagaaaatgagccagtggctacctcagttgtatttatcattgccttttatggtaaacatttaaaatgtgtttttaatggtgcacatgccgatgtttctgacctctatagtagcataagtatttgaataaaagtgaggtaaatgagaagtctgtgccacccagtctcatcacaagtgtacctaattaagaagatgtttggaattcactgttctttgatttcttgggtgggagagaatattctgaaggctgtgattaaggaatcgttaccatgacaatcacattcaaagaattgagaggagacaatgagtctgtgggggatcatctcttttgattgatttgactcttcttttaagttctttcaaacagctgttgtcactggattttcttttccacgtaattcacacaattgattggtgatgtggggatcattgaagcttggttgtcagtagtgataagggtcagcagtgtccatgaccacaatacttttgctaaacctggagagtgattgtatgtgttaaatgtcactaaaaagtaactcttggcttctttctggaataatatatgtggtttgtctattttcacttattaattttgtcagggtgggatatgattatcatgatctctttgaaagcatgactaactctaaagtgtttgagctttattttggattactttgctgtcatcttacccagtgttttgtgtgctgttttgtttttattctttaacttgcacaatgttgtcaacgtaatttatatgatgttctggtcagagacacagttacacgctgcagattgaaaagtacacacaaatatacccaccatgagtgcttcagcctcacgaccccagctcatgttaagtgggacatgctagtacagatgataaagtgaaatggagatacaaaggcagttcagatctgactgtcaatttttctcctttgtggactaattctgggtggtgaaaccatgaactatggaacgaagactgctccagcatgagtctgagttgaatcccatgtgagagctttgcctcctcagcctttgggcctttctttcttctgccctctggagggtgtcagagaacatgaaatgcaaggactttctggaaaggatagccagggtttggtctggtaactagaagacactttccctgccccttccccaccaccccctccaagccggaacatgtagaggtgaggagcagacagagagatggcagggaagccattggcaaggtgggaatcttaggaaggaagtgattccggttcttgaaaaagacaaccggattccattaagtagaatcggtatgaattgtactcatctctaggaaaaatcaattccagaagggtgagtaagatgaaatatgataagactagtgtgtgacagattcaggtttgaagcttaaggtggatggaatcgaaagaaaggtatatttggtgtcaagtgtttgtggcggcatgtgaaatcattatccacgtttgataacagtttgactctttgcctgctataataatagtagtaagtatgtatttaacattcaatgcgtaccttgtgtgggggaggcactgctaaatgctttgcatggacgtacctccttacctctatgaggtaggtggccattatgatgctcatagaggctggacagctaatatgaggcggagcctgtatttgggctcaggcagtctgactctggtgcccctgctgtgaagagctgtgccctgctgcattcctcctgtagctgcacgaaagggtgtggaatcttctagaaacagtgagttctatatgagtggagtgtggtggtgggagaatagatggagtaaagccttttgtgtaaacataccatgctaagtactgggagatagaaacgaaatgagagatttttttgttttgttttttgagatggagtcttgctctgtcgctcaggctggagtgcagtggtgcgatctcagatcaccgcaacctccaccttccaggttcaagcaattctcctgcctcagcctcctgagtacctgggactacagacacacgccaccacgccggctaatttttgtatttttttggtagagacggggtttcatcatgttggccaggatggtcttgatctcatgacctcgtgatccacccaccgcagcctcccaaagtgctgggattacaggtgccagccaccacacccagccaaaataagacatttctttgcccctgccaccaagatatttaacatcttacaggactaacaaaacctaacatgaaccagtccagattcatatgatagaatatgaaaatgttttctggaaagaatagccagagtcccagtctggttactagaagacactttccctgtcctttccccacctgtagcccttccaagctggaatgtgcagaggtgaggaacagacagagagatggcagggaagctattggcaaggtgggaatcttaggaaggaagtgattccggttcttgaaaaagagaaccggattccgtcaagtagaatcggtatgaattgtacccatctctaggaaacatcaattccagaagggtgaattagatgaaatatgataagactagtgtgtgacagattcaggtttgacgcttcagttggattgaatcgaaagagaggtatatttggtatcaggcgtttgtggtggcatgtgaaatcattatccacgtttgataacagtttgactttttgcctgctgtaataatagtagtaagtatgtatttaacattcaatgggtaccttgtgtgggggaggccctgctaaatgctttacatggacgtacgtccttacctctatgaggtaggtggccattatgatgctcatagaggctggacagctaatatgaggcggagccggtatttgagctcaggcagtctgactctggtgcccctgctgtgaagagctgtgccctgctgcattcctcctgtagctgcacgaaagggtgtggaatcttctagaagcagtgagttctatatgagtggagtgtggtggtgggagatgagatggagtaaagcctttggtgtaaacataccatgctaaatactaggagatagaaatgaaataagaaatatttcttcctgacaccaagatacttaacattttaccggacaaagaaaacctaacatgaaacaatccagattcatatgatagaatatgaagatactgtctctacttaagtacaggtgggaggaagactggaagatgttcctttgaattaagtcactttaaaacatttgctttcaaatgttagcgcttcaccatgggcacaaaatttgtcttcctccaggcttttggcctggcaaacaagaaccctgtccctatagtcagcagattcatccattttgagttgggaagcattatcttcagccttttcttcctgacaacgatcctgacaatcgtcgtcaggatctctaaagagatgaactcattagcctagtgaaccaacagtctcagctgtttatttaccagcacattaacagtttttccatttatatccactgcctgtgtgacgatcagcctggaaatggtttgagcatagggtgggaggggtggttacacacctggttgtaatccttggtttatttttgccctgtttccatctatacttcttgagagcttcctgtgttacaggcactgacctgggtgttggggcagagtagtgaaaaaacagactgggtcccccgcccaaggcactgtcttttcctcagatttcattcgctcatgtacattttcatagttgatctaaaagcggcatttggtgtgaattctaggatttcacacttttaggataatacagtgatcacactccctttctcctttgccccagccagtcctttctgaataaaggtcgagggattgggggaggaaggcagtgatgcgaatgggcctgtggggaggtcgcacgggcttgaggagggcagcatgtcgtagcgggccatatttgtgtcagggttgggaacggcacaaggcacacctgtttcctagtgctgcagaaccctcgtcctgggatgagcctgcccgctagtctgcatcctaatcctgctgttgattggagataacttcagcggtcacagggcacctcgtctccatggcaacccctctaaatattcctctagtgacttgtgctctacattctggctggatcagagccctcctgtggcaaaatattctaaagatgttaaaagagagagagagaaaaaaaaaggctcaactaataaatctattctaaacgactgagtcatttgttttgattacccgggtgattgccaaatgttaatttaaaactgaaataggccatgagctcactcccctaacaatgctgagtgtttgagctaatacggcttgataatgagggagccagatccactgccagtgctcatgttatatgataaacagacatttggagaagtatgcagaacatcttggcagttttcctttaactctaagggttgtaaatacaaagtagaatgtgttaccatgagccatttcataggaagttgactttatttttttagaattcagaactttgcttctaaaaaggtaactttgcctcttgattctcatttttttccctaacttaggcaccttggaagttgttttcaaccatatccagcctttgccgaatacatcctatctgccacacatccagcgtgaggtaagttttactaattgccacaaattcttacactgatctccaaccttctaagttgtggtattaggggcggcattgtacaaagggctttatttgtaccaggaggtttcagaaggttcattttaattgactcaaccaatgtcactgcttaccctaaatattagctctcgggggcaatgtcttttcaagggaaaatctcatttgctttcaacttgggcatatgaaaagggaatttgccaggcacaacagaactatttgaatgtctgctttaaagtaaagatctgctcatgtcgttgcacgaacagtagggagcaggaaagctgcatggagcaaatgctgggatgggacagaggagactcctgctgccagccacgagaaggttaggctgacctgatcagctattaggaatctttctccctgggtggaaggagccaaggtgcaggactggcattgcaaaatctggtgatagaaggccaaagagtgcttctgctcggtgacattaatagggtccaggagattttcttctgatttgccctcaagttcagaacaacctgtgggaagccagtgtaagaatgcttatactggataagcgttctctgtcctcttcatttagccacagtggcttgtttatactctgtgatgactcagggttcctcaattttctctttgagagagggacattgacctttgaaaataatgaaggaatctaagagaaggctcatccaggcacgatacagtaatggtccctcctttttggtgccccggtctctgtgcgctcacaagagggaatgtaacctttgccagcaccatacctgtcaggctttgccatttcatccctcaaaaggttgctgcgtttttgccttcaccttcaccctgcccacccctgcatgcagccacatggtcagtgtaggtacttagatttcagttagggtacatgctcagcaggtgacaagaattgcctttgttatgtctacttgctacagaattctccccaggttttaaaatatatatcttcaaatacctaaatgtattaaaccttaaagagtaaaaagcataggacaaacttttagaaatgctaaacctgaattttatccatttcatcaattatggtggtagtcggaagtccttccaaggccctcgggcttgaagcaagctcggtgatacaagctttcagcagcttccctctgctgctggagatggaatcttcatttctgggtctaaatcctgccatagctctcattcatagcctttacctataatggttgttttcaaacttaaaaaaaatgatagaaacctatcttcaaaaaatacaaatctttagatctaaccccaatagagaaaaccaaagctgaactgctttggctcaagtaggaggctgtgactctctgtcaccctcctctaagggtgaaccctattgaaagagcagagattttagctctgtgccctttcccagctcttatttttattttcccacagaagaggctagattctttaaggagatataaagaagggagagagaaagatataaagattctttaaggagatacaaagacatcctctcatcagctggaaatgccagctaggtgagacctgactatgcatatgcattgtttgcccttagtaattccatagcaatctgcaaattcaatcagcttcatcagcagaaaactttgatagaaaccatgtgtaaaagggctgtgttcttaaagtggaacatttaaatcgaagtttttcaagcacacatttcaagtggttttatgataccaagcacaccccagtgacatctttacattgaccaaaacttggtatccttgggttttcttttaaagcactgagtttctcaggtgtgtcagttgaatagaatctgctaaattctgttttttttatttttttaaattttttattgatttatttttttttatggagtcttgctttgtcgctcaggctggagtgcagtggtgcaagtgcagtggtgcgatctggctcagtgcaacctccgtctcccaggttcaagcaattctcctgcctcagcctcccaaatacctgggattacaagcgtctctacatcaacatgcctggctaatttttgtaattttagtagagacagggtttcatcatgttggctaggctggtctcaaactcctggcctcaagcgatccgccctccttggcctcccaaagtgctgggattacaggcgtgagccactgcgcccggccaaatctgttaaattctgtttccatgtaacagaaatatataggattacacaactgcatctggtgttctttcttcctttcttttattcattcattcagccctactatgggccagggcaggaatgtagtggtgagcacaaaaacaacaaaaaaataccttttgggtttgatattcttcaagggtgggacatgcctagattattttctcttttgcagacaaggaaactgaaaattgctttgcttttctcaattacattgcccagtattcagtagacaggtatggatgcaggggtacagttccaagtccccatctctactctattctttgagcctatgatttatgccacttccatataagcatgtgcaaataaagtattcagtaattgccatggatgcagctgtccctgggacccgaaggccctaaaatgaaaataaatgtaaactgtgcgtttcacactctatttttaaaacgtttgtttggaataattgaatagtttagtaaaatgggctttgctgtttccacatgaggatatcttgttcttttattttttattttttttgagacggagtctcactctgtcgcccaggctggagtgcagtggtgcaatctcggctcactgcaatctgtacctcccaggttcaagcgattctcctgcctcagcctcccaagtagctgggattacagatgcgtgccaccatgcctagctaatttttgtatttttagtggagacggggtttcaccatgttggccaggctggtctcgaactccttacctcaagtgatccgcctgctttggcctcccaaagtgctgggattacaggcgtgagccaccatgcccggcctattttgttcttttaagtgatggtgtgtccccttttaatacagtatttatcatagataaactttattattcagaaacttagaattattccatttggctgccttttagtttacagaattatttggaacacaagcttgaacacataattcttaacacatacgtgaactgggctaaatttgagtatttgtaccatagtagtgacaatattgttaattaaacatgtgtttcacatgtaggagatatttgtatcactgacatatggtcattttcattattgatttggcagttttttaatattcacaaaacacaaaattttgaaatacagtagtcaaagtgatttgatctgtgccatttgtattgatgtaacctctcttcttggtgcactagcaataagaaggagaatcagcacagatgggttacacagacttagaggatttggaaaccatcactttagagccaaggtctcaaactgatgggctggatctggcacacagaggtgttcttttaaaattttaattgccagcatttaaaaattgaaaggtttcatattttttgaagtccaaatttttcagcttctcttgaaatatcagaagatctggcaatattgagccctcactcctgtttggctacactaggctggagccaaatggctgctgtttcttttctttttttttttttttttcctgagatggagtctcgctctgtcacccaggctggagtgcagtggcgtgatctccgctcattataagctctgcctcccaggttcacgccattctcctgcctcagcctccccagtagctgggactataggtgcccgcaccacgcccggctaattttttgtattttttagtagagacggggtttcaccatgttagccagaatagtctggatctcctgaccttgtgatccgcccacttcggcctcccaaagtgctaggattacaggcgtgagcccccgcacctagccagctgctgtttctttagctagagcatgaactctgaagtttgccacagtctctggcagtatctgtaatctccttgacactaaggacaagggttggttgccattatctgaatgtttaacccctatagacatgtgagttttcaatcccaggtctagataaaattgaggttgcaaacttaaggtcatcctttttctcaagatatcagcttgctaattttcaggggcacgacatagggtgacagtcatattaaggaggtgctttaaaagggttgagggcaaacatttcagaggaaggttactttctgatgatggtacctgattaagaaaaggatacatcgacaggtacgggtgatttattttattctggcagattcctgtagtctactttggtgcttctcacactttaatgtgcagattctgatgcagcaggtctagagtagggcctgagatcctgcatttccaacaagcgccaggttataccactgctgatctgaggacctccctctctttgagtagcaaggggactctaaaagcaatcctaagaaaaatcagtcaggcagtgatggtgctaatgtttagaacattcacttttctctagcctgagaaagaaaaagagatacgaaccagggtattttgggttgaatcttcccagataaatctggatctactttgagttggagcagaggagatgaaaaatcaattattttcaatacagtatagcacatgggaaagataaatctaactctgattttaaaatttgttttaaattaagtgcttctggtaaaaaaaaagctagatatgctcaggaatcatgaaatgtagggattagagcttttaattttaggaaaatatggggctgttagcaaacttgtaaatcagaccacagaaaataggataattatcaaatccctggttatatgataaccttgtaagctataaaatgattttaaaaagttggaaagaaagaaatcaacagtttcaaatatatacagtcctatattgaaaagtataattaaaatgaaaaagcacaccaggaaaaatctgtggcacagatgacaagatacataatttctatatcatgcacagacctcatacagattgtaagaaaggtgcgcacaggcctagcacgtggtaggtgcttcctaactgttggctgaatgaattatccaattgatagatgggtaaaagacactcaagttatatcacaatgtaaagaaatgcatggaaaacactcagcctcactggtatgcaaagataagcatatttgaacgtcagcaaggcacacttttactaagttagcagaattacaaaaagaaaacacaatgttaatatggttaacttgaaatggatatgcacttattcactgctggtagcaaagtaagttggtacaaagccttttggaacattgtttggcaatatatgcctaaaggcacaaagattggtaccctttaatctagtaatcatactttgggaaatgtgttctgagaaacaaattattctaagaaaagaaaaaaagctgtgtaagcattcatcacagtgttatttgtgaggacaaaaagaaagaatttaaatgtctaatgtgaaaaaaatagttcatttattcaataaatagttttgattgagtagattatgatacatctatgcagtggaatttcatgaatctgttaattataattttcacacttacattagcaatatgaaagaatttgtataatacagtcttactaaaaaatgcaggatgcaaaattgtatatatgctgtgattgtaacttgcaaagtgatatgtacctgtggacaagaactagaaggcacaaggaaaaaatgtaagtatcactttatttgaagttgtattcatgttgtgatgttgtttgtacattttgctattacttagatgttgagaatcttccacttttatgtacttaactccatatcacaagccggatattctaatctatcacagagtgcttagtaagtaaccaagaaacatgaggactcctgtctagagcctaaacatggggttccagtgctctagttccttctcgcttgttgtgtttcatcatccagagcccccatttctctttcttccgtatttggtggttggtagaggcatcttggtatataccacatgacaccaagtataaatatttgtttcagagcttttaatgaatgtctagcagtgccaggcagggaatgaattttcatgtttaaaggtccagtgtccacttaaggaacatcttaatggagctacagctcaagagcaagcccatttcatcttctgatttccattagataagcaacaaaaattggctttaaggtcatgagcctccttacagcagtccctctcaccttcagctgtattccctatttcagatatacttgtttctctgctgtaagtacacttttcttttctaattaggtcagttacttcatgtctgtttttcttttttgacatggtttcttctggctttggcaccacatattttccccatatgtcattgcctctggagcttcatgttgcaatagtttttcaaggggaacggagagcacattgctaagggtgggggatggcttttgcctcttttgcctgccctttgcttcagtgagtgttcgtatttctgttgggcctagttctgtttggttttgtagtcttcagagtcagttatgtttggactgaaagatacttaagtaaaaataatggcaagtcagagatatgtctggcaaaggtgcagcacatttgttaaggttactggtttatttatctcccttgtctctatggtgactaaatctgggtctgggatttaatggacttagttttgacctcttgtaacatctcctaacttttcccagcctctgatttagaaagaattcattttcacttgaggagagaaactgtctcacttagaaaaggggtcctaactggactctcgaaaagtggaatctctagtctttgattcttacacagtcttcaaccagagtacccattgtggttgtaaagaaagctaagaagtcatgtagaaatacacacacacacacacacacacacacacacacataatgtctcaaggaaatacttttctttttagtgaaataaagtattatttagttaatgtgaatgaactgtctgtaaagagaaccttttgtcagaataccaaatcaatggaaccattgactggacattatgtttttattttttaaaagtatctcctttacccattacaggattataaatttgcacacatataaatgtttgaaccatatttcagagttcaagtgtattaaattgtgccatggaagtccacaataaagattgggtttgaccaggattctcatggaagaagtcagatttggacagctaagttcaaatctagtgttccatcttcacaattgatgtgaaatgaggacatagatatctgatctctaaggtaggtagagtcaaaccatcttggacttcagttggttcaaatgagcctttaaaactttttctcttctcctgtatggtgctttgagacttataaaaacattccagctgtaagaatttactaatttgttcatctgtttacaggtcttttcagcttctctaagaataagctcacatgtgaattttctttgaaaccccaaaacaaaggagtcagtaaatgattgattatcaagtattgcacagagactgaggcaagggaagtgacaaaagtcctcttctgtccttactccccaagtataaaatattagagttcagatctgtcatcaagtttagttcaagcccaataggaacttgtgattacttagtaaggtttttgaacatcataaaagttcagtgcatatggaagttgttgtaagattttgtccatcatgaacgctcctattaataggcaaagatttgagaagccaacaacagatgctcacttgtaagagagaaccatgcctgggagatgaatgttggatgctccttaacttctgagtttgaaaccttgactcacttgtcttataaccgtggacgtagaatatttgttagattaaggtcatagctaagtcatacaaattttattatgatcagtacagtaagcatagctggggtcaaagcttttatggaaatcacaatgttaaggcctgaagtccttaataatgcttgagaaagaatggcacttttatcatcatcattatcattgtcatcatcattattatcatatcaaccttatatcacatgttgaaagcccagtgtggtgaactgtgctaataattgttataatttatgtatttcattattgatatttcaattttgtttgaacaactgtagggatcaatttaaaataaaaaggaggaaatatataaaaatgtatttagaatagtagcctcattgtcttgtcttatcagccagataagctttgtgctttgtagagcatctctcactgaaggatacctaattattggataaacaattagttctttaacagttcttaggctgggtgcagtggctcacgcctgtagtcccagctactcaggaggctgaggcatgagaatcgcttgatcccaggaggcagagggtgcagggtgcagagatcgcacgactacactccaacctgggtgatagagtgagactctgtcaaaaaaacaaacagacaaaacaacaacaacaacaacaacaaaacccaaaccaaagaacagttcttcacctaagtagaaaagcagaaaaacaatggtttgaggtctttgtgagtctgtggacatctcttaaaccatgtgtgagaggaccatttctttttctattctttttttttttttttgagacatagtctcactctgttgcccaggctggtgtgcaatgacgtgatcttgcctcactgcaacctcttgctcctgggttcaaatggttcttgtgcctcagcctcccgattagctgggactataggcgtgtgccaccaggcctggataattttttggtatttttagtagagacggggtttcaccatgttggctaggctggcctcgaactcctgacttcaagtgatccacccgccttggactcccaaagtgctgggattacaagcatgagccactgtgcccagccgataggaccatttctgtacacattcattagggctacaaattcataatttccataaggtactctctgtgtttctttcccaggaccggtagagtttttcctatgggtggtggtgagagtttgtgtacataattgtcagcgtgcacaggcatagggatttataatccagagggtcttttgctccctacagtggttcaaatggaaactaattggagagggtgagttccaccctttgcattgggctcatgggacaggtttgaactggaaaacagtacaacatgctccagtatttttagcctatcccttatgttcccagctctgccgtttgaactgtcagttctcatagacttcacataggatcttgacctgacttttggtcctctcgtgggtgttttccattttccttactggggcaatctaaggcacaaagagtaaaggatttggtcagagttactgtcttaaattgtactctgctttctccaggaaactggaagcttctgaggagcaagaagcctgatgtttcctcttatgtcctttgtatcatttattatttagtgccagagacttagtaggcatttgctagagatacaattaattgaatgaaaggcattatgtaaattacaaaccatagcattaccgtggtattacacaggactgtcttaggatccctgttcctctaatatccatattcctgaattgttggaggatatgcttgaatagaacaatcccttttccttcactgtagcatgacattatttcttcccggcctgttatcagcaagtttttcgaacagaaaagttgaaattatacagtgaacgctcctattcctaccacctagagtcagcaattaaacattttactatatttgctttatcaaatatccaccatttacccatcttaatttttggatgcatttcagagtacgctgaaggcatctgtacgctttacccctaaacacttcagctttatcattatgtggtttcaattttgactttcttagagctgctttcaaatttgttgagatcctgacatttattttggtggtggctaagaagacgtagtaactcaaatgtgcaatatgctcagttttcagaccctgggagtttctctttgtttgtaactaccagcaagtatacggacacatacatatcgctgtcccttccccgcttcgttatatggtcacattatttgtattgttgaaatttggaaagccagcctaggaaatgcagttgaggggcttgtggatatgaatgaaatcaaagaattggggttgagaatagtagggcaaaaggttagagttagctactataaagggaggatagagttgggtataaggagtggggaagagattcagatcaggaagttatcagcatgataccactttcatatatgaagtctagagagggtttggtggctgttcatatgacctaaaggtcatggattgaataaacactaagagtgcaaatagtccttccagtctagtggttttcatattgtattccatggaaccctagaatttatagacatgtctcagaggttttaccaacatttgaattatactttcgcaagtatattgaactatttttaaaaacactaataagaaaacccaacaaaaacacttgactgtgttttatagaaaattttatcatcctggagaacacatactgattgactttattttattttattttatttattatttttttgagacagagtctcactctctcgcccaggctggagtgcaaaggcgtgatctcggctcactgcaacctctgtctcccaggttgaagcgattctcctgcctcagcttcctgagtagctggaattacaggcgcttaccactacgcctggctaatttttgtatttttagtagagacggggttttgccatgttggccaggctggtcgtgaactcctgacttgaggtgaccccacccgccttggtcccccaaagtgctgggattacaggcgtgagccaccgcgcccggccctgattgactttaacataagtaaaggttattaatgtcaacctaaaataaagttttgactaacacttatctgtcatccatcaaagtcggggtagtatttctatgtgggaataaagacaaaaggtccacagcaggaccattacactaaagccatgggtgttaaggcattggcctgcaaaagctgaagttacgttttggtttccagttaccatgagcacttatccatctgttatatttagatttttttttctagtacctttaggaatctgcaaacagacgagtatctgctttaaacttgaaacgaccataaaaggagagagatggttaggatgccggaggctggctacactgtcatccttcagatgggcctgtgtgaatggattagggaaccttcaaaaaggtctctcttctggcccaaactgctcaacctggtctgaaaatgtatgtgtgcaatattgcacttcatgatgagatgtgatgttcagggcttctttaataatgcctagaaaaaccttaaaatgggcttggcagatttctttcatttggaggctgtggtactcaactttggtgtttttcattccagactgtaccacattctgtgcccatagtttgaaaaacattttggaagccaatacctgcttgtgtgtagctgcagtcagtttttaaaggttttgctgatgtatattttattttcccctaacctttattaagatcttcaaagttgaaatgactttgcagtggccatctttatccccatcatcaacaggctgccattaatagcattttattctacctgttttattactatctatccatccctccatccatcagtctatcttatttttggatgcatttcaaagtgaatgtagcagatttcaccagttaacttcataatattttatacacttgaagtctagctttttgaacagtacacaaatgtgactaaattgctatagaatgctgttaaagaaggtataaaataaatgccccagttttggaaaaaatttaggagccttattttaaaagtaacaggtattctggaatcctggcatggagttggaaaaaaatatactaatttttaaattggaacttttttgtaactctgacattgctgacccctaaaaaagaggggatacacttgtaaattttattttcatcccaggcaggagttaagtaacttcccgttcttatagagaggcaagatcatcttgaaaagtgttatagacatagaatgttggttacgcccacagaatcaattgcatttggaaggcagaggaacagttaactgaggactaagttgatctatgcagggtctgagtccaaaccctggtgtcaaggtgttaagtgcaaattattattattattttttaaagaaaacactcttgttacaatttggacagagagaatggtatggagatgaaaggttctcgtgtatggcttttgctcctatttatgtggaaagcacgccctacattctttcaaagctgtgttgttccctttattctcagtccccagaattgtgtgcaaacacactctcttggcccaggggtttggctgggtgtgtttccttctggaagtcttcactagcactcttgagttagctggcaggagatcccttaaaaccatttccaagcagtttttctcacttccctataggggctaatcctgtactttccacttcagttccagctgctgttgcttgggaagaaacaaatttctgctgtgttctcaatctccagacggtccatgaaaatttaatgtataagaacaaagaggctgggcgcagtggctaacgcctgtaatacctgcactttgggaggctgaggtgggtggatcacctgaggtcagaagttcgagagcagcctagccaacatggcgaaaccctgtctctactaaaaatacaaaaattagctgaacgtgatggtgggcgcctgtaatcccagctacttgggaggctgaggcaggagaatcgcttgaactcgggaggcagaggttgcagtgagccaagattgcgccactgcactccagcctgggcgacagagcgagactgtctcaaaaaaaaaaaaaacaaaaaacaaacaaacaaaaaaaaaacagaaaatatattttgggcagagattagttgggggatgtgggtgggaaacctggtgattagatatatttaaacgtgtcatgtcagtatagagcgtgaattaaaaataaattatatttggagagttgtaagaaatttaccagtcccttcagacagacacatgaccctttaaaactcattaaaactccttggcacaatggaataacatgcactttggtcttggaagaaaccattaggttgcaatgtttttgatttctctaccactgacttgctctttgatcttggaaagtgactgacttgtcctgtgattgtttcataatcacccataataaaactgacttactgtatatagtgaatagttaagtttaaaactatatctagtttccgttatagctcaagtttatgtattattttattagcgtttagatgttaacattaagctttcaaatcagatgaaatttaatttgaaaaaagttttcgtgtatgaatactttatattctgcagttcatacatgcagtaccacccttaattaaatgatatttccacaaatcagtttggaagattttcttcctgcaaaatgtatgtttaaaatacataaaaattgatgggaccatgtacttatggctagtcggaaagtggaaagttttttagatttatgcttaggacaggtgatagtacttgagcttctattcttagtttgaccttgcctcccccacccccttaaagcaagacacttaatctctttaatgtctcagtttattcatctttaacacctgtattcttatttcatgaaaacaatacctggtttatatttggtagcatttaaggacttgatatagaaggtggtatggaagttcaaattatatagaaagtatttgtatgctgaatgataatcttgacaaattactgattactacatttagaaagttacaactctggagggaattgatatttgatattgttttcctgtgtgttctaagttaccaccataacagtaggaaaataaaccctatcctggctgtgttacaaagggattaactcacttcttcaagttgttactaaatctccagccctttaaacaacagaaataaaaagtgttccttattttaatttttccgaaatgaaagtcctataactaaccttggcttaattttttcttttgttgagggctttccaagttattttctttgtgaggaatggaggctaaaccatgtcagttgcttgaagcaactaaaaataccccgtacaaatatgcagaggagtatgcttttgatttttagatcaaaacgaagaagcaagattttatggagcttgcttattatacatttattatactgagctacttgtgccttttcaaataattaaatattaactaaatacaagaggattaaatagctagactttaaataaaactaaaatagccatattagtattttctaaattctgtatcattgaaagtttaggctgatatgaaagagagggaattcctatcatggggattgccagtcttttcacaaagacctgccactagattttgtagtatatgataaatgtgtgtgtgtttattgtgaaaattgtgtgagtcatatgaaaaattaagtctacttgaaaaatcaaaagacattacctacttgggtacaaagcctgatttatatatatatttctttaatgaccatattatgttatgttaaagtttgtatagtacttggacatatattatttaatttcattcctaaaacaattcaatagggaaagcaagacagatattaatattcccatttcatagatgaggaagaaaaaataacttggcttgtaagcaattcagcagagtcagagattgcatttgagatttttgattctaagtctagtgtgctttccttgggttacaacacaataaagtcaaaaacatttactgttattttcattaattgaaagcttaaaatcaatttaaaattctaacagtataaaatttaacagtataaaaatattgttaatttaattttatgacgttaatttttaaattgatttttgaatttgctaaaagtgttttaaaatcagtatcctgtttcacaattcctgaattaatctcttctctgtacatttcctgttccagtatgataatttatataggctttagcatttacttatggtattaaatgagtagacagttggaagggaattaaaattaattaggtcttgcagttcttataatactcctggtttgccacactgaattgccatgacgtggctggggatccctgttttaacatctaacaaagatagctgccagtgtacttaattttaaaacggtctcatctattaagctgctttataaacatcagccccttttctgaagtccgaagttagttttttaaaatattcactgataatggagtgggggtgctggtgacgtttctctttcttgtttatctgtaaagacagggaggtgcaatctaagttaggaaattggtgacaaatagtcatagaacatgggtcacctggcttcaattagttatgtgacctttaagaaaacaagtgcccgtttcagaaaagactgacctttgaggctagagacatcaagctactcctctacttttaggaaaaaacaatgacagggttaatttaaaactctgatgcagacagagttgaaaaatccatgacagatttatataacgaacgtggatggtgttttgttttcccagaatgcagttttaaggtcagacctatgactcagagctgtgcacttccctggtggtatgcatcagtgacatgttgccagtctaatcgtccagaagggcttgtgcccagctcggcttgctccattataatccccagctgagaagccacctttcattttttttaaatagataaggaagacagcatgaacatttgaaactcaaatactatatgtagtttataacttttcagcctgaagacttgatgcacactaagttgcctctttaattttgagaagtataatctccattgccactaatccatcatggtgtggcactgcatgaggatatgttgtgtgcattgtcagtatcggcgttttgctgagtttactgttttttagttcattggcaaggcatcgtgggttttggtgcaaagagcatggatttggaatcaaaagccacttcctctctgggtggctgattagctgagggtaaccttcatatagctggcatgggatttccagatggcatcctctctgcatgaacaaaaacaatgtgccatttcagtaaactttggtgggtgctccctcatccactccagatcttttcatctctttccttttattccctccctttccttgtaaatcaaaactcccattcctttagtgctgctgatctcttttgggggttagaagaaagcagtctgattaaactaacttactactgtttttagttggttcatcctatctttaaaaaatgtatatatttcaaggctgggtgcagtggctcacatctgtactacccagcactttgggagaccgaggtgggtgggtcaggagttcgagagcagcctggccaacatggtgaaactcttttctctactaaaagtacaaaaattagctgggcatggtggcacgcacctttagttccagctactcaggaggctgaggcaggagaatcgcttgagcccgggaggcagaggttgcagtgagccgagatcgcaccattgcactccagcctgggcgacagagcgagactccatctcaaaaaaaaaaaaatatatatatatatatagatagatagatagatagatagatagatagatagatagatttcttacagcattgtgataacaaatatttgtcaataagagactaactgtggtatagctttacaattggatactatgtacatgttcaaaaagtagaagctctttacgtactgacaaggaaaattctctgaatataaataaatagaactagcaatagaattaatagaaaaagcaaggtgcagaggagtatgtatagtataccactatttatgtttttttttttaaaagaggaaaaagaaaaaatatatagctgcctatcttttataagcccagtatctccagaagcataaagaagacactggtatcattggttatcagtggagagggggaagtagatgtctggggatagatagggggaagaatacttttcactatgtattctttcatacttcttcaaaaatacatctttggaaataaacccatgcaaaaaaaagaatgttcacagcagtattatagtggctaaaaagtggaaataacccaaatgtccattacctgatgaatggttgaacaatatgtggtgtatctgtacaatggactattattcagccataaagagaactgaagtactgatgcatgctatagcatgaatgaacctcgaaaacattatactaagggaaagaaatctgccacaaaaagctgcatattgtgtgattccatttttatgaaagcattatgctaagtgaaagaaatcagccacagaaggccatatattgtatgattccattgccagaagtggcacatccataaagacagaaagtaggttagtggttcccacggggtgggggtggggtatgcagagtgatggctaagaggtccaggatttctttgggggtgatgaaaatgcagaatcagatggtggtaatgattgatatacattatgaatatactaaaagctgctgaattgtacactttataaaggtgaattttatgatatataaattattttaaattttacttagagatggggatctcactatgttgcccaggctagtcttgaactcctggcttcaagcaatccttctgccttggcctcccaaagcacaggcatgtaaattatatctcaataaataaaataacatagcaaaacaacttgaagtcatgaacatggaaacttaaagaatcactgtgaacatataaaacaaaagttttcacctaagaaatgtttttattctaaaatattttacatattatctctataatgacaaaggacttcatgttctttagctaccttcactcacactcacctggaattatttcattttataagtgaagattgttaacccaaatgaagccctgattgataaaattttgggtaaaataactaaagaaagaatgtgtgattatctggaattgagatgttgtagctgcaggccttgcccaggctgtgccagtaggagaggaggtacggagcctcagagaatcttttggaccagtgtgccctttctctcctcacagctcatcccagagctgtccctgcctccttaggctgatatgcccctgttcccttccttgtgttctcctgcagtgagctgaggcacagggtttagggagcctattatgataggaggagattaactttggggttctgggatgagatctgtggacctgaaaatatagcctctctgatcctagtcactaactgctcatgcatggagagtgacagctaagaggtccggggtttcttttgggtggggatgtgaggtgctgggtcattatggacatacggcaatggtctgtctacacaatggtcagataatagtcttcttacagtcatcccaactctagatgctttagccggagttcatcttggggtgggtatgggggattgaccacaacgtgtttttggtcaagagtcgggtagatggtgcatattttggttctgccacccctgggaccttgggcattgctgtactcacccaagctatgtctcggcacaaacagcctcatctcctgagctgtagagtcatttctgtaagtggcttgatgagatagggtcttttagatccatgtccttggcatttattcagaattaactcacataatatgatgctaatctgcattctggctggagctgcatataggtagcctcttttcattgttggcctttatagccaacttaagctcagagatgtgaatcaagggtggcctgcctgatgaattagtgcttataaggtaaacccttatttgttgtgttggaaagtttattgactctagccagaaaaggtctaattagccactgggccctttcctggcagggaggatgtagggaagaccctctgcagctcaagactggacaggtgacctagacctattgggtatttatttcattagaggatcaatagagcagagatttgttctccccaggtctccatcatctgttcataaaccctcctgacccatgttgagtccacagctgtctccactgggctgtcaagctgctgaggccaattcctctgagtccctaggactttgagttttgctctctgctgccccagtcattctcaggcccatggtccttgcagctgggctcttggccaacatcctgagcccttatctcttttccacatattccctgtgaattagtaaacttgataaattctatttgtaggaatctgctgcttgggtcggccacatttttagcgtgtagttgaattaataatatatagtgcttactgtgtgccagccactgctctaaatgttgcaaatatttactgctgtatttctcacaatgacccttttacataggtactattatcatccccattttacagatgggcaaatttagtcacagagaagttaagtgaaacttgccaatgtcatacaaccagtaagtgatagaggcaggattcgaatttagatattctggcttcagtctgtgctcttagccactgcactatattctcttgaatcattataaaatagatatactaatctcagggcaaatttcctactatttgtcttggaactaaccatgttaattgttcaaccaatctcatataaagttaagccttaaatttctttcatggaagccttcaaaaatagttatggtccagtctaaaccgttttacctgaatttcattgaatgcaataggacaatcactccttgtttcactctctgtaccttagataatctggtcttatttataccagttaggtacctacttcccatgtttgttcttgttgattatcattggaaatgagcaagaagggtggggatgtgaggtgaatggggtgtgatctttccacgtacatgtcctttgatggcttctgctcctctagctgcagactctccttgcgttctcctttctggacttcgtgttcctgtcattctgtttcatgtacttgctgcctggcatggtgaacttgttgtttgacttcaagggctttgaaatcactcactcttgttccttaagtgtcagctgtttaggtagagcctctgcttccgcatccaacctagtccatatctctctcagctctgcgtcaactactgcttccaagttagccaaagtttatccataaactttgtttttctttttaagtttaatagggtttaattgagcaaagaacgattcgcgaatcaggcggcctctcgaaccagagtaggctaagagactccagcattaaccattaactgtggctgagataacttgactggactcttgctgctgcatgagagaatctgcaaaatgtgtcatctacacacacaactgtcccttagtctcagggtctgtgacccagcttaacctctgttgatgaatataaagtcaagggataacaaaccccctttaccatacatagcattcctaaggtttacattgtcatgagtaaagatcccttgctaatacggtacaaggaatagtgccttcggagtccagacactcagcttctagacctggagcagctgttaactcagggaagcaggtgatctctccatctctgggcctcagcttttccatctataaaatgaggtgattggattaggtggtatctaagaccatttccaactctatcatgccatttttatgaagctggagacaccctcagacctggcccactttatcttcaggtccgccaatcctctccaacttgtggaggagcctatactctgtccttaccatgcacaggttgacgaacagggaagacaagctgccattgagggtggtaatctaatggcagaccacacaccaacaggatcactctggttctgcagctgagttttcacaaaacagtgcctgtcctggcacaacagaagagctccttccacagaaagttattcctatttgctctctcagatacgaatcactgtgggccaccgcgctcctctgtccacctgtggttactcctgcattgaatctgaatcaagacactgctcaggcagtcaaatgttggccttcggggaaacttggcagatgggagccaagtgagctttcactttatgtactttcagtcctctggaaatctggatttcccctgctatcaaaatagacaatgctattgcctaacaaaatatagacttcctgagtgacatccaggtcacggcttgatctctttcctcctgctgtgttcatgcttccacttccgtgcaccatgttaggttcagatgatctactgaccaaaccccagagaaccactcatgagtcttttcaacctttaccttgaattctagggctatcttctatttggggtttgaaaacaccagtgcataataaagtaatgtattaattatagttttttggtaaataaagatagatcgtatgttactagccttgatgtttcacacaatgaagcagagctcatgaattattataacatccctgatcaaggcagttgatctcagttatcagcattaagaataaaggtatggatggaagcttatttgatttgttcttctttcctattatggatattaaccagctgggtaaattatagaatagggtcatggaatgtttagccctcaagcatttatcagaggcttaaaatgttcataaaaggtgggcttggtgaatgccaggacttagcatggttgaaagggtgttttgagtcatggtacatggcaatatggaaataaaacagatatgtcacaagtaggtggtagaaataaactggaagagaattttaacatctaaaatgtgacaaagatttatccttaccagcttctcagtttcctgaaacatttattttcctttgattttagattctgtatttatgttatatatctctttctaaaacattttcttgtttctgttttctttacttcttttacttttttgccacttctgttttttgaaaaatatcatcctaggcatgctctgaaagtcatttgttcggtgttttcctgatagtgatttctggttataggcccataaagtatctgtaggatgtggttaggatagttcctacctcttggtaaaagtctagtagtaacacaggaagggcacagactttggggacaagagacatttaaaactgttactgatcatgacattaccaaaaatcaaaagacaggggccatggctcatgcttcgtaatctctctgtgaatattataaggaaaattctaagccctggtcaactgtgaaatgaacaggtcttcagtggagttaattagcattttccaggtgctttgctgtttacagtgtcctttatttcatgtatcttctcatttgttacaggtcttctttcataccttttccttttctctgagattcagagaccctttggggaggctgaatttcaggtttgttttcattaggaccttacatgaccaaatcccccctcttggggttccaggggtgctccttcattttactctctgatgggtatgccatgaattgtgacatttaagcagtgactttgcaaaattggacgtgtcagtaggaaaaagtactcttcccaccttaaagattgacaggaacatgagatggctgaagctgttctgagcttttttctggcaagagtacataggacaagaaatactctggagagctcaacattgaatcacatcatatcatagtgcatgactagttgccttaatcttgcagttggactcactcaggagaaattgttggcagagggattaagtagcctgacaaaattatattgagaaaaaaacttgcagtctattaatttattagtagtagatatgagggaaagaagagtcatgtaaaaaaaaaaaaaaacaactggacatgaaaccacggagaaatccacaaagactccattacagtttgttatcagcctcttgcccctggccatgactaatggccagtaattgtctgaataagtttttaaccatttggaaatttcttcaggaaaagaaaaatctagtaaagggagaagggtgaccacaagtcaagctgtgaatgaggaagtcctgaaatgtgggctaagtgggtcactgaatttgccgtgtttgattcttcggttgcaccactttgaacttttgaagtttgatcctcccagtggtgtttctgaggtagagaggctaggattagattgcagtgtgagaaatcccacaaacgtgattctactgtaatcttactgttctctctcgctccttgataactgggatcccattaaagggggttcattattgacatctcagaagaaactcattgtgaagtctaaaataaagtgccattcttccctacaccagctctgcctcccatattccccattattttcccagtcacccagagtcacaacctcagagagatccttggctccttccccttctttcagttcttgtagccctgtcacagtgtcccttatatctagtttttcctttccatgcccattgcccctgcctctcattctttcagtctttccttgcatctcagtggacaattgcattaccctgtgctgtcttccctgcctcctctcttctctgagatctgctcttcttatcactgcttgcatgactccatctcattctccccttgcaccagttgcagaaagatcctccgtgtgtggctttccctcctctctagctttcggtcctactacttccttatcttgtgcttctgtcacaccccaaccccccccagctgcatcctgcttcttgaacacgtcctgtgtttttctcataccttaggtgacatggtaccattttcttggaacactccctcccccttgtctgcatgccaaagtcttaatcattcttcagggaccaggtcaaatgccgtgacatccatcaagtcttttctcatctccaaaccagatgtgatctctccctgtgataaatgtcagtaacactttatacctttcttgtaatacttgtaaggctctgccttgcatagtagtcatttgcatatttatcttgttacacttgaaagtaaggactgtattttattctttgtgaccagtaaaataccttgcaccacatagtagggcatctgtccaataaatgcttgtcatatacaataaagcaatggctggggcggcattatctacaggttaacccaataataggtcataatgtatctgcagatagtaggaccataaggatgtgtagataaaccctgaagtaaatgattcgcagagggtcacatggaagggaaacagggagtttgatacctagcactcactgaaaaaagcgtccggatactgctagagtgtgagactagaaggcctgaaatgtaaccatcatacaccaaagagagttgctcccaaacaccagccaactccaccaatagtatataaaggtgcgttgtaaacagtacagtgattcttaaagatattattaaacatcatactgttaatatataacaagattgactaatatgccaatgaaacccgtgactccaggtacctgtgaaatagccagcaagggttctgagccactgatccaagacaggacaaagttaccaactattcttcctaagaaattgtttctcatcatgcaaggggctgtttctgtcttggttttgtggaaggtctaattctgtggcttgaggacatctgcagtagggccagatgtcagagcaggtagtggtcatgcttcatgaagtttttaggagggcacagttacctggttgatgcaaatggaagtaactggaataaatgctattgttgcaggcccaagctcccagtccatcctggctggtcatagttgactaattcatggtggtcaaaaagtgattctcttgtctttgaattttctcttgtattttaggcaaaacagatttgttttttgatactttcataaagctgtctatccatattctgttgtcacttttcaaaatgatcagaaacctaaagaactaccatacttgcctaaaagaagacacttcctgatgcatagcttgaaacaggaattgacttcctaaaggaaagtatttggcacaccaagcctattgttcacagcgctgcaagagaggcatttcaacatacatgggctcttcctaaaaatataacttgctaaaataaaaaattcagggttcattaaggttaatcatctaataaagtaagagaatttcctctaggtgaaaagtttcagtttattttaggggtgtggtgttgttacaactggctaatctccgcaccataatttaatcaggctggatgagaaagagactagaaaggcgtggagccagagcacagtgtagcttctcttcttttcccaggcttatttttttcctctaacatgtaataaatttactcgtaacaacctggcttttattgtgtcattttctagctaactgggagttactgatgtcagttgtcttttagaataacttttccttaaacatttgaagatcgtaagaattggggaactcattcattcatttattcatggagcatttactgctcacctactgtgtgctataggaacatgaagacaagcaaagcactgccctggccctcaacctggtaggggagatgtgtgaatagggccaaaaccacttaaacaagacagtggctataaaggtgtctgtaccagcgagaaggtcagctgccttccttgaagttgagtggccaaaaccactttcaggattgcaggtgggactatgttttggaggcttgatggatttttcagttatttagttcattctttcaaggaatagttattgagagcctcctgggagctgggcagtgttctaggctctggggccactgcagtgagctccagtactaaatccctgccttcatggagcaaagcaggagatcagacagcaaggagagaaatcagtgcaataccagcagacttgaagtagggaaaggaacaaccatgactctgggcacaggggacagtgaggaggccagtgaggtgggagtgagggaaagggggctaagggtaaggccagagaaggaatgtggaagaaggtcctggagggacttgggggctttcttttcctagaacatgctcctaatagccagcccccagacatctgatggcctgttgagctattacaacattttaggttgatgtcttcattttcattcatgtttttccttttattgtccctgatgctgaaaaacaagaggttgagtttgtgagacaaaatgtcttcattgtgtgtgtgatggggataggcatagtctccccatcttgttctgtgctgtctgccgttaaggaggtggggagattacgatcactctcctttcctgtacagtaatctgctgatctctggaacatactaaggaggacatagagtgacaacatctataatccccttaatctctatattcatactgtctaatctccttgagttacactggtaacataagtctatctcttagagttacttttatcattaacagcacaaaaatgtattatttacagggccaaatgcaagctcttgaggcatataaagtggattaataaggttggctcagcgttaagctatgccagagccgagtccaaattttattccggtacagggatgactttctatgtggcctctctggctctggagctaatttggatgctgagtagccccgcaggtatttatatgtagcgtttggtatttttactgggtcctattcttctcccttggatcacctaaaatggttaagaattttctagtgggattaaggttgtgatctctggggaggggtgggacatctgctctcggttatttttgtgttagccgcttccccttaaatgtatgttcacaaatgagccacagccttatcagctggggttgagggaagactggtctaggtgctgctcctgaacttggtctctgagccatggcttcccatagacactcaggtaaaacttcatgctctttatcttatattgagcacagttttgttagggcagtgaatccgtcattgggctaaaagatggtttttgatgaaatgattttagtcttgtctgaatagtaaataaattatagcttgtctctgttttgcctttgcctttcatgctatttcaaagacaaaatattgttcaagtacaatgaacagtttgagtgatttattttaaaaagaagtatataaacatgttaccactatatttttacctttttcaggacatctcatgaaactataagagattgtgggaggaaaggtttttctggttaggaatttttggctttcttttttataagatacaattcttcatcttgacagtgctttacatccaaggtgtttggagaaggtaaatcgaatgtggagctgaaaggaggaacatttgtaactaagaaagtccataatgacctagcacatcttcccttttgctgacaatgttttaaatcttcccgaagtaacagctatgttccttttgatatgctaagtatgttattaattgtttttagcagaaaaaggggcacattttggactccttgggacatgagcattttcttctggttttgtaaccttacaattaaggaagccctttggccatcgacaagaaatctatgaactaggggctgaggggccaaaagcccagttatttgaagccaggagggtggctgtggccctgtggccctctgcctaagtaacggttccctttcttggggctggtaaagtcagacggttagatataaagaaggcacttcatcctgtctcccagctttcagattaagggatgtcattatctatgtttttttttttttttgaaaaatcattttttaaaactcattgcctgtcaatatttaaacaatggaaatactttaggaaatttctctttttggggttttaaatatgctgcaatggaatgccctaccttaatgaattaatatgtaatgtcttccctgttcccaagtgttcaaaagttgtctggtttttttttttttccaaccctcaggagctgtttcacaaacatggtaccaaatgcttgagattgtggttatcagccaagatacacattctctgggtgtaggcaaactagtcagctgtgctagttgtcctgatgaaccttaaatgcatgttacctggtagaataactctcattttgtttactaattaagtgacagaatagtgacagaaagtttaaaagtttaaatagtgacagaaagtttatagcatacccaaccttgggttttaaattgcaccaaattcttatgtcgttcttgtgtatgtaagtctggaggctctaataactgtggctaaatgggaccaattatttataccttttagatgatttttgaattcaggaaattgcattttgtattgcattaggttaatagattcatgaaagcagagaagaatcagtccatgagacagagaagtcctcatagaaaatcagtgttgccctgaaacgggctcagtatgggcaaaatagaagctaggataattggatccaaatccatttttagtgactatccatatactgagaggacatttcaaggacaaaaacaatgtatactcttgacattgaagactttctgtctgcaaaattatgtagattcaatttctttagcctttggcctttcaagtcgaaaaccaggtttggggtgtggagggggatcaggtcacttgccatattacacagccatcgattcccttcaccagctgctgctcagtgggccgcacaagcccgccagtcttttctcagggcagggatggaaaatgagagggtaggatgagaggaaagtaatccaactggattggcttcttaaaatacagaagatttgagtgagagtgaaactgaacattttgtgcttttgatgaccaccaaatgactacctactacttcaccacagctggagaaactaaaaacacatgctcttttgctgccgggtcagaaatgctttttttcccatatgaaagaggggctgtgttgcacgtaatctgtgcaacattatgaaaaatcttcatatacagacaaaatggtactagaattgaatctggactgcaggaagttcagtggcacataatttttcttttaataatctatatcgaaccctcctgacacccgatataatctaaaatggcattagttatacatcagtgacccaaaaaagatttgttttttttctaaatgcagcataccagtgaagttgctaattacattgaatcattctgtacacgttctattttgaagggaaaaaacactttctgatttttgtatgaaattgtatgaaagactacttttcagccgtgactcatgagctccgtctcattgcagctacttaggtatttattcccaaatgtctgacgacacctccaggtgcattagcatgtctattacacaagtgtcctattcattggctaaggctttgctccatctgttgaatgttctgaggaaagcattataccctttctttagaagccagtgtttatatgtggagtcactaatgtactggtaggttggatttagtgaagaacagatctgaaataacctgatttttttccatttgggttgttgttcattgtttacactgtacattacacccttcatggaaaacacatagaaaaatgctacctactcatgatattcacattctccttaaatattcatagtttgagcaactcaggcatgagggagaagatgaacaataggaagaaatacatgagaaaatacatgtaaaaacacaagcaagatttattaaatacaaatcgactgtaatgagaggtttatagtaaaaaagaaaaaagaaaaaaacaaatgttgtaatgttatattacttgtatgtgtacatgattaaattgaaagccaaaacttttaattaagatactgaggtttatttaggcacctctcagcatgttggatgtagttcaagaattttctgaaaaaggaagcttgtttattaagtgaaaatgatgtgtcttttgaagcaggcatagaaagtcaggctacccttttggaataaatgtctaaaattttatcacccagccacatttctaactgtattctaagcttgtaaaactttaatttagttaatttttaattaaattatttaataatgatgctttctgtcttagaaaatcaggggacatttatgtggacctaaggtgtaggttagacttcagcaccttacacgtcatataagatgatttttaaaatcaggaaatagtatgtcatattgcattaggttcataagtccatgaaagcagaggagaataggcccaagaaagaagtccttacagaaaggaaatcagtgtggtcctgaaatagggttggtatggacaaaatagaggctcagataattggatcagaagccactttcagtgactatccacataccaaagttttagaaacttagttgtggtaacatatctccatctgtcaatcaacaggcatatactgagtgattcctgtatacaaagccctggattaggtactggggccccctagtgtatgagcagaactttctgtcatagagaaaccccacttgttagcactagggaatgtatccaagtcactcggcaccaaagtatgttagcagcggggaatctgtgggtctgtagcaacctcatttcttgcctcctcaaggaagaacaaggcagagggagaagccaaggcaacttttagagcaggagtgaaagtttattaaaaacttttagagcaggaggccgggcacggtggctcatgcctgtaatgccagcactttgggaggctgaggcgggtggattacttgaggtcaggagttggagaccagcctggtcaacatgctgaaactctgtctctactaaaaatacaaaaattagccaggcttggtggtgcacgcatgtaatcccagctacttgggaggctgaggcaggagaattgcttgaacctgggaggcggaagttacagtgaacagagattgcaccattgcactgcagcctgggtgacaaagtgagactccgtctcaaaaaataaaataaagtttcagagcaggaatgaaagtaaagtacatttagaagatgaccaagcaggctacttgagagattcaaaaagtgcatggtttgacctttgacctgggcttttatatgttggcatgattcgggtgttatattacttctctcctgattcttcccttggggtgggctgtccgcatgcccagtggcctgccagcacttgggaagtgccgcatgcgtggtgtttactgaagttgtgtgcatgcttactttaagcgatttttcccttagcagtagagcattcccagaggtaggtcttataccagttaaacaccgcaattttgcctcttagtgcacatgcttgagcccaattacccacctcctgagatctcatggggacgtggctgagcatcagtttcaggtgtttctgtctattagggaccgtgtttccttggtgccagctgcaaccaattattattttagcgagagatagtttaacaaccatctgaccttcacctgatggccgcctgacattcctggttgggtggggggccctctcttgccctgctcatgtctaatacctactctggcatccctactatgtacagatgagggctacaccgagacattaaaattagtcaaagagctgcccgagggcaaacatgccctccacaaagacaagtggtaagggaagaagcatggtgatgatgtgtagcaattgtttccttcaatgatggctgacactcccattcccggataacagcaataggtcaaggcagacatatctagaagttctggaagattaaaggccttcacatttcatgtacttagaaatagctaaggggataaaaaattattccctaagaaataaatgcctaagtacatgtaattctgtaaggttgaagagagcccaaaagaagaggtaaaatgctggctgggcatggtggctcatgcctgcaatcccatcaagttgggaggccgaggtgggcagatcacttgaggtcaggagttcaagaccagcctgcccgacatggcgaaaccccgtctctactaaaaatacaaaaattagccaggcgtggtggcattcacctatagtcctagctactcaggaggctaaggtaggagaattgcttgaacccaggaggtggaggttgcagtgagccaggatagcaccactgcacttcagcctgggtgacagagcgagaccctgtctcaacaacaacaaagaggtaaaatgctatcttcatttttccctattctctcatttcaaacaaaagaaagtgcaagctgggatggacgcggtggctcatgcctgtaacccctgtaatctcaggtgcggtggctcacgcctgtaaaatgcactttgggaggccaaggcaggtggatcatgaggtcaggagatcgagaccatcctggccaacatggtgaaaccctgtctctactaaaaatacaaaaattagctgggtgtggtgtcacatgcctgtagttccagctactcgggaggctgaggcaggagaatcacttgaacccaggaggcagaggttacagtgatccaagattgcgccactgcactccagcctggtgacagagcgagactccgtctaaaataaaaaagaaagaaagaaagagcaagcttttctctcctcatgaagtcaaagcttgatagtagctcagactcagggagcccacactcaggatctttgcatgtgtgtctcagcattgtcatttataagctggctttttagagttgttttggtcttgtgcacatcagcacatcattcatattttatacaaaattgtgacgtgatcagtatctcctccaacttcatcctgagcacactgcgtgcatgagggtttgaaattgttttgtaacaaataatcataaatttagaagtacgtgacgtaagctaattcaggttgcccagagttccacttaatttgatttattgcaaaacaaatacgaaagttcatgaatttgacatagacattgttaacatactttaagtatttctagcctgtttacttattatgcaacaaatccaacattcctagaagtgcctattttatctagactaattgtttccacacacattaaaaggactcaagtgaattgtagaaatgtattctaaaagaatatgccctttgaaatgattctccatctggatacagactgcaggtttaagtatagagtggtggggaatctaaggtgtaaggtgaccctagagttttcaaactcagagtgaaaaaatcttgcctaaagctaggattcaaaaataccaagagatgaaactcttcttatgggtactattaacttggggttgattcatttaattttccttttgcttggtttaagaccatgtactataggaatgatacagtggccagtgacttcattgtctgacattttcaacaccctttgttacttctatcttcactggtgagctgtggattattttatcatctggatgcttagaactctgagcaagtcatgttctagaactatgagactaaacaatgaagaactttgcactggtaatatcaaagtactgaaagtgtgtggttttaaagtgtgaaaaacatggcagttaagatctctcaggtactttgaaccataatgcagttttccttctcttcaaaacctctacttctaaatggcattcattgtgttttctagtgttttttctttggtatgacactagttaacctgtatttcttaccataaagctaggactcaaatactaagaggtttgactcaccttaggtggaactttatatagtactttaacttagaaatatttggaatcaatttctgcttataaaggtatcaaaagcaagtgatactaaaacgagtaggttcaaagttgtatactaaatagagaccttggtaagagagaatgagggattttcaaatatggtccagaagatagtctctgaaaggctaaaccagcaatggttactagccatgcaggaagccagtgctgtctaatcttacaaattctgttttcctgccaaatggcatttaggagcaactgataatttatttcttgccacttgccgttactggagatttatttggtttctcaactcagcccttaacaagaaagcaagtctttgttgagggcacaatattatcagtatggcaaagctaagacgaggcttctgtgtgacactggaaagaccaacaagaatggattaaagagagtgattttccatatgctgtcactgggacaggtacttttctctgtagacacacaggctaaaagcagtttaaaagcttccttacctaaacagtacatagttcaaggagataggccctgtgtccattgcgtctctagtttttgtttctaacccattatataaagaaacatcccagtttgctttttagagaaaagttcaagttagaaccattctctggtcttgctaagtctcttaattgtgacacaactgtcctaagcaactgtccttgcacaagaatgtcactcatctgcttcatctgccagctccttagagatgaggggggtctgtgtgtcagcaggaggcagaaggccctgtggctcatccagtggcctgatttcctttgtttggaggcttggttctgagtgagagttcaacagcctttgcccaggcggcttctcaaacacagggtgtggtttccttagctcactctctgctgtttggttgctcatggcaacaagatccaaataacttggacatgtgtttgtataaaaaaaacctgggaatggaacccaaagtgagactttggggctttcagttagtggaagagctgcggtgagtaccaggcaactgctcatttattttctctcattctttctctctaaattacgctggaagtttgctagcacaataaccatgtttgtggatagttttagaaagtagtctcaattcttgtatttcctgcacaaatgaaataattgctatctatttacccgtgcaaatttctttttcgggggagaggaacaaattagcatatgtttaaagaagttgaaagctaatagaaactcatatttggtaccttttgggtggcaggattctataggaaatgccttggcaaagggagctgcagagtgccttagtaatgcttgggattgcaggcgtgttgtctagggccacagccggggaggggaccagggagggaagaggggttgttcatacggagggagtggaagggattcttggaataattttttccagactctattttaagattataatttttaagacagcaaatatcccaaatggtaatactggttacacttctatgagcatattgattctcacttgcttgactcaagggagggtttgattttggtcacaaagccacccgtgactatgacagataattcaaggttgccaaacttgcctgtgccaattgacaaagccatttatataagtcctctcttgctatattgctctggcctcaaaaggcagtaaactctcttggacaaaactctttaggatctattcagggatttaacacttttctgctaaattgcaagtaaatttaaacattttaaacaaattaacaaggattgcttaggtacctggtgtggtacagaatgagctgtcagtttctattctgatgaatagaattttatagataggaggaacgggaggcctccagaggatactaccctccctaaaaagagacggaggaagagctgaaagcgggcagagaggcttcttgatgacaacgtggtgggcttagagaagctgctgcctgcaggcggggcccctgctttcctgcacccctttgagcctctgccccacactcttcctttgtataaaacaactgcttcttgcctgcctgccccatcacacccctccactccatcgggtcactgctcaatggcacaatagcactgctcagccatacctcccagcatcctgtcccctatctggtgacttggccaacacaggctctgatccacttgccccgctccgcatcttttgtgaatcagcacagttgatatatctgagcaggggcttctaccatctccccagggaatcactagccatcggccatctggccccgcggggtgcttttgttcctggaatcatagtgaagtatctgttgtcttggtgcctggtagtcagctcggctgaaggggaagctgggtcttggtcctcagaccccatggactccaaggcagcattgtgcaggtgcctctgggagccactgctcagggtgctggggcatttcctgtggtcatttgtcctgtctgcttgcccccgcaggtccctccagctacaaggtgggcaccatggcggagaagtttgactgccactactgcagggatcccttgcaggggaagaagtatgtgcaaaaggatggccaccactgctgcctgaaatgctttgacaagttctgtgccaacacctgtgtggaatgccgcaagcccatcggtgcggactccaaggtaacgggcatccccatgtgccaatgggaagggctgggttttggagtgtcctttgcccacaaccatggcagcagcagctggctgttaggatttcccagcatcactgcagccaccttgaggcctcaaggaagcctcctccactccccaggccacagtggcccgagctgtttaatgtggggcttgactggatgggcgccagcgcccttgccagctcttttgattgcattctaaatatttcaagaattgtgagatttttatcctcacctcagcgtccctcctataagaatagtcactgtggggcagtcccaggtgtaagggactgtgtcatctcagtggtcagtcccagggaaatcagccttatgggagggctcctgccaccacccccagcacccctcatggtggcccaccctgtctgcttggtttccaggaggtgcactataagaaccgcttctggcatgacacctgcttccgctgtgccaagtgccttcaccccttggccaatgagacctttgtggccaaggacaacaagatcctgtgcaacaagtgcaccactcgggaggactcccccaagtgcaaggggtgcttcaaggccattgtggcaggtactgcctccttcccaccccgggttcccagggaggaggccctgagggcagacgtgatgtgggcttgcttatcatggtggggctaacgttgctctgagctgctttgagatcttagcatatatatgtacacatatacatacacgtatatatgcgtacacatatatgctcgcacacacgcacacactcggagactaaagaacactggcgagaacagcctgtggcaacagaatgaagtgaacagtatgtagcgctttctcatttgggcgtagtaagtgatgaaagcatgcttcttcctcagggtgtcattctgggccaggcagtccctgatttaatgtctaagtgcacgcagggtatagaggtgggggagtgggggattcaggcactggatcctaaaataataatgctggggtccccacccatgacagaaatcctgggttggcacaagcacaagtagaacacaggtaggttagttggaggtgtgaggccagtaactgcagggcctgcatcccctcacctctggagggcctggggaggggagctgagtggatgcagccccctgcagagcctgtcagtggggctatccaattgcttccctctgcaggagatcaaaacgtggagtacaaggggaccgtctggcacaaagactgcttcacctgtagtaactgcaagcaagtcatcgggactggaagcttcttccctaaaggggaggacttctactgcgtgacttgccatgagaccaagtttgccaagcattgcgtgaagtgcaacaaggtatgctttcaagggagttctgcattgaccgttgtttctagaagtgtttgacagtttgcagagcacttccacacacactatcccattccatcctcacgacagccctgtgacgtaggaattattattcccgttttacagatgaggagatcgtggattaggaagcagtgccacagccaagtcaggctgtcagtacgcatcctcagcctggtggtgcgggtggcccgtatggcatgctgagctgggcagccctggctctagaagcctgcctccaccacttaggggctgtgtaacctcacataggggctcaccttctccgagccttggtgtcttcatctgtaaagtggggataataatagcccctgcctcccatggctgttgtggagattaaatgagatattgtataccaaagcgcccagcacagtgcctggcacgcagtaggcattcaacaaaatggttgttgaatctgaatccggtgctacactccctggtctaggccatcacatctggaggaatcacttaccaggatcagccctggcatgccgattgctttgtgtgtgttacctgctctaagaagctggctgggcagcgtttcaccgctgtggaggaccagtattactgcgtggattgctacaagaactttgtggccaagaagtgtgctggatgcaagaaccccatcactggtaggctaaagagtccttgctaagtctgccaggctaggttttgcgcatggtaaccatctctcattttcctgtcgtcggtttcatccacaaaggcccccagagaatgcccttctccccctgctattgtggtcccaaaggccccccaagagtttggattcgtccccaggccaggttagcctttgcaatacagaacacttcctgactgttgactaacaatgctgagagttcacaagcctgagacctgccagccaacaccggcaggcactgccactttgcagggggattctggggggaggggtgggaggagggtagaaagaagggggtgggggagggtggggaaggggtaagggaggccgaagagtgataacccgggattgtaataccccatagctgaaggctagttcagagatgcctgttggcagggtttcttttttttttggtttgctgtttatttgtttttgcgatcagcaaagctaatcacttcattcctcatctcgcggccgcgatccacgtgccctgggccctttcccttgcctccaattttcccatcttcccggggagccttgaaatgtacatttgagaagacttttgccatcctcagggaaaaggactgtgtcaagagtgagccacccagtctctaaagctaggaagcccccagtgtgccacgggaaacgcttgcctctcaccctgtttcccagcgccaacctccggggcaggcatccgggtggagagaggacttgtccctcgtgggtggtggttctttatagaaaaaatcgaagcttagcagctcctcgaggcccggtaagtgcacaccccacgaacagcccaagtttgcctcctggtggccactttgatgtcatggccctgacctaaatcaaagaaactggttatgctgggaggtcggtgcgcgtcacagggcaatagcgtggtggcatgggaacgtggggtctttacatcagggaagcccttggccgggcttcagcatcttctcaggtccttgagagccacagcagggttgcggcggcatgggggacaatggcggcgtgggggactgtgcacgatggagtggaggagggggtctgggagccaggcagacctggctcttgcgtgcttgtcggtctgtgagtggggcaggtcgtcattttatctctctgaatcgtggtttcctcacctgtattcattcagctgtttctcttgttttcttttcttttctttttttttccccccagggtttggtaaaggctccagtgtggtggcctatgaaggacaatcctggcacgactactgcttccactgcaaaaaatgctccgtgaatctggccaacaagcgctttgttttccaccaggagcaagtgtattgtcccgactgtgccaaaaagctgtaaactgacaggggctcctgtcctgtaaaatggcatttgaatctcgttctttgtgtccttactttctgccctataccatcaataggggaagagtggtccttcccttctttaaagttctccttccgtcttttctcccattttacagtattactcaaataagggcacacagtgatcatattagcatttagcaaaaagcaaccctgcagcaaagtgaatttctgtccggctgcaatttaaaaatgaaaacttaggtagattgactcttctgcatgtttctcatagagcagaaaagtgctaatcatttagccacttagtgatgtaagcaagaagcataggagataaaacccccactgagatgcctctcatgcctcagctgggacccaccgtgtagacacacgacatgcaagagttgcagcggctgctccaactcactgctcaccctcttctgtgagcaggaaaagaaccctactgacatgcatggtttaacttcctcatcagaactctgcccttccttctgttcttttgtgctttcaaataactaacacgaacttccagaaaattaacatttgaacttagctgtaattctaaactgacctttccccgtactaacgtttggtttccccgtgtggcatgttttctgagcgttcctactttaaagcatggaacatgcaggtgatttgggaagtgtagaaagacctgagaaaacgagcctgtttcagaggaacatcgtcacaacgaatacttctggaagcttaacaaaactaaccctgctgtcctttttattgtttttaattaatatttttgttttaattgatagcaaaatagtttatgggtttggaaacttgcatgaaaatattttagccccctcagatgttcctgcagtgctgaaattcatcctacggaagtaaccgcaaaactctagagggggagttgagcaggcgccagggctgtcatcaacatggatatgacatttcacaacagtgactagttgaatcccttgtaacgtagtagttgtctgctctttgtccatgtgttaatgaggactgcaaagtcccttctgttgtgattcctaggacttttcctcaagaggaaatctggatttccacctaccgcttacctgaaatgcaggatcacctacttactgtattctacattattatatgacatagtataatgagacaatatcaaaagtaaacatgtaatgacaatacatactaacattcttgtaggagtggttagagaagctgatgcctcatttctacattctgtcattagctattatcatctaacgtttcagtgtatccttacagaaataaagcagcatatg

SEQ ID NO: 92 - DNA, 100596 bp, Homo sapiens
ttacaacaatccatgcatactttttttaaattttctttttagactcatatttagtttgcttcaaaaactaattgctctactttatgcaaacacattattttaatatatattttgttgaaaagatagtatccagatggtatgcaaggcttagactctgacaatttcagagtcaaattggggtcaataataattaagcaatattagctcatataattcttttagtgattttataggtagtattttgcccacaatttctcaggtaagcatagtacagccagcatttatatccaaatttattatatcaaatccattgcttttaaacattatgctagcttaaaccagtagtgtaattaattttatacattttactacatgaaatgagaaggtttacaatatgattttttataattcaatgagtgctatctgtggtaaataaatagataaaaatgttgattttatctctaaattactgatctgggcacctctattttatgttttatacttaaggatttggtcactttttcaaccttaagatcaaagacaagatacagggaataatttttatttaatcattactttttataaaatattatcttctaattgttatatcctgaaaatttttcacagattctgtctttcaaatatgtttctactctccagtgaggatctaaattgcacacaatggacaaaatagttattataacaaaatccaaatataaaataaatataattttgaaaagagaaaaaatagaaagaactacttttatgttcttaagatattaatagttcacagctttgagaaatcaaagagtatctgacagtacaattactaattaacttagattcccagagagaaacatttatgtaaactactttcagggttaaggcttttaacaattgtatgttgagcagaagattattaaacactgataggctggtaagggtgcaataaaactttatgagtaggtcaatatatacctaagcagctttccttgatcattattttggcagccttatccaagtctggtacaacatagcaaagagaacaggctatgaaataaggtaagtctatggctcatatgttttttgttatttttatgttttcaactaattatattttttcttaatttgtgttagcagtattcccatctatctgcactaggctaaaatagcaatatcatatattttaagttgccatttgaaatatgtagtaccttgtattaaacaggaaaaaatatttctaatttttttttaaatacaggattttttttggcccaactcttcattataacttttgtaagacttaggtggaatcatagcaagttttgtttaatgactctatatgaaagaaaatgagtactgattaagattttgaaaaatagatgaataataaagtatgcttaaatatattttaagaaaatctatataaaatagaatgctacatttataaaacattactgttttctagctgaccttttaaagatcattcatcaagttgttatacaataaagtattattcatcttcataataaatatgcagagaaagggtatcaatatatattttccaagaagagttgcttaaaattactgtaatccaaaattacagggatcatatttttttatcacagtaattttaagcaattgttttaaattttgttttgatttttctagacaaaggagagtttgtttcatgacaaaaatgcattttttaagacttcccttatcaaaaaggaaagcacaattctcattattgacttcttggtagcaaagtaggttatcacttcaaatgagatttacacttatttaaagttgtacactaaatgtaactttgtcatttctcaacataacatcacgcaactgggcttcatttttcgaacagctttgtatgttacctgttgctctgtttactttacattcattttctttgaaaattactgatgcaataaacagcttacatatctggaacagaaaattgtatactaagaataaatgctaatctgcagatattcatttataagctatactaaaaaattaagtttttgcttacttaatattattctctgactacttttataatttttgctaacaagaatgtaacgatctaattgaggaaattaacatatacataaataattgcaatggacatttaatatgctatggtaaatgaagaaaggctagattaactgtgcctcagagtggtaaggaactcaccatggcatttgaattcagcaaaatttagaattcacctagaagagtggatggggagggattgaaattgaacagcaggtatgaaggcaatatgttatctaaaaattatgctgtggtgctggggataaaatgaaggcataattctaaaaatactttgaagataaagtcagatggacttattgaatgattgaatgttgtaaaacatatggaagaaggaaaaaaaggtgtttaggttgggacaactgggtacatgagttgacatagttacagaacagggaccattgtgagaccaaaaaaaaaaaaaaaaacaaaccgtgattttaaacccaataatttattaaagcacttactgtagtaattctaagttctactttggtatatgtctttgaattaagatttatactaaaatcatagaatacagataatccatggaaacttgagaactaagaaaaataagatatatgtggtcaaaattaaattaaacaaatatgctttcagataattattggagatgtgttctttcctgtctacatttgggtatcttccatatgctacctcaaaagtataatgtcttttaataataaatatgtatttttgatataagagttttgtatatctcatttgctgctgtttgatgaaggaacttggtgaaaattcaaaagatttttaaacagagtagcaactcccaaatatatactattctatcaaatatatgtatttatgttcttttcgacaatattgtggaaagtagtgttggaattagagagaggagagttcaagaaaaaaactgaagtttttaactttgaactataacttattctttgttaagcttaaagttcctgatcagtaaaatgtgaataactatttccttcatagaattgttgtgagaattgagaaacagtgcaagtggaagcctttgccttgcaaaatgctctaaatgagaaggcaagacacacctacttgaagatctttttttccatctgtattttcatcttagtgtactactactactgtaatgtgcatcagtaattcattccttttactttaaattgcatgtgttgcttacattttatatcagtataagtttcaggttattaagtacatgcttaatatattattaagtaagtgcttaatttaggatattatgtaagtgctgtcttcaactctgcattatacatagtaaaaaaaagaatatgtaatttcatgagaattgttggtggtttattatagttatatattttacattttaaatatatattcttttctgtttttagatggcaagaaagaaatttagtggattggaaatctctctgattgtcctttttgtcatagttactataatagctattgccttaattgttgttttagcaactaagacacctgctgttgatggtaagtagtacattaaaagcatggctacattatcgtgaagttaggaggaagttactccacaatagttataggttttaaaaaataatctgtgtaagatgaaacacttatagaaaaatccagggtaagttacacaattacttccactttttctattcattatattccatatttcaatgatgagctattgtaagtaaggaatccatgtgctttgacatgaattgccttccctagctacttgacaaagagcaaagaggcaaagggatcaaatcgttaatgtaaggtggaataatcgcctactggtgtgagcatcatctcattagtgggaaaacctgggtttttgctccagccttcacacacttgcaaaggaaataaggattttagcaaatattctttgttctggttagattttattttaaggagagagagaggttgtatgagaaaggcaggtagaggaaagttgaaaaaagacttggatagtttaattatctgtttctgaatattttaattctaatttagagttggtacatacggaatgctgaatctctttcttcattattctctcttgagcaaatcagtattgtaaaggatgttacacattatcttctagactacagttagcatttcctattcctgttaatcttttgttttacctacttccagaaactgagagcttactgtattatgaagcaatatattttaatgatatctcattgctggaatgttatttatatggcgttggtatctaccattcttcgctattccagctttctctactttacctatcaaattattcccttgcaagggataatttgaataactttcacctactttcctcttctctaatttcttctcaccttctctatatgtttttcataactcatattgctccatcttttcttcagctataaaatacaagttgtaaatacagtatgaatgtatattttgttaccttctgaatctacaccaagtccttttgtaaatatattttgtatttcttcagaaacagtcaataggattctacactgtcaattttaaaagtatgattggatcttttccttttgatgactagtgcttgaaattgtgggtctttttaaatgcaaaatttattttaaaattttcattttatatgaattcatgtattctttcaaaaagtacttattacttgataattctgagaaaattaatttaatgtcatgttttattttattgagttttttcctcccccagaaattagtgattctacttcaactccagctactactcgtgtgactacaaatccttctgattcaggaaaatgtccaaatgtgttaaatgatcctgtcaatgtgagaataaactgcattccagaacaattcccaacagaggtctgcagcaaaagtctttaatatttttaatgaatatatacattattatattaagataattgctgaatattggatcgatcttatttaataaagatctagacataaattaggctgaatttatcattttattatagcttcctattaaaaatgatagataatagaagttactgaccttgctttcctttatctctgctcaatttaaattaacaagttaatattcatccatatttaacaagttatagttaattttacaaatcttcatgaaattctgtcatctcaaatctacttctttaagaaagtatacctttgataatatagaacatttaggagggagtatatatgttccagtagagtatttgtaatgatagcattaagaagtatctgtggaaaacaaaatactcattttatgaaaattattaattgtttttaatttagcaattagaagtgaagaagagaaaatggagaaaattaggtgtaaccaattggattcatgtaacccaagttcactcttcctttttttccccacaaacctgtgtgggaataaaagtcattgtgtgtgggtgtatatgtacagtccttcatgggtatcctcggggaattggtttcaggacttctgaggataccaaaatctgcagatgttcaaatctctcaaataaaatggcagtatttgcatataacctatgcacattctcctgtatactttaaatcatctgtagagtatttataactctaataccatgtaaatgctatacaaataattgttataatgtattgttttttatttacattatttttattaccatgttgatattttttgttccttgaaatatttttgatccacagtttgttgtatccacagatgcagagggctgactctatatattgacattttgcaaatatttgcatttgcaaatatgatatgcaattacaaatgtcaccttctccactccaccttaccacacacaaattaactgaataaactataaaatttattttgtccctattctgtcttccctacatcatagtaagcatgcaattttctaattaatttgaaaaaaaattgaaagagatgagattttcctttgagtaacattacaagtaataggtcctatagcttacctgctgatagaagagctaaataacatagtatttactgagatacactgaggaaagtggccagatattctctttacttaaccttcttaggcagagcttgcagtgggcagagatcgcgtcactgtattccagcctgggtgacagagcgagactccgtctcgaaagagagagagagagggaaagagacagagagagagagagagagagagagagagagagagagagagagagagagagagagagaaatgattgaagctaaacatagaattctattaggaacaatatgggttttgaaggtcttatagggaaacaatatttgaaagtcagtggtttacatttttcttgcctaatattagtctttagtgtcaacctaaactgttagattgctgaagaatgttttcagtgtgaaataaactatatttgtgaagtaagcaagttaaacttcagccaatatatttatgcttgttatttataaaaatacaacttacagttttaaaagtttaacttagtatatctcaaaagaatttgagtgttttcttgacatttttaactaggaaaagtgcaacttaaaatgattttaaagagattatcatttaaatggtatcttattcacaaagttttggatttatatggaagcttagactgtttttcaaggctaaattaatattccagtgtcactttgctagtttacaggcaaaactggaattagaacagtggtatgcaaatttcaatgtgagctcatgtttcacgaactcagtagtcactgttctttaactagcatgtcataattttctaagtagatgaattttcaaggtagcatttttctattataggaaatggatttaaaaaataaatcataaaggaatgaaaaatgaaatctacctgaaattagaaaacgggcctaaatatttgcctttttttgctttaggagatgttgcaattttcaaatatgatttttattcaaactttgtcactcagggttttttgttgttgttgttgttatttatagctatgtatctttaataatacttttcattaaataccctaaagattctttaaaatacttcaaatgttaattttccaccatcttaacggatcaactaaagcaattatttatcatcttaaatatatacacttactcttttaaatatttgagaggcattccatctgactaaatattatttgttccaaatgcagtggtagagattgaagttggttaaagtaatgattttctaaaaatttccttaatttaaaaaaaaagatttatcttaggttttcatatacatgaggatagatcatgattgttaaaattggaaaattggttatattaaacttactgtataaattattgtatactagaaatggcatgtttattgtatattagaaaggacatgtttgcttattgcacaatgatgacaaaatatagaataatcaaatggttacctaggtaacaggcataattccatgcaaagtgcattagctcgggctgccataacaaaattccgcagaatgggcagcttaaacaatatcaattattttctcacagtcttggaagctagatgtccaagatcaaggtgtcatcaaggttggtttctagtgaggcctctctttctcgcttgtagacagcttccttctcattttgtcctcacatagtatttcctcttcgtgcacagagagaaagagatcttcgctgtcttttcctcttcttataaggacaccagtcctaatgaattagggccccacccttatatccttatttaaacttaattaaccccttaaaggacctatctccaaataccttcacattgggggttagagcttcaacatatgaatttcgggggcataatacagtgaatatacatatctacatattgaatacacattatatattattacatatgaaattattacatttaatatataatcacttataatgtatatacatatatatgataaaatatgttaaaatatgataaatttattatacctttatttgctagagtttaactgtgtcagatgaaggcaaaaggaaaataattagatgagaaattaaaaataatgaggaaaatgcctaaaaccctgaaaaataggaagaccaactaaacataaataacaagtatcaaaatcttcgcaagataaattaaaattactaatattttgaaagcaacaacagggagatacatttttaattaatatgttggagtgtatatgtagtaggttaaataatgttttccaaaaattcgtgtctacttggaatcgcagaatatgagcttatctgggaatatagttttccagaagcaattagttaagatgtagtcgtagtaaattaatttgggccttgcgtcgaatgactaacgtccttataagaggaaggaaccacacacagagacagacagggaagaaagccctgtgaaatggaagcaaaaattggaaaaaggcgcctataagccaaggaatgccaaggattgccaggagccactagaagctagagagagacaagggagaattattttgtgaagcctttggaggcagcatggctctgctgacaccttgagttaggacttacaacctccagtacggtgagagagtaaatttctgttgctttaagtcaccttttccatggttgttatgaaagacataggaaactaatatggcatattttcaggaaattaacgtaagcctattttactatatatttttaattatgtaaattgtgattatagtgtgcttatttctttcctcttattttttaaacttagcacctttgtgtgtttatagatgtatttatataaatgtatttagagttttatatacaaatctttcatagagactgctgtaagtaattttttttgtagaattgtctctttgtattgctaggtatttctacaggttagataactggagataaaattgcctgatcaaaagttgcacacactttagactctaataagttattagatccaattgtaccccagtttgcaatgtatatgtgtatatgtgtgtttgggtataaatatataaatacatactcaaacacacacacacacacatatatatatatatatatatggtgtttagagagattttatatatataatatatgtatatatacatatataattatatatgtatataatcatatatgtatatttattatacataaaaataaaactatgtgtatttttattctatataaacatattttatatataatatatactttatatataaataaatatatcaaaatatattttatatataataaatatacatatatcccatatacttatctatttaaatattatataaaatatataaatatatagtacatatactatatatattatatacgtgtgtgtgtgtgtctgtatctgataccattttaatttgaggataaaataggagaaaggttagtgcacactttcagctgattaaaatggaggcttttaaaaacttattttcatggaaagtaagcaaaggggaaaatcctacaatttttcaaattatgaaagtgtgtcacactattaaatttacatagatttataattatactgctattcatgcatagcatcactattttgctaaactatttataaataaacatttataatttttctttcacttcagatagtatttccatatggttaataaaattactgagaattcagtattttgctttattaattgaatgctattgcagcaactacttgtgatacctggcacataaactagttaagatagtttaaataattaaatatgaactagtaagtaggtagaattaaatcccttacacattttaagtgggtttaaattcaaggccatattttcatcctcctagtttaaatttcagcttgatacataattagtacaaaataaatatttcagttcttccatgtcaataccatggcaacagaataaattataattacttagagatcaggttcctttaaaatacataagcttacaaaaatttgtatagatacgtgattttaataatcacatctcaggttataaatttctgacagggtgtaattaattcaatttattaaatacttgtatttcttccaggtagaagaaacaaaagagcaaatgctattttggcatattatacatttgaaaaagttagattattttaaaatattcattccttggaaaaacagagactgggacatctgataatagtagtaattatataattcctttaaaaatattttatcagggaatttgtgcacagagaggctgctgctggaggccgtggaatgactctcttattccttggtgcttcttcgttgataatcatggttataacgttcaagacatgacaacaacaagtattggtaagaagtcctctgttataatgattcaatatgatatattctaactggagcgaaaatgtggaaaataccttaaatagaatcaaataagaaatatgttcctgagaatgttcaaattccttatttttgcatgattgtaacaaatttaaaaagtactcatttgtggtaaatacaataacataaatatatttaataattgttaacattataaatcaagtcactcatggcagcttttttttattctttaaggagttgaagccaaattaaacaggataccttcacctacactatttggaaatgacatcaacagtgttctcttcacaactcaaaatcagacacccaatcgtttccggttcaaggttcggtttttaaggtttccaaagatttaatactaaaagacatttgatgggctgggcgcggtggctcacgcctgtaataccagcactttgggaagctgacgtgggcggatcacaaggtcaggagatggagaccatcctggctaacagggtgaaaccccgtctctattaaaaatacgaaaaattagccaggcgtggtggcgggcgcctgtaatcccagctactcgggaggctgaggcaggagaatggcgagaacccgggagttggggctttcagtgagacatttgatgaacacacctttcatcctacaaatacattttctctcttgagaaatatttattccaaggcaaagaattaattaaactgcacttctctcaaattgtttatgcaaatataacatacgaataataatagtgtgctctgcacttatttttggaggctttaaataatatcgttcatgtaaaatatttagcttaatgccttgaagaaaataaacattctcaagaaacatttgaaaatttttattatttaaactacaggctatgcagaagattaatctaaaatttaatttcagaaaagtgttagtgtcgtatacatgcaacataatactttcactgattataaattttattcatgattttaaaaactatgattcttttttttagcacgtagtttactagtataaatattttggatttggaagtaaaaacagcaccaaattctttgtatatcacctttttagcaataatttcactggaactaaatttttctttttctcagtgattctgctttatttcagtgcttctttttagtttctataatttttttaaacaaaatttcttatctttatgggtaagattcttatctttatatagttatataaggacccaaacactgaaaagcattgagattgattaaattcacaaaggtctaatattctgtaatcaatatttggtaatactgtcatttttatatcagtcaataaaaatctgtacttaattttatacataatacttcataaccaactaattctatgtatttctttaaaatttatacactttttctgtgcatagccattcaaaaatattaaaattaaggttctgaattaatactcttctatgaaactaatcaccacgttattttttatttggaacttgcatttaataattcagaactggaatattaaataatagtttagaatccagtaatgctaccttgcttaaatctttccagattactgatccaaataatagaagatatgaagttcctcatcagtatgtaaaagagtttactggacccacagtttctgatacgttgtatgatgtgaaggttgcccaaaacccatttagcatccaagttattaggaaaagcaacggtaaaactttgtaagtgtattattttacaattatataagtttattctattattatagaattggaaagtcttaatttcaagacattttcagtagaaataaatttcctcccaaaagagggtaggtggataggtttataaaaattacggtgataaaggagtttggtttcttgtggatgaaagatactggaacataaattagaatctacaaataaaggttgaacaaagatgaaggtggagagcttcactaatgcaaccctagccttgcatatatttgtacatacctagaatagctcttgtgtctttcccccttatatttatcgtattttgttgccaatttgtagaatcagacagttactattcaaagaccaaagaggagttatttcccatattaatattaaaataatttatatatatgtagaatccaatatagaatgaacaccttcattatgattgtatgaggggtgtaggtgcaagagatttggtaatttcctaggaatggtttcaagataaatgctcttgtatccctaagaattgttaataaagcaattgtcaagattaaatctcagcaattactcttattaaatgtatcttagtacttttgtttatgactttgtgttaaatcataaaaatattaaatgccatgtgaaataagccaggcacaaaaaggcaaatactgtatgatctcccttatatgttgaatctaaaacatgttgagttcatagaagcagaaagtaggattatggtttccagaggctgggagtggaggagaatgggggagatgttggtcaaaggattagacagaaacaacatgtttttgagaccaatcaacatgatgactatagttaataataaaataataatttaatatatattgcaaaagtactaagagactactataaattctaaatgtgcggtaaaaagtatgtggtgtggtggatatgttaattagttttatcatcaaataatgtacatcaaaacatcatattgtatcccattaatacagacctccctcagtatccatgggagactgctttcaggataatccccactcccccactgagtataccaaaatccatggatgctcaagttccttatataaaattgtataatatttgcatataaactatgcacatcttcttgtatacttaaatcatttctagattacttataataatgaatacaatgtaaattatatgtaaagagtttttatactatattgtttagtgaagaatgacaagaaaaataagtctgtatatgttcagtatagatgcaccattcttttctttccccttaaatagtttccatccctggttggttgaatccatgaattcagaactcacagatatggagggctgactgtatatgcaatgactaattgtcaataaaaataaaagcatacaaatcataaacatcatttagcatttctggtagtacatatttcatctgcataacacataaaactttttgggggaaaaatgctttcaaacttaatttttaagtgtggaagccagtaaaatactgtattttaaaatctagtacctagagcaagcagaattgggtttgaaacttggctctcctgcctaccagtttgtgatccctaaaaacatcaattaattatcccagtttgtgtcatctttgaaatgtgattgataatggtagttatgctttgaacttgtgatgaaaagtaaagaaatggatgtgaaagatattggcaaaaattgtgttgatgcagtgaacaaatttcttttatggggtaatttgtgtgtttctaagaagtgaccaaagctaaccactggcatgtttataatgaaatcttctggatgatgttaacataaacctgtatctggtagaatatcatatatatatatatatatatatatatatattagattatttctttatttcttttatggtgcaggtttgacaccagcattggtcccttagtgtactctgaccagtacttacagatctcaacccgtcttccaagtgattatatttatggtattggagaacaagttcataagagatttcgtcatgatttatcctggaaaacatggccaatttttactcgagaccaacttcctggtgatgtaagaaattatttttcttgttataaataaaatcactatattgcagcagatgaaaatcttagcatatttgaaaacagcatttattttaactgatcaactaaactatttgaatgtcactgataccaatatagaagcttgtttagcttgggagggacaattgataggttctaaattgactcagtgaccaacagattttgtaaaggttttcacaggatttccagtttaaaaatgttttattttgactttcatgatcgtattttattattcctttttcactcaccttgtacttatatccatcaatagctagctattgcactagaataattccaaacactgttttacatgtcttcatataatacaatgtctgcctagctaccagatattatctcacgcatctctgtccttcttactgttctataatatatagtcattttccgtaacttcaaatctttgcacagtttgtttttttggtaactactgaaacttaatgttctttatcactcatatatcattcagcactcaatgaaaattttatctcataagaacttctcccaaactctcccataagggcttagtctttatctttatacttgacttagtataataatcctattagtgtattattcctgtatatgtttgtttttatgtttgttgctcaaaaaatgtgagatttttgagaccaaacatcataactttaaaaaaatatgtttgattcatgatggatttgggtcaaacgtttgtcagttacttctttttaaatggcaatgctaactatttctatatcaaagataaaccagtgagtagttgttttaaagagtttcatttggtacagaattattaataaattttactaatctctgtttgcagcatcactatctataatcgacaccagagtgagactgtcagagctaatttccatacatcctttcctttaaaaatccatatctaattagtcaggaagtctttttcctttcatcatatcagtgtatttccagtttgtctctatcatgtcagctcttcatcagctctcaagaaacagactactaaatttttattaaggtacatatcattttggaagctcctgcagtaccttgggcatacatgggcctaactgataaacatgccattaccttatcatgactaagttattattttatttatttttattttttattttatttatttatttttgagatggagtctcactttgtcacctaggctggagtgcagtgagggtatctcaaatcactgcgacctccgcctcttgggttcaagcgattctcctgcctgagcctcctgagtagctgggattacaggtgcgtgtcaccacccccagctaattttttgtatttttagtagaaacagggtttcatcatgttagccaggatggtttcaatctcctatctcgtgatccacccacctgggcataagttattaaaattaatgtaattaaaatgaaataggacagttaagtaatatattaatagtattatatatgttatatattttatacattactatattaataatgttaaaaagtttgaagttttttgttttacctataatatttcactggtacatatagtgaagacaatttgtgtagaaacaggagaagtaaattatagcaacaaattaattcatgaagagcatataaaatatataatctttttgtgttttaaacatatttgaaaatcgtattttcaaattcttgccttatagaataataataatttatacggccatcaaacattctttatgtgtattgaagatacatctggaaagtcattcggtgtttttttaatgaatagcaatgcaatgggtaagaataattcatttgataatatatttatagatttcacttgaaatgttttaactgctctctttatttcaatcattcatattgtatgtgagagtaaactctattatagttaatattaacatgtgacattattataagaagattttgaaattaaagacaaaatcaatttttgcatgccagcgcatctattttggggagagtatgctatgctgtggtattcaggcactctattttcctttcaaaggaatgttgaaacacatccatgccaatgggtgttttcattcccacaatctcatttgtcgagataagtaaacatgccactacaaatgaaaacaaaaaagatgtctatggaagtagaaaaaagagtattttttttagtttatcataactcatataatgtagtattttattttgtaatattatgagtgtagtatctaataggtgaattggtgataataaaaaattaaagaaattaatcacatttcagcaggatcagtttattacatggttttccagccagttactgtgtcttacatttagaaaagttaaattaaaacttttgacattttgtcttttagaaattaatatgtgataacttgatctttcagataatcttcaatttaaacgactaattaaaaatgcagttttagagaaaaatcttttggtcgccagagaactaatcctttgcaactaaccctttgcaacacaatatccaggggagcttttgccaccacctgtgaaagaaaatagctgggatattttattataagcctcagacatgttggcgttttacttttttcctatgttattcctgcattcaatatttcattatttcttaattatttaaacatattgtaaaataatgtagttaatacaaattaatttaaatggactttgcaattaattactataatccttttcactatttacatataagtttaccaattttattttgcagagatttttatccagcctactccaatagtaacatatagagttaccggtggcattctggatttttacatccttctaggagatacaccagaacaagtagttcaacagtatcaacaggtgtgtttcaggtctattttataaaattttttctgcatacttttatttcatctaacatgaccacatatttagatgactttattttacatagtaggggcctcttagctaaatgttttcgaaaatcttatcatatttaagatgcagctgggtgttttttttttcccctatacaatgaactctacatatactcaagtatctatgtttctgaattcaaaatttcttacctctaggcagctgagttcaagaattggaattcattgagatgttgaatattatatatttacttattaatgactttatctgatggaataaagcaaaaggaactatcttatttaacactgaggataggcaataaatgtgtaggtcatatatccttttggtcaaaatcctagaggtaactgagttgtgagaagaccaatgaatctagccataaattcacagcaggtaaactccaggaaaattggctcttatcctggggacttcagaaggttgagtttgaaacctagcctgaaactttacatctccagttactatctaagcaactcttatttacatattaagtaacatcttgtatacctgagcccaatatgggctttagagaggtggggaacccaggacctacactgaagatgattctaaaactttcatgtaatttctctcttttcactgttgatatatatgattcctggtgttacaatggaaaagaaaattattttcattggtttaagattttaagattatgcctattttaaaaatattattttcttgatataccttttgacataaaattcccatttgcaaaaatgatctcaaaagataattgattactataaaaaattttaaattaggatccaaaaagctgaaatgagagcagctaaggttttttgcagtttaatcatttacaatgtctaatcattcccaagttcatgtttataaatgtaaaatttagaaaagaagcgcagaaagtttacagtatctgtaatataaaatcataattacagttctaggctggcctacatatagactttgtgtgtgattatcacatgaacaagagagagaaacaacactctgatattccaattgtcaaacataagttggcatagctatctcccacatgttaagtaaagtcagcagaatgtcaaactatttcaaaaagaatattgttacatatatgttgattcttcacatatatatgagaaaaaatttatgtcaacatatatgttgattcttcacacatatatgagaagaaatttcaatcacatgtctaaatctttaattctatggaacatatggtgtttaggagtatagtttaaaacatactaattcttgagagctttatttgatatcaggtttatttgatatcaagtttgaaataagtttagtatttcatttgaatagaaaacaataacccaacatgagtaattaatttctttttgattgttacctagtaactttttacatatgtatcatggagaaatcatggatcctatatatatatatatttttttttaatatatataccagatatatatgtatatatataatatatatatgatatgtatataaaagcctaaaccaaagaaaatttattatgttgagtatgattatgcatcatatataacctaactggtgaaaaaaaaaacaccagttacatccaaatttccatgtgcaaaattatatcatctgttgtaatgtgacactgatattctcttgcactgagattgcctgggccattacagaaataggaagagatggcgatccatttgtccccaggaggaagaaatgaagctgaggcactgcatgtgaataagaaagagcctatgcaataactgggtgggagcattgcagaacatatattttattaacatttttgcaaaccaggagatagataactgccaaaatgtaaggaaacagaaattctgtacttttaaacatcttttctgtttttcttgtatggtgacttgtaatagaaaataggagtgtggtggaaaattttcccttttgttatttatttgttgcttttcttgtattatcttatttaactttctacaatagacaaaacatatcttggcaaaagctactttctgatatgctacactttctaatttttaaacacaaactaaaacgtgaagtacaagacatgaacttgttaaaaatttcataacacattcaaatagaataggaaattgtttagaatccaggtaacactaaaggtttgtttaaattatataaacttaaatgaattttagagatataagaaaataagaggcacattaaccttggttattaatgctaaatatatttatttctattcaaactaattacatgctcatttactttaagcttgttggactaccagcaatgccagcatattggaatcttggattccaactaagtcgctggaattataagtcactagatgtagtgaaagaagtggtaaggagaaaccgggaagctggcataccatttgtaagtagaataaagggtccgtgggaatatatatcaagttaaatattgtcacataataagaactgtaggaaattgtcaggagtatctactatatacattatatcatataattaagaggctgccttttaattgtaaagtatattttatctcatatgtaatgcccttgcctcctgaaagtacaaatatatgcttttgaagaatcaattgttagttatactagaacagaatacatattccactgtaaacaaaatcatatttagtttttaaaatagaccttaattttagaatctacatatttttaaaaaattttctgaaaagtgtatttttgatttttgtatgttgaaatccacgtatataaaaacaatgcattctagtcattatcactgacaaatatgaataatcacttaatgcttttgtacttaataattagaaaaaccagtttacaaacagtacaattgcttctttagtgaaatgaaaaggatggacgttcatttattttttaagggttatgtttataatacacgttcaatggagttaaagattgacttgattagagagctctttcagtactatgtattgaaatacaatcttctaactttcaggatacacaggtcactgatattgactacatggaagacaagaaagactttacttatgatcaagttgcgtttaacggactccctcaatttgtgcaagatttgcatgaccatggacagaaatatgtcatcatcttggtaataatcaattataccttaatacatttttagtgtttacacgtgtaagttaatagattttgcagtttctgctttctattattaggaccctgcaatttccataggtcgacgtgccaatggaacaacatatgcaacctatgagaggggaaacacacaacatgtgtggataaatgagtcagatggaagtacaccaattattggagaggtaaaatatgatatttattaaaactatgttgctcaaattttcttctctgaaataataaagtttctgtggatgtgcgtgtgtgtgtgtgtgtgtgtgtgtgtgtatgtctgctttcaagtctgaattttatattttaattgtggagaaaaatattagacaaagaaactactccaagaatttataaaacagttcttataagaagtcatgaaaaatgtaaagatataccagataaatttcttcatggtttaatcttagtagattgtatgtgtttaagaatttatgcatttcttctaggtattccaatttattggcatatagctgctcatagtagcctctaaaaattatttacatttctgtgttatctgttgtcatgtctccttttcaatcactgattttgtttatttgggccttgctttttttcttagtctagctaaaggttagttgactttgtttatattttcaaaaaacttttcatttcgttgctgttttgtactgtttgtttttcaatttcatgtatttcttctctgatcattttttctttccttctactaatttagggtttggtttgctcttgcttttctagttctttaagacatatgattaggttgtttatttaaagtttttcaacttttttgatgtaggtacttactgctataatttttccccttagcacttctttcattttatcccatagactttggtacattgtgtttccattatcatttgttttaaaaacatttgtaaattttttcctaaatttattcattgacccagtggtcattcaggagcatattgttcaattttcatgttttcatatagcttccaaagttattcttgttatttatttctgattttattccattgtggtgtaagaaaatagttgatatgatttcaattttttaaaaaaaaatattttaagacttgttttttggcctgacatatggtctacccttgagaataattcatgtgctgaaaaaaagaatgtctgtagccataggatacaatattctgtaaaaatctatcaggtccacttagtttataataaagattaaagacaatgtttctttgttggttttctgtctgtctggatgatctgtacaatgctgtacaaagaattctctttagcatatcttataggacttgtctggtgttgatgaaatccctcagcttttgcttgagaaaggctatatttcttttccatgtttgaaggatattttcactggatgtagtctactaagataaaagttttttttttttttttctctacagcattttaaatatgtcatgccactctctcctggcctgtaaagttacactgaaaagtctgtgccagatatattggagctcctttgtatgttatttgtctcctttatcctgctgctttttgccttctttctttatccttgacctttgggaatttaattattaaatgtcttgaggtagtctcttttgggttaaatctgcttggtgttctatatctttcctatacttcaatattgatatctttctctaagtttgggatgtttcctgtcattttccctttcaatatactttctatctctctctctctacttcctctttaaggccaataactcagatttgcacttttgagactattttctacatcttgtagccatgcttcattgttttttattctttttttgtctcctctgactgtgtattttcaaatagcttgtcttcaagctcactaattctttcttctgcttgatcaattctactattaaaagactctgatgcattcttcagtatatccattgcagttttcagctcaagtttctgcttgattcttttaaattatttcaatcttttcattaaatttatctgatagaaccctaaactcctccacgttatcctggatttcactgaatttccccaaaacagctatttcgaattttctgtctgaaagttcacacatctctgtctttccaggattggtctctggtaacttatttagttcgttttgtgaattctggttttcctggatggtcttgattcttgtggatgtttgtcactgtctgggcactgaagagttaggtatttataatagtcttcacagtctaggcttgtttttgcccatcctcattcataggttttccgggtattctaagggacttgggttttgtgatctaagtctttgttaactgcagctgtatctgctttaggaggcacctcaagcccaataatgccatggctcttgcagactcatagcctatggctagcgctgttctaaatgctccacctatgggtgtaagctgatttctgcccctttgtactttctgctgtggcaggccaatactgagctccaatgcaaaagaccacaatcactttgctctcccttcagaaagtgcacagattctctctccatgcaccatgggcactgttggggaatgtgagaggggtggtgtatgcaatccaagactctctttcctaccctcttcaatgactcttcacttgatatgatgctaaaatcaggtactgtgatcactcacctgaatttggttcttaggaaggtactttctttgtgtatgggtagttgttcaatttgatgcttctgcagggggggatggtcactggaggcttcttttcagccattttgctctgtctctctgccataagcttcattcttatcacattcatccaacttaaagtttcccgtgaaagtcttttaaataattatgaactccttttgtaaaaaaagaaagcccacacaatttcctacccttaattaacatttcacagaacacatgttaacaccagctttgttccttatggacagatcagacagccgatttgaaatgtttggatacaaaacaatataatttagctcaacttatctgaaattaaattctccttgcctaatgtgattattgtaagtaataagtcaaataatgtaaaataatttcaagaagcctaaatcagaaaaagacagcataatacacatagtgtttaacagcatggactcaggtgtaagactgtttgggtttaaattgctgctgtacctgttattagtagattgactttgaacaacttacttaacttctctgggcatcacttctctaatctgcaaaatgactttaattacagtacctacctcatctgtaagtggtgataaaaatagtacctgctttcaaaaattctaatgaagattatatgttagtaattatgaaagtacttgaaatagtgcccagtatgtatcatattcatgtttattcatacaaataaacataaaagacagtttttaaaattgcttggaggcatacacctttggaaataagctaatgtgctttattttatgggatataaaatatattatatagaatatttattgtgtatgtattaaactatcctacaaggatgcttaaaaacaaatttacagtcaaaatagcagccttataccatgttctgataatttttttcttcctaaatgcttcatgatttcacctttttttaactgctcttctttaaatgcattttaaagtcatgatattcttgtaaatttatatatgagtcacatatacctaaagaagtagaataactttatttttttttactattctcaactttattaatttgaaattccatttatttatttttctattttttatgtatatatgtgaatgatctattcttctaggtatggccaggattaacagtataccctgatttcactaacccaaactgcattgattggtgggcaaatgaatgcagtattttccatcaagaagtgcaatatgatggactttggattgtaagtagctattttaaaccaatggttttggtcaatgaccatagacttatttatctgtaaaaattactaagtcaacaaaatatttttttctgatgtattcaatgtaaaatttaaagctactataatgttttttcccagaatggataaatatacccatcgtgtgcataagtaagaaaacaaaacaaaacaaaaaatgccaatcaaggtttttcttttttagcaatacactgtatagaataaattttatttctgtatgcaaggttttgttcctttatgactaatactttacctgaaaattagttaataagatttggtgataagcctattgcagtgcaattagcaaaacatttattaaagttgacaacagtcaagcaacagcagcaatatgatctgaataagcccctgccctttagagacttctctttagtaagctatggaagagaataaataaaaattggcaataggttaagtattactatatctcaaaaaagcaacaaacagaatcctagtttgctcataaacttattaaagaaaaatacagtcttgtgtgatggctcatgcatgtaatcccagcactttgggaggctgaggtgagccaatcatttgaggtcaggagttcgagaccagcccgaccaacatggtgaaaccccgtctctactaaaaatacaaaaattagttgggcttggtggcacatgcctgtaactgaggcagaagaattgcttgaacccgggaggtggaggttgcctgtgagccaagatggtgccactgcattctagcctgggcaacaagagtgaaactctgtctcagaaaagaaaaaaaaatacaagtgtttaagagtttctttaaatgaagttgtgtatctgtagttattgatggcctgctgctagggatagaaactaaattaccactggcaagaatttggaaaaagtacataatggacacactaaggatgactatattttctttggtttttaggtccacaccatctctattttccttaagtgctcattattgattcaatcattattctaattattcacttatttattaaatcaatcaatcatttagttagcaaatatttattttgcaccatgtatctatcagacatgttgttgggaatacaaagatggaaagattatgtttctgctgacaacatggatttgggtaaaggattagcataatcttcaggattcctatgatgacagtaacaaaatgaagatgaaaagccttcagttatttaacataaaatcagtgatatcacaccactaataactagcaattggtagaaataaaaaaaatttactgtgatcttgagctttatttttaattctagttcttatattatttaacctatattgaaagtttctttagtcttttatttttttcttagttaggagccactttgattacggtaaagttacaagtataaataatactgtaggaatagtgagacagagcctgattgtgttatagaaagagagagtgttgcatttcttgcattcattgagaactgaaattcctgattcacctccaaagtgtgggagagaaggttatctgagaaaggcagagtatttccaacactgctacagaagcactgtaactaagccttaaacaaacaaacaaaaaacacaagaagcagtataatttcaaagatcagtgaacatcagtgaactaatatatatcatggataaacagtggatattctacttttagctattacttatctacttgccatatcacactgctaagtggtttatctaattatttcactttcttcagattattgtttctgatccagctaaaacaagttgttattcaactgataaagttttaatatttatgtcaagtataaaaatagttttataatttactagatttgtaatttagtttccatgctaatatttgtgaattttaggtttaaatattaaaatcactttgggaaatgatgtgagcttaattgtcattgaagtatagtttttgtgtataaaatataataaatttgaattctctttttttacatcatttatgggataatcgaatagttgagaaacaaaagcctactgtacttaatgtaattaagaccaaaactatgatttcaaaacaaaagtgttagtcaatatttttaaaattaaaataccatttccattttttgaatacatatgcatattttgatatcattgttgttattttggttctattcttaaaaatctaataagcaaaattattcaatgaaaaaactgaataatttaatatatagtatttggaaacataaattttataagaagatatgcccaaataagtttacatatccaaataactagaagcttatttggttatattctttctacatttcatgtgaatcttataaaaatgaaattcttttacaaattcttttaaaaatagggctatatatatttagatttagtttaaatgtgagtataaaatgccatcagatcactatcacaatttttaaggaattttaaagaaacttgaggtacattctcagaaacaaagttgacgatttttttttgttttttgagactaagtcttgctctgtcacccaggctgtagtgctgtggcgctaacttggctcactgcaacctccgccacccaggttcaaaagattctccctgcctcagcctcccgaggagctgggattacaggtgcacttcaccacgcccagctaatttttgtatttttagtagagacggggttttgccatgttggccaggctggtctggaactcctggactcaaatgatccacccgccttggcctcaaaaaatagtttttaatagacttaagatgatttgaatgacacctacatatctttagatgtttttattactatcagtccactgaggcttttgcctcatgactacaatgttccaaatctactagttgtaatattaaaaatcttaatttaatgcagtggtatatgacattaaataactgtagtttcacttaaatcatttggataaattagagaattaaaatgcttttataattttcaaaatgccacttaaaaacactacaatagataaattcttttaaaatatgggtagtaagtttaatttaatacaatcttgctatatagacatactttagacatatttaaggaaggttactaaaatattaaatgtcatgtattatgtaaaatatggttaaaattatgaaaaaaaattttgcctcagtaggttaataatttatattcttggttcaaaaaactattttcccttttattgtgagctggcaaaataatcacattctgattcaatcatgttgaaatggtcatacaataaaacttttaaatatttttaaaattattttcagtaaaaccaattaattattttctaaaaaaaattttcatccttaaattacataataatgtttactttcattgatgaaagattttgtgaaatttatggcaaatttacacatatttaactcaaatagaaatgatattaatatcatagatgagtgttttacccttgcaattcctcaactatattatatattcggatgttaaaattgtttagaaaaagactcttttaaaatttaaaataatgcagctcactattcccaaattatacatttcagcagcagttttttaaaaatttaatgttattggcggaatcatgaagaaaaatgtagtttacctacacttatttgctgtgtaactatggtataccattattaatttctactggacacaggaaacaaaattgaatataacattccagacaatttcaaaaaaataactcaatgtagctttagatatttttgtactttggaataactatattaatttctctcatttctgcttactctgaaaacatttgggaagtggaaatatataccgattaaacgtgtcatgataacaaatctattcttttttcccttgagcaccattaatttatcatttcaattccatgtatcaaatttccttagcttctttttatatccatagttagaaacttttatgagaatattttgagaataatagagatgaataatcatattgagtgtgcttgggtcagaggaactcaatatttatggaagcttttgcaaactaaataagtatgtctagttatagttataattttatgaaacaaatgactacaatacaaatgattcaccattacatgtgtttaaaaaattattttattagtgtctttgagtgacaccatcggtctcagatattttctaatctgttaataaatattatctgggaagtctcagaaagtagtatgaaagataggtttaatgattgcaaagttaatataggagtgttaaggttaaagggaggattgaaagctgaaataagaggggaaggattcaagaagctgaaaagcagtgagtcttaaaatatgggcatgatgtggatggggaaaaggaaatgtaattaagaaaatctactttttctgagagaaataaaagtaacacagacaaggatgtgactgaatgtgatgtctttatgtgaaaggagactattatagagatgagaaaaataaggcttatagaagtcctcaacacagtttgcagagaagaaagatgaaatgcatatttcttgagtatatgtactgtgatatatgattttataaaatttatcttttttagtgcaaagacttaactgggttatggtcacatagctagcaggcagtgggacaagattggggcctatgttaaaatggctagaaaatccatgaacataatatcccaccactatttcttcaagagatgtttaggtcttggttctcagagtgtgatcatgctcacctggggttctctgaatgtttcagagattctgtgaagccataactattttaattaaaatactaaaggctatttgcctttttacagctttcattcttttatgagtgtataggagctgttggtaggcaaattttgctgctagcaatgtgcttagcacatcatagaaactaggtaagtttaaatgaaaccaaacatattgaatcaatgaatatgcaaggaatgtgtatattaatggactcataatgagaagactaacagctatttagaaatgacttaatacttataattaatgtaattatatataatcaaaactagacacatgaactacattttgattgtttaaaatctctctatcccatctaagatacttatctgatatagacattctgtttatttttaggttggtagcttatatttatcttctaggaattaacgagcattatggttatcttatataaaacattttcaaacaactagagagtttctgctaataggatttataattatgtaaaatctgctgttcttcattttgtatccattcaggacatgaatgaagtttccagctttattcaaggttcaacaaaaggatgtaatgtaaacaaattgaattatccaccgtttactcctggtaaaatttatttggttatctaattactgttttaattgagaataattttgtagttgactagtaatttctaacatatatttctaaattacaatttttggtatagttctaaaaccataaaatcaatttgtttatcttttcttcagacaaatattttctgcctaggattatatttaaatagacaaatctagtataaggctttaaaattggtccataaatatatgatgtacaatatagtttggtataggtatatttctatattgttaaaggttatttttaaagttaaattatttgttatcgaagttaggaaacagagtatttgccaatgtaaatataaatctaatagttaatccaagtttagcaagagtgaaagatgaggacctaattggaacttattttaggtttaattggattgtcctttgtcattgtttttaaccaaatatggaatttcataacacaaatgaaaaggaatatgacatttatgatggaaaatatataacttttataatggaaaaatataagaaatgtttcttatgtattttctcaaagatattcttgacaaactcatgtattccaaaacaatttgcatggatgctgtgcagaactggggtaaacagtatgatgttcatagcctctatggatacagcatggctatagccacagagcagtaagtgcaatttcattcaaagacttctttcatatttattgcttaaaaatgtttttgataatttatcaatgtattcataattaggaaatagcaaagttgaaaaaagaaagataatattttatgcctgctaaaaagttatggcattcaaaatatcagttctcttactaatattcatgaatttgggactcatttattaagaatgacatggtaggctgggtgcagtggctcacacatgtaaccccagcacattgggaggccgaggcaggcacaacacctgaagtcaggagtctgagaccagcctggccaacatggcgaaacccagtctctattaaaagtacaaatctagctgggcgaggtggcaggcacctgtaatcccagttacttcggaggctgaggcagaagaatagtttgaacccaggaggcagaggttgcagtgagccgagatcatgccactgcactccagcctgggtgacagagctagactcagtctccaaaaacaaacaaacaaaaaagaatgactctctctctctctctctctctctatatatatatatatatacatatatatatgtatatatatatttaactaagactcttttttgtaactcctagatttaaattatccttcaaaattttaccatttctgaatataactgtgttttaagcttgcatctcacaattagcctgggaaaatattgccccaagaacaggtctttaactatttttcaaaaagaagtattttaattaaaatgtagttttctaattaatatccttctaactaattttctaatacatttttataaaatatgatacaaaacaaaagaagaaaacaatcatatgttcattatctactaattttcaagcattgtttatggtcctgtgatacaatagtcagtaaaccaaatactattctcaatatacttacgattttctcataattaaacagttgtgattgagtgtttattcaaatttgtatttttatggtcttaaatcatactgataccagaactcttaaccactgtattcatggtgttacttcaatttactttgtaaactcaatggagtattacatgaagcagtgtttaagttaatatatcctaggaaagaaaaaacaggctatgtttcaatataataaagattataacatggaaaagcacttgagaatgtagttacacatttcctaattgtttccaattatgaaaatgttatcaataatagttaggtaacgtgagtgatgcttgtagttgtggacagtggttaacttctagaaaataaaaaaaaaatcttcttaattatgtaagttttatcccaaccttgcctgctaatatttgaaaatgtcgaaataaatatataattggagtcatcacactacaaaaaatgtattaggttcaagttcaggtataatattttctatttataagggaattcaattactttaaatattatatttcaaaaccaaatgttgagtggataccaaatgcccatgtttatgtaatttgataaaggatgattggagtcattcaaaatttagtgatttctaaaaattccttttcactgtattttaccagaatatatttaaataagtaaatattaataacaaaatacaaaattgatataaaattttgacataattattataaatattatggcatggtgtattagcccagtttcatgccactgataagacatacctgagactgggcaatttactaaagaaggaggtttattggatttacagttccacatggctgggggggcctcacaatcatggcagaagacaaggagaagcaagtaacatcttaggtggatggcagcaggcaaagagagagcttgttcagggaaactcctatttctttaaaaccgtcagatctcatgagactcattaactatcataagaacagtgcaggaaagacccacccccataattcaatcatctcccatcgggtttctctcacaacatctgggaattgtggaagttacaattcaagatgagatttgggtggggacacagccaaactatatcacatggctttggaattatgaaattttagaatttaaataccaactttattttttaaaataaattgtatttgttaatttggttttatttttagagctgtacaaaaagtttttcctaataagagaagcttcattcttacccgctcaacatttgctggatctggaagacatgctgcgcattggttaggagacaatactgcttcatgggaacaaatggaatggtctataactggaatgctggagttcagtttgtttggaatacctttggtaagacagtttcatagagtgttactcataaaagctacaattacattaatttttaatgtaatcttaattaattttagtaaaatgatcaaaaggcatgttacagaaataattcagttttttatttttatggagtttatgaggaaaataagaatacagatggtatctataatttccaaccattaaagtgggaatgtagaactaataaaattcaatgaaatcaagataattgaggaaaacaaatataaatataaacagcatataaaagcttatatgaaagatgtaaagaaaaaaataagatggtgaagaaaagttcaaatacattggttataaaaataaatgtcagaagtctaagtctacttaaaatattagattaccagtttagattttaaaagataatcttttgtttacaatatatataaaacataagaacagaaaaaaacgtttaaaatttcaaaagtggagaaaatgtgtactaggaattgtagacatgaaatatctgagaagtctaactctatcaaacaaaaacatagcatccaatattgatattcaagactaaagagagacactacataacaaaaataatgtagaaggtattataaaactatagtgatttgttttctttcatatgcacaaataaaacaaacaccaaaaacccgatcaataaaagtaacacccccacacacaatcttgtgtttgaaaattgaaaaataggctggacaaggtggctcactcctgtaatcccagcaatttgagaagccgaggtaggtggatcacttgaggtcaggagtttgagaccagcctggccaacatggtgaaaccctgtctctaccaaaaataccaaaagacgggcatgatggcaggcacctgtagtcccagctacttgggaagctgaggcaggagaatcgtttgaacctgggaggtggaggttgcacagagccaagattgggactcacttttttgagaccctatctcaaaaaaaaaaaaaaaaaaaattgaaaaacatattatcaaattcattcatgagtcaaaagataaactgaatagaattgaaaaaaaaaaacaacctaagaattaactgttaacaattttacttattaaatcttgggaaatttcagctgttaatatttaaagaaaaacttactgatttaaatacttaaaaagaaagaaacgctgaacagtgagtgaagtgcatgaatttaaaaagtggaaaaggagaaacaataaacctaaagaaagatgtaagtaattaaaataagagaaaaaattaatacaatgtaaacaaaatctctagaggaaaaattttaaaatacaaaggtggctcttcaaaacttttaataaaatagatcaatttatagcatatttgttaaaaaaagaaggaaaaacaagcaatattcaaatgtattttagtataaggtgtcacttattatagcaaccaattaataaactgtaaccaacagtcaatattaaaactaaatgtaggactttttgagaaaatataagtgatagctaagtaaattaaagatataccctgttcaataataagaaggctcaatatattaggaataggcattctctacaaaatgttatcaaaattttgtggaattccaatttaaacaataaaagggattttgggaaacataaaaggtgactctaaacttcatatggaaaacaatacattttaaagaagtagagaaaaagaatgaggattagttctaaccagataaagctgtagttattaacacaatgatactggactgtggatatacaaatagattaacacagcaaaataagacacaggcccatgcatgtataatttgttaaatgacagcagtgaagggaagtatcaactatttatatggactattgactcagtatttaggaaacaatataaaatgtgtcaatttctcacaccatgcacaataaacagtcccagatagattaagggacctatgtgtgtaaaataaactttatccatttcagaagaaaatataaaatggtaaatttatgacatcaggttagagaaataatttcttaagcagaatacaaggagaataaatcttaagagaaacatacataaatttgactacaacaaaatgaaaacttctgttcatcaaaagaacatttgaaaagttaaaaattaaaagcaactcaccaggaaatgttattttcaattcacatagtctataaatgatattcaatttgaagtgcctaccttaaatctgtaaaaattaagaacaatagaaaaataagtaaaagatataaacaggcaattctatagaaagagtaatctatagggacccaataaaaatatgaaaaacttctcaatttccctgtaatcagagaaatgcaagtaaaaactgtggtgagatatattttatgaagaaaggtgataaaatttgtctgaaaatatcaagaattggcaagaaaatgaagaaggggaatcttcgtgtgctatatagtgcttgcaaatggttacaaacagttccgattatacaatgcacattataagtaaaccagaaaaataatcctatgtatgtacaccatagaataagaatatgttttttacatattcacaaggatatctatacagggtgagtaacccctatccaaaatgtgtgggaccagaagagtttcagatttcaggtattttcagatattttaatatttacatatatgtaatgaaatgacttaaatgagcaaatttatgtttcatatacaccttatacacatagtttgaaggtaattttatataattttgttcaggaaacagttttgactgcaacctgtcacttgaggtaaggtatggaactttccacttctggcattatgttggctctcaaaatgttttggattttgaagtatttcagattttggatttttggattagggatgctcagcctatatataaatttcacggaagaatttttatagtcatgagttcccatatactggagaactagagtgacattaatataattgaatttcacacaaaaaggaaattacattataatgcatacaacatgtcatttatactgttaagaaaacatgcaaaacaatgctatatattgtttatagatacatatatacttacacagaaaaaataaagaaatgtttgtaaatggtaaacactaaattcaagatagtattttctggagagtccttgaataaggataatgcagtcttacatgggtacacatcgggcaaagctcaattttattcagaataattaatttcaaagctcaacatgaacacatggtcacagtttgttattttattcctacagttacatattatattataaataagaaaaatcaaatcaaagaagttgagttagggattaagaagcaaccaacatattttaatacagtaatttcatcttttacaatgaattaatgagaacatcaaaataaaaaatgagtaaaatgtaaatacaaaaggataagaaaatgcataaagggacaatgaaggaaagaacatataaaataatgcaactagagacaaggatagagcaaaaatggaaaataaattggtttaaggaagcatatataaaaggagtaaaacaaattgtatataaggcacattcatcagttgaggcatacagtgtgatgctctaggcaaatttgagaatcttaacattataaatagtaaatatatttgttatttaggttggagcagacatctgtggatttgtggctgaaaccacagaagaactttgcagaagatggatgcaacttggggcattttatccattttccagaaaccataattctgacggatatgaagtaagagcctcttgttctccatgttgcgaaataaaaaacaaccatagtttttattaatgtacttaaattaaatctatagagtatatggtctgaaagattgtagcataattcataagacattgttagaagtccctctctcaagtcctatacatattttgtatatttttacattttttaaaaaacggtcaaataaggaaatcatgaaatgcaatgtattcacagcacaaatattttagttgagactaacgcataactgtacaagtatattaagttaccggtattttaaagtagagccaaagcttttagagtatgaattcttggattctaacaatgtaatttccaggtaacttttatacaaagaaaagttataatatactgtcatggattttgagtttgtgtttagttcatgtaaaacaagaatttaaagatagtcacaaaacaattagagtccagcgtctttcaataataaatagaactggcatagagacaaaaacaaaactaacacttttaaaacacggttttggactggtaggagcagaagtgccagacaatacaaagctagtctaccagccgtgggaactcagcatactgtgggctcatgatcataggcatgtttttcggagagaatagtaaaattcagttaaaccattaagtcaattaagtatctgttggttaagaaaccgttcagtgttcacacactggttgcatacagggcttatattgtgtttgagaagagggacaactactgagctcagcctggaaggaggcatgatggaaaaaaattaaaaggtacaaattggagattagtttcttcctaatacaccgaaatgatactttcagaaaatgtgtgtccatgggagattttgatagaaattacatgacactctgcgttcacttgtattctccaaaatgctgatgataagacagaaataaattttgaaatttattggtgaaataatgtgaatgacaaagggagtgggcatgagaaaatgaggagagcctgcagaccaccgttcaggtctgaacttgatgaagatgaagggaaggaaggtggtttggtaggcagaatcccgaattgcgcctagttctaaccaagtttcaatcaagtgagtggggagtccttcagggaaagttgaccactgacctttcttgcatctcccaagaataggcctgcatggtgttcttactatgctcattcaaggctgggagcagcactgggaaacatggttttcagtgcaaacttaatagtggattcagggagacagtagttgaggtcttcagttaatattgttatccaaagcaagaggtctaaacaggcttgtccatatcagtgttacttggctgaaggagtcacttatctaccctgagctcagtagagaggctgcactacaaattgtaagtctacaggctgtccaggtagctctgttcactgtgttcctgagccagcaacctatctgtgataattctaatagcaatgggataagacagtaagtccttaggcaagcccatttcaagcctctgctttagtgtgtcacatataataacatcctattggccagagtagtttgcatgactgagcgccacatcgaagcttgggtaggcaccctccaccttcactggtagggattacaacattccatgataaaggctgtgggtacaaggaagcatgaaacattgatttacaagataaaaattctattttgtaaaaaaaaaatttattttttctgtggcaacgctttaaatatgttgaaatgtccacttcaaaattaagtttaattaaaatatataacaaaacctagaaatattcattcagacactttgatgatgaaataggaataattttaatttctcataaacaagctgaaatttatgtagttgctttaaaaagcagattaaaatgcttctactttaattttcactcatactttagctttcttattttaatttctctttctatctcacagcatcaggatcctgcattttttgggcagaattcacttttggttaaatcatcaaggcagtatttaactattcgctacaccttattacccttcctctacactctgttttataaagcccatgtgtttggagaaacagtagcaagaccagttcttcatgagtgagtactacgtacaataattataataataccttttaaagtatgttcaaacatacacagaaaagtttaatggaggtaaatcaagatatcaattaaacttctgctgcttgtttttacattggtgtaaatgatttgaagagctatataatgatgccagtaaatataattaattggacaatatttaggtagaaatgagagaattaaatagaacttacaaggaaaagatatataaaatatgttaggatattatatcagtaaagagattaagcatagaatttttaaaaatacatcaactaaatattgaaagtataaactaaatatagatcaagagtagagtataaaacttacaaaaaagggaaattgtgctcatctttgcatgtatctttgaccagagcagggcctttctgtgatgacttaaagatccttttaaattcaggtaaaaactagagcttaccacaaaaaagttaagtgaagaaagtagaacatgaaagatttccgatactttatgaacctatcttataggagaaaataatttaacagaagaatttttgtataaataaaaagtaaccttgtcatctgtgatagatttttctgagtatgagataaactttctccttctctcttttcttccttccttcttcccttccctaccccttttctactttccttccctctgttcccatcccttcctcctatcctccctcccctccttctttccttcatttcttccttttcctttctccctcttctactccccccttcttccttcttcccttcctcccttccttcctgagtgtcagatgaacaataaaggatgtaagaaccatgaattgaaaatgtcatctgaaacaagcacaattcaagataacaacaattcccaggaaaaaactgaaaagataaactgaaccaggaatttggataaacttattttttcattattatactttaaacattgtcattgttcttaggttttatgaggatacgaacagctggattgaggacactgagtttttgtggggccctgcattacttattactcctgttctaaaacaggtaggctctacaggtttaataaccttattgtttgaactttgtataactaaatcgaccctacattacaaaacatctgaataatagatgttactcagtggactgtttcaagctgataaacatcaagttggaattctacgatgtgacacaaatttcaaaatgttataaaaatattaagtagattgcttaccaaatatgtgatatctaactggggacaagaaaattgtatgaagttatttttctcctgaaaaaaaaaactgtattatcaaatcaaaatcaattcataataacaaagagttctcatttaagtagacatatacattgaaattttgctcaattgtaaataaagaggaactggaaaactcgctgatcagatgaaaatgttggagaaacactggagtgggttggtaattattacctatttttaaaaggtgcatgtgtccattgaggtatacagaaataaacatattcacattcacaatgaccatgtgttttataacaatacacatatatgcatgcattattttaattgctatctaaattacttttttatttacctctttgcttttttaagttttacaatatgatattatctaaagctaataaaatagccctttgattattatctataggaaatattggagtgtaacaacataaagtttttttcccttgactatgaaaacccaacttaatatttgataagatcctccttgttaaaaattgaaattaaaaaatacatattatctttattttagggagcagatactgtgagtgcctacatccctgatgctatttggtatgattatgaatctgtaagtaaccttaacatactaatggactcacaagtattatattttcaaacacttctacatagaaacttaattccatagaaacttaactacatagcatacatatttttagaatttctgtcattactataaaaaataataatttcagactttaaaaatgtgttaaaatttgtgtaagtataccctttgttgcacatgagctagactcaaatatgaagttatattatttagcataaagagatattatttatttttaaattttggaaataaaaggttagcagtaatttaggaaggagtggcaacttattttaatgctttttcctattttacatatttatcttattgccagaagacttgagtactgagctagtcttatatatttgtttttatatggtatattcaaatatttgaaaaaggcttttatttcaaccttgaagaggcaaaataacagcactcaaatacaccatccattttttcaattgaacaagaccttttgagcaatatttatttattttttttttttgaatttttttttagtagagatggggtttcaccatgttggccaggatagtctcgatctcctgaccttgtgatccgcccgccatggcctcccaaagtgctggaattacaggggtgagccactgcgcctggcctgcaatatttattttaaatgatattattttgcatatcacttatattggctaagtataccctttatttttacggaaataatgattttaagaaaatccttcctaaaggcataaactttaaaccaaaacaaagaataaaaaagctaattaaagtactgttaattattgtagaaagaaaatgagtctctttttgttgatttttttatttttgagaaagtgaacttatttttcctctactttgttcagcaaactgaaaaaaaaaattctcctaaagttagaaaacaatatattcgtattcatttggatgacatgaattgctcataataaaaatgccttttaattcttgtgaaatagagtttaaagtcttcaataatattaagaatgtttttaatcttccaattattagggtgcaaaaaggccatggaggaaacaacgggttgatatgtatcttccagcagacaaaataggattacatcttagaggaggttatatcatccccattcaagaaccagatgtaacaacaacagcaaggtaaaatgaaaaatcattagttgaaatctaaaataaaattcaaatcttaatatttcatatttgcattaagaattagagataatatttagtttctgcaccagaagatatttgacatacagaggtaatactgaactataaccatcatagctataaaaagaatgaaattatttatattattataaatatcttgattttcaaaatttctaatttacttagaagttaacttcctgtatcaaaaatttacccacattagcataattaaagataatatttgattcttaataactatacaaaatgtgaatatttgttatataattgagtgaagtatttgttaatttttacatatttgaatttccatacatacataaatcccaatgtatttctttctgctaaaatgctttaagttcataaatgaactggatattttatgttaggtaaagagcgagagagaaactaaattgctcactaagtgtaaatctcagaaatattttctaaaaataaaagaaacttgaaaatgctggtgctccatttcacatattcattctgagtacaaagagcacagaaagtgccgtattgaatttacatacttttccctattctgccacaacccaacaggaagttactctttattccttaccctactgtattttcttcataacattaagaatatctgaaattatattatttattcttttcttgtatgtagtatgttagcgatacgcattagtaattagtaatttaactgttttggcattctggaatggactagtatcacaatgtaactgatacaagagtatgttctcaaaaaattgttatacaccagagctgtaatgatcaacagcaacaaacactttggtaaatgcatactggaaggaatacatcctatacagtccaggagatgcctggtaaaatgtaactaaaaaaaaaaaccatatttcttgactacatctcattactcctgttataatcatttcatttataagattcttacagattccactaaactttttttaaattttaatcatatttttttttctcataagatgtagacttaatacattgagatttaggattacacaggttgagttgagccttaataagacatttaatttttcttgtttgaattaaaatattatattatttcaattttgcaagtatctcagccttcaaaaaatccattattgcatttattacatttattcttttgacttattttctacatgtataaattatttcggtattcacataagaacattggtatcggtaaattattaatacatataaatacaaatttattgatgtcaatgtccttactgaattcagggcccataaaacagacaggttgaagtggacttgtttataggatattgtattattatggatttatttttaaccatatatgcacctaatttttcttaacagccgtaagaatcctctaggacttatagtcgcattaggtgaaaacaacacagccaaaggagactttttctgggatgatggagaaactaaaggtaagtctgaaagtaatacgctttaaatgttcactctgataatgggaagttttggctttattgatataggttgtatcattttttaaatatcacgaatttttatttttaattcctaatgttttttatctgtttcaggcttttaggctactttaaaacttttaacattgttatttgctttatctatatgtaactaaaatatccagttttgtgcttttgtttgttgtaagtctttggcaagatttttaatctatctttatctattagattaaaatagtcaataaattctcagatatactaattgcattatattttcaactgttttaaagtaaggtagtgattataactaaaattttgttactgtaaacagaaaataaaaccaacatttaaagatttagttatttaatgtcaaattatttgaggtaagaatatcatcgtatcaattgtttacaatttattttccttattatctttaattgaatttcttgagctccaaacttgggaattcagtataccaaacaaaatgtttaaaagtaatcttctgctatggtatttctaattatgccatagtaagtttgtctatttgtatttaactattcacttacaattttccttatacatttttagaaactttttagaaaaatctcgtttcttctaatagagggctgttaggtatgtgttttatatatgagtataaaaattataatttatcttctattttaattaactacttctcaggtgtattaaggaatatccttgtacaaattttaaagagttacagataaatataggaaggacaacaagaagaaaaagactatcctaaatgcctttaaatgtatatgaaacatgtgaatatttatttatttttgaaaatgtgtatatttaaaaattaccacaggattctataattctctcctaagacttacattcaccctcagttaacattcatttaaataaattacatttatttatggcattatttcaatgtattagcaatcaaacttattctaaggaaagatctattctctgggtgattttctcaatgcaagctatgaattacttgtatcattaacagctattaattataaatattctctgtcttttaattattactattctttaccagtagtcctttccttgataaatgtagtcttttataccatttacctgactttcaaatttatatctccaaaccagtcttctatgtacttctctatttgtttgtctaataaaaatctaaaacataatctgccaagatagaacttggatcttaccaccatgtatctgctccatctatcgtgttccctttgtcagttgatggtaacttcattgctacagatgccaacaccttggaatgggctattatctctcacaacctaaggatttcattggttctactttgatctgaagcctctcatcagttcccccactgtcaccaccatctttcatgttaatttagggcaataacttcctaactggcctgtagctctttttaaccccttttaaaattttattacaatccagcaggtagagtaatcattttaaaaggtgattccagtaattgcatctcttctcaaaaccttctaatgatcctccattttactcagttaggagacggagttttatcgagacctagagagcttattatttgtgctttaacatgtgcacacgtgcatgcacgcacacacatacacgcacccacacacacacaaacacattatcctgtattgctttctatttctcattcaattttagcacaccaatcttcttgctctttcttaaataccctggggtgtaagcacactagggtgagctctcctgtgagattagattccaaacctattctctggcttatgtagtaagccaaaacttagtacatagaagttttgtaaaagtggatttcagctgaacttaacattgcttgtagtcatcaatcaaacaatgttgagataatacctccattgatagcatgtgtggagcaattataagattattcctattactcaaattatataaatactccaaatacatactgtctactgataaagatgcatatgaatagcttactttcatataagtaagtagttaagaatatgaataatataattcaatcagttatctaatatgatacctatgtagctatgtgcatttaaaaagtgaaagaaaaccagaattctgattaatggatttgtaagcaaacatggagacagtaaagtgatcttcagttcaggttctgaatataatattatttcctaggactaaaattttaagcaaattaatgttatggaaagtatattatatgaatcctaggattccctttatattttaacactgtttatgacaaactatttcagtccttatcttcagtttttctttaaagagatacattgaataaaagttatattacatatatggtacagaatcattgtattcatccattttcctcattaaagtttatttaaatttcagactaaagtttatttcaatcttcaacatgtctccagatttattgttttccttgaataaaaaataatagaaaaaaataaaaagatgcaaaatgtattataatatgccatgtcttcctaagaaaaatgtactgttatgaggtttacaagggagagaatatctttcaaaataatacatttttaattatatattatttactgtaagttttgctttctcttaatttccagaaataccttggtagtctttgaaaaaataagcaaggcaaatatgtattcattacctctacttgctgtgaaaatgaaataccattattatataatttagagacaattaaaaaatttaaaaacaaaatctgtttgggatgcttcattaataaacagcatctagtttgttcaaatttcttaagtgttgtataagtgtaaaaccagagcagagaatttaacattgcattttgtactgatcacgatatttttcatttcagatacaatacaaaatggcaactacatattatatacattttcagtttctaatgtaagcactctctttgtacatatacttaaatgcataatttgttcatgcctaggttattcttttatgataaattttttggaaaagatgtttacatttgcctacagattttaatggaatgtaatgaaataaattgttcaattaaattgttatatttaaattgttaaattataaataaattgttaccttaaaattttataaagtttgtgaccatgtaattgatggaaagaaacctttagacttcttgacatgttatgattggttttaggcaacatgccctaggaaaacaatttcaacatatctgaaaatgttttaatgaattagtcacagtaataattggtgtggattttggtttattaaattttgaatagttaatagaaatgattttttcatagattttgggttttttcatacattcttctttagcaaagctaaattattcttcatcaatgttaggactagaatgagtatatatgtgttgcatatgagtaattaaggttatctctgaaaataaaattttctggcatatatataaaaatgaaaatagatattaatgagtatatttctatgtgctacttggatgaggagagctggtgggaatagagatgtagatgatgacctttttttgctatttcttatcggtattgttatttcaggtttgtatctgatgacctaatatataatatcttatactatttttctcagaacacattagatattgtgtgcacacattcatcatatcaggaaggaactaccttagcatttcagactgtaaaaatccttgggttgacagacagtgttacagaagttagagtggcggaaaataatcaaccaatgaacgctcattccaatttcacttatgatgcttctaaccaggtaattacaatcttttaaaatattttagctatcatataatctcatatttaatattatataaccattcaggcacttatcctatttctcctcacagtgtgtattcctttcttcccttcgttgcttccttcttcccttcatttttttcttcactttttctgaacaatattccaatttatgtcaatccaatttgtatttagatatcaacatgaagggaattccttgctatttctctctatatatttcattttctcatgcattctaattatatgggactttctaatattttccataaaaattcttcaaatctgaactctaacctacctattgcacgcaaaagaaaatcccaaatgttttagctgctttagactctttaacaaattggttttgttcatttctttagtctttctcctgtttcttttttagtgaggtctcattgtcctcaaaatatatcttgtacttttctaactttaattttgtgtttacacttttcttctcctgtagaaagccttccttatattgtgatttttgtctctttttacagttgtagtatagaggggaaaaaataacaaaattggatgcactgttattggatgcacagattataactctgctatctctgcttctaaacgcattaaatcaatctctcattattttagctttctcatttgcaaaatgtaatatttcaatcataatgttgctttgggtagtagattgatgtattaaaaaagagactgtagtatttaaaaacacgaaagcaattatttttgtcatttatcttttctccatttatataatactaaattattagtaatattaccataaataatttctaaattatttaagatatagaacattgtcttataatatttttgttttaactcataagacctctggcccagggcttttcaattattagttttcagaaaatatgtactggtcaattattttttatttaataggcatattatgatttatatttcctagcactataagaataaattgatataaattaagtaatacaagcttattgtgaactttatgactctaatagagattaaaagagggaataataaaaaataattttattggttatgtatgcaatataaaggtctatctgtggctatttgtatgtccacttttatgcttataaatatatatatattatatatatataatcttcataattctgctgtgtataccttcataattctgctgtgcatagattgatctttatatgaattttcattccttaaagttttgcaattatgtttggtgggtatcaaaaagtaagctatgcagatgaaaatctaggtgtgggataaatcttgctcacattattcccaaggcatataagcaataatcaaacataattttgaaatcccaattatagacataattctatgtgtgtgacatatgtacatatatgtatatatatacataaatacacacatatatattgcatatatattttctgtttttctagtattttatcaaaactattaatgatttaatttgaagaattgccctcgttgccacattttgtgaaatgtaaaatgtttttttaaatcatccaatgatcagatacagtgtttaatgtttttgtttgtttgtgttttttttttctttttttctttttttttttttgtcttcaaaggttctcctaattgcagatctcaaacttaatcttggaagaaactttagtgttcaatggaatcaaattttctcagaaaatgaaagatttaattgttatccagatgcagatttggcaactgaacaaaagtgcacacaacgtggctgtgtatggagaacggtaataataattttaactattactcatgatatggttatcacataagcattttggtgcaaattttacatattataattttaaatctgcagcatataaactaaattcaagtagataatcatttggaatttgaagttagcatctctgacaggcaattcacttttatcttaattaattatccaaagacatatcttagtaaacgccaggctgaattgatgtgtaaattgctttccaggaactttggataatgtaactttacttaaaaaaataatactctgtctgagagttacactctacttggtgttgactgtagctgatttgcttgtttgggtaagatatgccagtagtggacactattttgaaagagttgtctcaagttattaagacatatgatgttgagtaacgggctacttctcttccactaaggatgataatctcttgccagttattttggctttcattttaacaaaatgatgatggctgaggatggcaggtgtttttaccaatgtcacaggaaggacattgtaaaacattcctcttgctatgcctgtttttcaaattctgggcttttcattacatcattgagttttgtcaacaaatatatttatttaatataaccaaataactaaatgcatctgttatatcactgaggcgagtcaagacatatttgtcagcaatttcccagagacatttacatttgtataaagagatgcatagaatctctgcctccagagaaattatcccaatttctctccattaattgttaaagcagcataatctgtatcactagtgaagaatagggaagaatataagaacagaaaaagtaaggagaagaaaagattctaaaatcaataaaagtcaaatagtgaagttcacttctctaaaccttctcttaagttgcctcttttcagccaaatacacatccattcccctttgcattcaaagtatgctaactttatcaaaacgaatataaaggacaggtgggaacaattcattttgctaaagaataaatatcttctaaacatgaaaatgtgaaattttatctttcctattaaataattttaatgttatatatatatataaggctaatgttacatatatatacatatatatgtatatatatacatatatatgtatatatatacaccacagtttttttatccactcattgattggtgaacatttggtttggttccacatttttgcaattgcaattgtgctgctataaacatgcacgtgcaagtatcttttttgtataattacttctttttctctgggtagatacccagtagcaggattgctggatcaaatagtagttcttcttttaattctttaaggaatctccacactgttgtccatagtggttgtactagtttacattcccactatcagtgtagaagtgtccccttttcactgaatccatgccaacatctattttttttttattttttgattatggccattcttgaaggagtaaggtggtattacattgttgttttaatttgcatttacctgatcattagtgatgctgatcattttttcatatgtttgttggccatttgttcatcttttcttttgagatttgtctattcatgcctttagtccactttttgaagggattgtttgtttgttttttcctgctaaattatttgagtttgttgtagattctggatattcgttctttgtcagatgtatagatggtgaagattttctcccactctgtgggttgtctgtttactctgctgactgttccttttgcactgcaaaagatcttagtttaattaagtcccagatgtttgtctttgtttttattggatttgcttttgtttttggtcatcaaatccttgcctgagacaatttctagaatgctatcttctagaatttttgtagtttctggtcttagatttaagtccttaatccaccttgagttgacttttgtgtaaggtgagagatgagaatctagttttattctcctgcatgtggcttgccaataatcgtagcaccatttgttgaataggatgtcctttcctcactttatgtttttgtctgctttatcgaagatcaggtggctctaagtatcagggtttaattctgggttctctattctgttccattggtctatgtgattatttttatacagtaccatgctattttggtgactatggctttatagtatagtttgaaattaagtaatatgatgcctccagatttgttctttttgcttattctcacttttgctatgcatggtcttttttggttccatatgaattttaggattgttttttccagttcggtgaagaataatgatggtgttttgatgaggattgcattgaatctgtatattgttttggcagtatggtcattttcacaatattctttctatccatccatgagcatgggatgtgtttccgtctgtgtcatctataatttctttcagtagtgtttgtagttttccttgtagaggtctttcacctccttggttaggtatacacctaagtattttagtttattttattttctgcagctattgtaaaagaggttgagtttttgatttgattctcaccttggttgtttttggtttataaaagagctactgacttctgtacgttaattttgtatccaaaaactttgctgaactattttatcagttctaggagctttttggaggagtctttagggttttctaagtaaacaatcatatcatcagcaaagagcgacagtttgacttcccctttactgatttggatgccatttttttctttctcttgtctgattgctctggctaggacttccagtactatgttgaaaataagtgagaatggccatctttgtcttgttccagttctcagagagaatgctttcaacttttccccattcagtattacgttggctgtgggtttgtcatagacggtttttattatgttgaagtatgtcccttgtttgccgattttgctgaatgctggatgtttaaaatgtttttctgtgtctattgagatgatcccgtgatttttgtttttaattctgtttatgtggtgtatcacaattattgacttgcatatgtgaaaccatccccgtatccctagtatgaaacccacttggtcatgttgggctatctttttgatatgttgttgaatttggaatttggttagccaggattttgttaaggattcttgcatctatgttcccagggatattggtctgtagttttcttttttggttatgtcctttcctggttttggtattagggtgatactggcttcatagaacaatttaggggggattccctctttctctttcttgtggaataacgtcaatagattggtaccaattattctttgaatttctggtaaaattctgctatgaatccatgtggccctggacatttttttcttggtaatttttattaccattttaatctcacttcttgttattgatctgctgaggttatctaattcttcccgatttaaggttgtgtcattccaggaatttatccatctcttctaggtcatctaatttatgtgtgtaacggtgttcatagtagccttgaatgatcttttgtatttctgtggtgtcagttgtagtatctcgcatttcatttctaattgagcttatttggactttctccttttcttgatcaatcttgctaatgatctatgaattttatttatcttttcaaagaactagatttttgtttcagttgtcttttgtatttttttgtttcaatttcatttagttatgctccaatcttggttatttcctttcttcttctgagttttggtttgatttgttcttgtttctctagttccttgaagtgtgaccttagattgtctatgtgtgctctttcagactttttggtgtaggcatttagggctatgaactttcttcttagtactgcgtatgttgtatccctgaggttttgataggctgtgtcactattgtcattcagttagaagactttttaaattttcaacttgattttatttttgacccaatgatcattcaggagcatattatttaatttgcatgtatttgcatggttttgaaggttccttttggagttgatttccagttttattttactgtggtctcagagagtgcttgatataatttcaaatttcttaaatttattgtgccctatcatacagtctatcttggagaaagttccatgtgctgatgaatagaatgtatcttctgtggttgttgggtagaatgttctgtaaatatctgttaagtccattttttctggggtatggtttaaatccattgttactttgttgactttccatcttgatgatctgtctagtactatcagtggagtattgaagtcctccactattactgtgttgctgactctctcaattcttaggtctattagtaattgttttataaatttgggacctccagtgttaggtgcatatatatttaggattgtgatattttcctgttggacaaggccttttatcattttataatgtccatctttgccttttttaactgctgttgctttaaagtttgttttgtctgatataaaaatagctacttctggctttcagtgttcatttgcatggaatgtttttttctacccctttatcttgagtttgtgtgagtccttatgtgttaggtgagtctcttggaggcagcagatagttggttggtgaatagttatccattctgtaattctgtgtccttaaagtggagcatttaggccatttactttcaatgtcagtattgagatgtgaggtaccattccattcattgtgctatttgtttcctgtataccttgtttttttattatgttttataggtcctgtgagatttatgctttaaagaggttctgttttgatgtatttctaggatttgtttcaagatttagagctccttttagcagtttctgtagtactgattctggtagtggacaattctctcagcatttgtttgtctgaaaaaggttatatctttccttcatttatgaaccttagtttttctggatacaaaagtcttggctgataattgttttgtttaaggaggctgaagacagcgccccaatcccttctagcttgtagggtttctgctgagaaatctgctgttttcttttataggttagctagtgcttttgcctcacagctcttaagattttttccttcatcttaactttagataacctgacagcaatgtgtctaggcaatgacctttttgcgatgaatatcccaagtgttctttgagctctcttgtatttggatgtctagatctctagcaaggccagggaagttttctttgattattccttcaaatatgttttccaaatttttagatttcccttcttcctcaggaacaccagctattcttaggtttggtcatttaacataatcccagacttcttgcaggctgtgttcatattgtcttcttcttttttctttgtctttattggattgagttaattcaaaaacctcatcttgaagctctgaagttctttcctctgcctgtatgattctattgctgagactttcatttctgtgtttaaggccatgtggtagcatgatatcatcaacgaaataagcttgaatagatgagaagtgttcaaagactaaaccctgggcgattacaaactttagccaaggaggaaatgacaaaggaggcttagaaagaacagctcaagtattgggttggaaataacatgctgggtcctggaagccaattgaacaaagcatttagaatggaagaaatgatcaactatgcaaattgtttgtcagtaagataaggactggaaactgacatgtggatttggcaacatggaagtctttggtaactttaacatgcaaacattagatgtagtactagggataaaagcctagttagagtgagttcaagagaaaatcaagggacaaattagagatagtgagtatgttttgctgtaaagaaagcagaaaaaatagaacagtagtcagagaagttactgaagtgacatttactctaaaaaaatgagaaaaataaaatcagtttatgctgttaaaaataacataatgaatgaaatattattgatgcaagagagagggtggagaattgagggagaaatatttttataggtaaggaggcctgggatagggtacacagatgaaattgttcactttagatagaagccagacagtacacccttaagaagatgagtcaaacagagtatctcaatttagtcagcttaggcccctttcttttaaagagcttttatgaggactcacacaacttctttaaaaggaaattggaaatgtagataaatataatatttctctccaaaatataataatttaataaacaaggaagatagggagaatggattgtggtatggcaaccagccatcaatgccagagtttataattctttttcttaggttttatctctcacttctatgttaaaccaatcaactctgattcttggccagggttcctatttcaaatccaggtcaggatgtaattaaccagtataagaacatgttaaaaaaagaaggattgagagtttcattataagtaacagaattctagcacttgccctttagaggcatgttataatgccatttttatacacaataatcaacaatcaatatgaacagtaagaacaaacatggaatcaaaatttattagtaatatacttgcttttgcagacaacacaatttaatgctattttttgagttaaaaaatgtatgacatttgatccttctgctctaccattctttctctagagtgtaaatgtaaatattttgtataaaattttagtacatgggatcccaaattgcataaaatatattttgtgttataactgttatttcatttttgtattaatgaaacttgtaaatcatacaatgtgtgactaaacgtcagtataattttaaagagtaaaatattacaaggcttataatttctggcaatgaacatgcattgtgtttttagggttcttctctatccaaagcacctgagtgttactttcccagacaagataactcttattcagtcaactcagctcgctattcatccatgggtataacagctgacctccaactaaatactgcaaatgccagaataaagttaccttctgaccccatctcaactcttcgtgtggaggtgaaatatcacaaaaatgatatgttgcagtttaaggtatgcttgatataaactaccccaaagcttaactcatcttgtgagatgagattttgaataatcctgtgattgatatttaatgtaatattaaaggttattaacagatttgataatattttgattttataaaaatattttttcctacacaactcatagctaggtgcccaataaatgaaactgctcattcctgctaactttgtgattaatacaatgatgattttaaaaataaatttaaattcttacaaaatacataagtcatttattatcaaactatgctgatagtgtcattaaaataaacaaaattggatgcctactgtttccattatttttaagttgtggtcttaattttctggccaatgcaataagacataccaaagcaataatttcattcaacttttagagatagcattttttaacttaagaattccaaaggaatccattaagaatagtattagaaatttaaaatatcaacaaaataactagatgtaaaattatatttccaaagatattttcttgtgtattattgctcattatttagaagcagaaatggcaacaaatctcattagcaaactcaaatgaaaaaatcaaataataaatcatcaaaaattataggactaagtggagtatctgtaaggagaaaaactattaaaaatgttcatattaagtattttaaaattataaataagagtaaacgatattttaaatgttaattcactttagctcagtcgctgcttttaaagtattttcatataaatcttagtgaaatatcttttgagacttcataaaataacttttaagtttgtctgaaaaaataaacaccttgcaattgttaaaattcagcaatgggtaaagaataaaaattcatacaattaaaacagtgtggaactggagatagcattgcctggttgtttattgaaacgagacggcacaaaagcatggaagattttgtgtgtgtgtgtgtgtgtgtgtatgtgtgatggcacaaaagcatagaagattgtgtgtgtgtgtgtgtgtgtgtgtgtgtgtgtgtgagatggcacaaaagcatagaagatgtgtgtgtgtgaagaaaggttcacaaattaataatgaagaggtaggttatttaaaaatttatataaaaaagtgtctgtttttaatcatatgctaaaataaaatttagaatgagttccatgtgaaaactaaacataagcctaaaataaatttagctgcatatttattttgtatctggctagcaaaggcctttcaagccacagataaaaaggcgttaagtgacataggtaaaaatctacacattttctaacataaaaataaaatatgttttcacatcaaaaaacactataaacaattagaggacaaaaaaatgggtaaacatctgataaagatgtgacatagggaaagcaattccaactcatgtaatcaagaaaaaatatcaagacctctcataagaagatatttaacagaagaaactaaaatatcaacataattacactcattaaaaattccaggagcaaaatgcagtttaaagtacagtggaacataaatgttgaataataatgtagaaaaagatgaaacctcataagtaggaaatgaaatgattaacaatgaaaaataaatgcttttaatttaacataaattagcattagagtacacattttggtgagaatattaatcagtaaacaaattctggaaagcagtttgtcaatagttatcaaagaccctaaaacggtaagtatactcagaccctagtggtatttaagaaatgtgctgaagaaataaaaacacaaataaacataaattagcattagggtttattgtataataatatgtatgacaaaaaatattgaaacaacttctgtttttaaccatgaaataattttggtatacccatacaacagaatatttagctctaaaatttttgttttgatttcttattatttagaaaacaaatcacaaaacattttttaaaggttcaaaaatgcagtattcagttaggacccattataaatgtgtatgtggaattctatattgatatggttatatggaccatgaatgtagaattagaaattatgtggagaaaaattctaaatattcttgtttgagccattatttaacttagttcatgatatgtacatgctatgtcagcaatcagaataaacttttttactacttatctgcaatagatttatgatccccaaaagaagagatatgaagtaccagtaccgttaaacattccaaccaccccaataagtacttatgaagacagactttatgatgtggaaatcaaggaaaatccttttggcatccagattcgacggagaagcagtggaagagtcatgtaagtaattgaattatttgatataaaggatattttaattttagcttacgaagggaaaagtaaaatgattaacagccttcactgtcctagagtagcatcacacaaaaaaatttaagacgtgttaaataactttgcccattttaatatttctagctaaacatagtccatgggactattttaaaggattggcccacaattttatctacactttggaggtgttcaatttcactattagtatcagactcattcttctaatcaagttgagaaccaaaaccaaaacctcttttaaaaagcatgataagtgttggcaaaaataagtatttggaaacaagtgaagtaaatattttattgaaactgttgaaatagtttattggtgcttgaatctgatagaattaataatttatctgccaggtattagtgaaaataagttacaacatgtaagtctagatatatttttatgttacaatgaataaatttaattttaaaattgtagtctttattttattcaaaagatctataaactataatatattaaaatatacttttatgtaatttaagtttgccatgccattccttagatgatgttatcaggatgttttctggtattgtcaagatatgtacaaataatatctaaaactatatctggattattttaataattttgttgttatgacaatatttttgttcaaaagcatgggaagctaagtcattttataaaaatatcctggtgcaagggcattatttattgtcatttgacaagcattattctcgattaaatagttttccaaaataataaatataaaaagttaaaatatgcccagattacttgtaatacttacgcttcctctccttgcccatgttactttccttcctctttatgttcttcttgcaaatgagttgaataataatatgtttcttgtaacacatttcttcatacacagctatttttatgaacataaaataaaggaagaaaaacacaattgggagtagtaataggagagagttaaacatttgaatatctgttaaacttaaaattcattataatattgatgtatttttattccatatgtagaaaaaaatgtattgtgattatctcaagggagcaggaaaattgaggccttttaatttctaggtcacacattactaagtcatttatgatttcatattaattttatttttaaaaggaatacttgtctaaagaaaaacatgtacaatcatattatttatattatgattctcctataagtatatgaagcatattttacatattccttaacttagctaaaagaaaacatgtattagattaatcatctatttccatttggtacctgggtataattaggaatatggaaaataatattgatttttagataatctaagaaagaattaccgttattatttgtgatactactttgcatatattttgacagacatagctttgttttcttttgttttcagttgggattcttggctgcctggatttgcttttaatgaccagttcattcaaatatcgactcgcctgccatcagaatatatatatggttttggggaagtggaacatacagcatttaagcgagatctgaactggaatacttggggaatgttcacaagagaccaaccccctggtgtaggtaccaacatatgaccactccacgaggcaactaagaccatgagtagaatccaagccacttctttatgggcctgtgctttaggattgaagtaatgacaaaggcattagctagagatctccagagcagctatagcaattttctgagaaacaaacccaaaaagtcaccataaattacaggtggaagtagaggagtggatggataacaatttgcttgactactgtgagaagccaggctttgactcaataccttaactgtttcaaatgcatacaaagaatatgctgattctgtattccctgtcaagtttacctttactccagcttttagaaaataactgcctaaagttttccttgattgtttttacttctcaggtactgatttgatcttttttccctttataaccttcagttgcagttgggtaactttatgtggccaaagtgctaattacatctttacaatgtgtttttatatactcatgactctttttccaaagatttgtctcgttaatgcaacacattttatgaatatttaatgtactgtgcaacaaataatattatctataatattccaaacatatcataaaaaatatattttaatgaaaattattctatttgtatttttcacatgtgatgtatacttaaaaggatatactcagtaccatactataagtctgtgaactattgtaagcattttttattgttaggtgctcaaacagcttgcatttatatcataatactccaaacttaggttattgaaggctgttttctattaacactaacttgaaagaatacattttaccaaaactgatttcttaaaatcccttcagcatttgtaccgatattattagactaatatacttttgattcttgatatctaaaattacttccactagtaattttgcatattactaaaaataaattactataaaatctatttcactggtaattttatatatattaagaatcaaaagtatataatctaataaaatctgactatgattacagtatgaaacaatgaattaaatattttataaatataaaactttaaatgttctataaatataaaatatataaacaagatattttctggacagtttaattgtattcatcacttttatcatttctaggacattttactatggaaaaaataccaatttatagataagttaaacacataacctttggaaataaaccaaactactctaatggcaatagtattctatgtcatttaatgtggaagcatttgcagttgttacatattgtatattaatacaaatatatacatatttgtatattaatttctattaatatacaaatattatagaaacatatttgtaaactgcacgaaagcagaaaaaatttaaacaattatattctagggagacacatttattttaactgaagcatagtttaaggttgggaaacgggaatttaaatatcaagtctcgattgtataataaattttaaaataacattgattaaattcacatgctattgttacttaaaatatattgtgcttatttttcgtatttcagtacaaacttaattcctatggatttcatccctattacatggctctggaagaggagggcaatgctcatggtgttttcttactcaacagcaatgcaatgggtaaaacaatcatttgttgaatgtctcttattttatgtgactttttcataaactagtatacatagatgaaaatgggatgttattttggatttccagatgttacattccagccaactcctgctctaacttaccgtacagttggagggatcttggatttttatatgtttttgggcccaactccagaagttgcaacaaagcaataccatgaagtatgattgcatatttcttttaaaaaaattaaaaatttttatagcataaagtaattctcttagttcacacatgaattttttttaaaggtaattggccatccagtcatgccagcttattgggctttgggattccaattatgtcgttatggatatgcaaatacttcagaggttcgggaattatatgacgctatggtggctgctaacatcccctatgtatgtatatcaattttaaaacaatgttaaatatggaatacgtaaaagtagaatgaaataattaaacatgtatactttaatttaagcagctggtaataatgcttagctttttttactggcaccttatgtattggatatgagatttataaacagtgtctttgtcagactgataaaggagaggaagaaataccattccttttccttttccctccctaatactatcatgctgtgttgtgctaaacaagtcactgtgcacttgatttcctctcacaaactctgggttgtacaggcagtcactatgttctcttcatgttaaagttcacagaaatatgtatcatcaataagataagaaatctgtatcatcaaccagagaacaagttggaggtggaactaattttttttttgccctggaatagataatagttgtaatatataatagagattcactcaatattcaggaagctaagtattccaaagtatccacaaatgatcaatctctgaatttcctcattttttatcaaaattaaggaatcctagggatgctgctgctaacacccaaacattaaaatatagaaggcttgatatataagagtttattctaagaaaaatcagaaaaacctcattataagacattggtatttatagtagggtccaatatagagttcctgaataactagtatgggaaattaattatatatgttgacaatacagaaacatgcacgtggaaatttattatttaaaaggaggtatacattattgaccatactttctataacacatagaagaagaaattgagataatgtcaactaacagaaaataattaacaaattttgtatttaggcttcaattgaatattccatgatacaattcaaatatttgttggtttaaacatacttgcaattacctatcttaaaacaattcttgcttagataagcagggctgttatcctaaaagtgactttgatggatattacaagaacaagattatagtaattgatgtaattgttaatactccttttgccaatattagaattatttgaaattacccgatatttgctgtatacttcccggaaacagcaacatctctttctgtatatactgtacaaaagtcctatttgtcatttaacctaatttcatagtatcataaatcctattgctcagtgtctttctgtttcctttgaggattacataatatataccaatttagaacagtttttacctctaaatcaaaatgactaaatgaactgttgacaaaacagaacatttatagaaagttgttcttagaatactttacatctttacatgctacttttattccttgaacactaaaccatttaattctttttaggatctagtgaagaggaactcaaactttcatattgctgttacttttataagtatgataaaatatgatacacttactattttgtattttttgccctactttgataatttttggatatttcaggatgttcagtacacagacattgactacatggaaaggcagctagactttacaattggtgaagcattccaggaccttcctcagtttgttgacaaaataagaggagaaggaatgagatacattattatcctggtcagtacttggagtttacctgagtcttatttcttgtttccattaattcacctaaaatgagcaggtgggggggaagatgtttcaaaatagaaagtatataactttgagtaacactcccaaatctaaaactctcttcctttagcacttcattttatttgcatgggttgtgatcagctacctttgtatttaggtatatccctagagatttaaaaccaaagctgagttaaagggaagctgttttctagttatcatccaagctacaaattggcctctatttatgggagttatcaaaatgtaatggtagattttctatttttatacaattattagttcattctctgggattgcttctgatgtttttcatatttaaaaacttgccttcagattggtgattcagtgaagataattttttatcactatcttataggaagtaagctagttagccagatatctcaccatagaaataaaaacaaaataaaaacctctactaatctttcttgaaatgatagctgatgcatttccaagagtccttagaatttccttctaagaaatttggagggaaatctagctagaacactgatgtttgtatcatttgtcatttaatgtgagagcacattattatgataatgtagtaatgaaaacttatgcttcataatcactgtccaagtagttacgcttttttcatgtgtaccttgtttatatttcattttaattttaggatccagcaatttcaggaaatgaaacaaagacttaccctgcatttgaaagaggacagcagaatgatgtctttgtcaaatggccaaacaccaatgacatttgttgggcaaaggtactaaatcgatatcttgaaatagaataaatacaaaaattatatttcaatgaaagtttccatttaattagtaaaagttaaaaccgttcaggagagctatacagaaatgtaatgatttaataactaataaaataatgtatagtctttggttcaatccaaattagacacaaagaaagaattcatataagtcacatgtccaaatatgatttgtttcatctttaagacatattttattatatttattggtaccacttgtaatttattataagactaccattagtaagatggctactcattattctgtactgcaagttatttaaatgttcacttctcttgaaaacatatgttaatagtagcaacaacatgttttgacagctatacttatatttaaaacttagatcatgaagtataattcactgtattttatataaacaagtatattcagacctgatatattaatatattacaaaaatattttgatttggcttttatataaagcaatcaagaaaaaaatctcatagtaaaaactagaatgaacaacaatgataacaccatcaaaaaaatctatgatgagggccaggcgtggtggctcacgcctgtaatcccagctctttgggaggccaaggcgggcggatcatgagatcaggagatcgagaccatcctggctaacgtggtgaaaccccgtctctactaaaaatacaaaaaaattagaagggcatggtggcgggtgcctgtagtcccagctactcaggaggctgaggcaagagaatggagtgaacccgggaggcggagcttgcagtgagccaagatcgagccactgaactccagcctgggggacagagcgagactccgtctcaaaacaacaacaacaacaacaaaaaaaaatctatgatgagagacacaattaaatgaaatgtgagaggctttttgaatcttgggccaaaattaagacattagtgattaaatctgcaaaatgcaaacatgttcaataaatgttgattgtactgtatcaacattaatttcctggttttgataagttcactattgttatataacatgttaacattagagaaagctgagtgaagaatatagacagggctgggcacagtggcacatgcatgtaatgcttgcagtttgagtggctgaggtaggaggattgcttgagcccaggagttcgagatcaacctgggcaacatagggagattttgtatctacaaaaaatttaaaaattagctaggcatggtggtgcatgcctgtagccccagctacttgagaggcatattaatccagaggtttttttttaacttcctactttctcctcattctgtatttctacacattttgtcagatttctaccatttctccccttcctttagagcactattctctaccatcagctaatcccttgtaaataattcctttttggtggattatttatatttttatataggactttcaaacttctacaatatagatccaaatttccagagctttcagcaaattgaatttcagctctgttttgtgtgtttctggtcagagtagaaggaaaaaaatgttggtaggcaatgaggtcaggctgggaatagtggtgggatgaagggagaggaggatttagtactaattctgaaaatcactgggatgtttgattcagcatgacattattcaatcggatctttgcttcctttcaaacaaaaagatttattgtttttagtttttaaccctggagtaattctacaaataattctaatatactatattaaattaaatttaacttatatttttcatattagtttttgaccagaaccttttggttatatgtattattttcaaaattactaactaccataaaggttggcaatgctattttgtatttgccatattaaagaggagactaacatggaaaatgggaatagtttgcaaatggtatgtgtgtcaataataatgagatttgaagggattgcagatctgaagactttgagttaataataagcctctaatactccattacacttcatctacatagcaatcatatcatgctgactatgttttgatcagcttttccatgtcttgtctcttgtaggtttggccagatttgcccaacataacaatagataaaactctaacggaagatgaagctgttaatgtaagttttacacgggctaactatacaatgagaagaaattcaaaacttagacttgattattttaatcaataactaaatttgaatgcttttctttaaaaatagatggccattttaaattatcgatatcagaccatatttagataaaatttacctaattttcctaaataacaaagtaccagtcaccctattaagcaattttatattttgctttatttaatccaagcaatcattcctttatttaaaaagttatggcctggcacggtggctcatgcctgtaatcccagcactttgggaggccaaggtgggtggatcacgaggtcaggagattgagaccatcctggctaacatggtgaaactccatctctactaaaaatacaaaaaaaaataaccaggcgtggtggcgggagcctgtagacccagctactcggaaagctgaggcaggagaatggtgttaacccaggaggtggagcttgcagtgagcccagatcgcaccactgcactccagcctgggtgacagagcgagactccatctcaaaaaaacaaaacaaaacaacaacgacaaaaaattattacagtaataacatttaacattagatctaccctcttaataaatgtttattcatataataaatcatcgtaaactataggggcaatgttgtgctgcagatctctagaatttatttaccttgcgtaattgagattttgtgtctatttcttagcaagcccttattttctcccacttacagtcctgggcaactaccattctaccctatgcttttatgagtttaactgttttagatacttcatgtaagttgaatcatacaacatttgtctttctgttactggtttatttcactcagtataacatcctaaacattcactcatgaaagcaaaaggaatgaataagatattaaatgcaaatgataaacagaagggaacaggagtggctatagttctatcagagaaaatacattttaagacaatcactgtcacaaaagacaaaagaagtcattatataatgacaaaagggccaattcattaggaagatacgatgattataaatatttgctcccaacatgaaagcacttaaatatttaaagtaaacattaacagaactgaaatgagaaacagcaatgctgtttgaagactttgttgccacactttcaataataaatagaacaataataaataaataataataataaataataaataaataataacaataatgaataaataaataataaatgataatacataaatagaacaataataaataaataataacaataataaatagaacaaccagagagcaaatcaacaaagaaacagcagtttttaacaacaccgtaggccaaatggacttaacagacatacgtagaactttctacccaaaagcagccatatatacattcttctcaagtgcccatagaacattttctaagagtgatcacatgttaagtcacaagacaagccttaaaaattgtgagaagatagaaaacataccatttatctttcccagccacaatgaaattaaactagaaatcagaaaaagaggggaaataagtcaattcaaaaatacgtggaaattaaacaacccacttttgaacagccagtggaacaacaaaaagatcaaaagagaattagaaaatttcttcagacaaacaaaaataaaaatacaacttagcaaaacttctgggatgcagcaaaagcagtactaagagagaagtgtataacaagaaacacccacatgaagaataataaaaatctcaaataaataacattacctctcaatgaattagaaaaagaataaacttaaagttagtagagggaagaaaataaagattagaggagtaaaaattaaaagaaaaacacaaaataaatagaaaatatcaacaaaactaagagttggtgatccttcttttagccagatgaatttacaatcattaaattatacaagtttaggtaactgtgaaaaatttgggagcttaaaacttaccaaaactacttctaaaacagagtcagataattgaacctactgaactatgtcattgaggaaaaaagtgttatttcaacttgagttccacccactattcttgagaaccactagagagacaggcatggatttttatataggtgttggaggacagtgtcaatttacgtagaatggcttatgcagaattccctgggattctcttccacaaaaggtatcaacagtgttggattacatgtacctgattgattttctggatataatcaatgattttatttaagtgatagaagcagccagctaatagaataagttaaactaaaaaatgaattatgtaaagagcagaaaagtgaaaattaatgaaaaagatctggcactaccatttgttattaattatcatacgggagatccttgcatagaaaatattcaatataatcccaccaagccttctatccttatgagtaaaatgtaattaataggtaagatgataaaattaagtccctttctactcttgaagatattcatcataggccaggtgcggtggctcacgcctgtaatcccagcactttgggaggccgaggcgtgtggatcacctgaggtcaggagtttgagacaagcctgaccaacatggtgaaaccccgtctctactaaaaatacaaaaaattagccaggtgtggtggtggacatctgtaatcccacctactctggaggctgaggcaggagaatcccttgagcctgggagacagaggttgcagtgagccgaggttgtgccattgcactccagcctgggcaacaagagcaaaactctatcttaaaaaaaaaacaaaatccatcatatgtattttgtaaatctctatatttcctactctctgcattttctgtatgtcctccgatatcttgttcataaagaagactgttaaggccgttacaacagaatcttaacatgtgccaaaaaagcatccaggttgtcatgtcatttttttgagacatacccaattaacttagctgcaggtcaatcttttgctaaaacacggttactctgacactggaacttttatgtttcgactggcaagtagggaatattcttagtagagattggaataaaacacctcttctctgttgggatgagaagggctagatgtgagagacaaaaaaagaagcagttgatgagggtggtgagatggttctgggaaatgagaaagctatataaaaacaggctttatactatggccctttgctgtttcattgtgctccacaaaggtaaacctgaagtatgggctctgcagtaacagagaaaaaaagcttccccattactctaggaagcactaaaaataatgcttttgtgggttgtgaactgttcctttataattcacataggattccaaaatggctctattatctccaccgatgtccctctttactctattgaagtgttgaggaagaaaccacacacatttatgtaattaagattgatgtcaatttccttcattatcagtcatacatgacttgtggatctgtcaaatacattcagatttatatgtatataatctctcttaagactttccacatgtgagcctaaattttggttttacaggcttccagagctcatgtagctttcccagatttcttcaggacttccacagcagagtggtgggccagagaaattgtggacttttacaatgaaaagatgaagtttgatggtttgtggattgtaagtaagctttgaacaatctatgttttaagttatttattgtgcagtgattatgcaaaattagtacttggctcaaataatgtcaacaaaatattttatttgaaaactagtccacttttttcccccacagaactttcttacacaaacaactgctaaagtaaagtgttaaaaactaaatttatgtgtatggatgctatttcctggactttttcaatttgcaaaattcaaaaagcaaaatattctatatattaataaatccttgtaaatatttatttcacttttatttaatataggaataagtgtcaggcttaaataaccattagtcctttgtatgagagataaaaatttcttaaatttggtaacattgtcttttaaagtttcttttttgatgtaatcttaaaatgttagtagtaagatttttaataatatatttttttagatagcataaaaataatttactttgctacaagtaaatgcttaatacagaaaattttatgtaatatatttcaatttccggaggaaaaattttttactttgttgatttttccagtgtaaagcattaatttacttattttttaaattgaaaaaagctttatacagctgtcactatgtggaaactttgtagatataagattgtataaagcatatattttgtttaaaaattcatggaacatctatgtttattagatgtagcaattggtataccataagggattctcttaagtatattcctgagaatgtcatctggatccagagaaaattatctttttcaggtggaggcaatccattttaaatggtggctgacttatttatttagatcatgattcttttaaatatgactactgagattctgagatatgtactcaatagagatacttcttgaaattatctgcatttgtaaactattaatatatcttgtagttttagcaataaaagcaattgatatcaggctcagggcaggagtggaggggaaggagatgatagggcacatattattataatgctatgtcttaaagatatgaaaataaactatttttatgggtataatgcataatacagagaaaacaaaacattttatttttcaaaaggaaactgaaaaaagcaatcaatgagataaactaatatcattgagatgttttacaattttgtttgtttagaatagtgagtatatataacattgttcaaatatgttaacctacttactttttgaactagctcttttgagaatatatgttgtaaatttatcttttgtttacctttttctttcatctttttttaaggatatgaatgagccatcaagttttgtaaatggaacaactactaatcaatgcagaaatgacgaactaaattatccaccttatttcccaggtacaatattgttggtatgcctttgatattatcatgttattattatatattaataggtatataatataaactgatatatatcagttagctatacatagaatatatatatagaatatatatgtatatataaaaaatcagtttgatatatatagaaggtagggaataggattcacacacccaattttcactacccacccacacactggaccacaccttgacccattaccaatattatttaacactattttgagaaaaaaatcaaggaatatattttatctacatgaacacaattctaaatttgtttgaagttgttattttggtttgcttaataattttcccagattcaaaaaatgttaaatactctttaagataaaaaataaaattattttgaaaggaagtttttagaagtgtttctttactaaggataagggaaagaatgctaacacttatctgtttacctttgacatagaaggaaatgaagatgaatgtgatgtttcatattcatcatcattctcttatgcaggcagaaaacgtcacaaactattagcatattaagtgatggcaaaactctggaaaaaaatcttaaactgagaaaatgtggatcaaaaggcagtgttataacatttgcctagcccttaaactctgggctttatgataccaagtgaatttttaataaaactctaatcagtgttttccatctaaatgcactagaaagagtagacattgaggagtgtacttatttttcaggtttttattaattcatgtaattcagttacaatttcaggccattttaagttgataattaactcatacaaagtatacaaatggttaaaatatacataggttttataaaacactgattaatttctttgtcaaggaatacataattatgagttacacgtttcattgtagggcactgtataatatattaatattttttcattgattctttccagaactcacaaaaagaactgatggattacatttcagaacaatttgcatggaagctgagcagattcttagtgatggaacatcagttttgcattacgatgttcacaatctctatggatggtcacagatgaaacctactcatgagtaagcaatgttctgaattatcctctctgactcttttattctttggttcttacatttaatgttatcattttaacagtcccgacaatcttctcttgtatctctttacttcccaattgttctctgtaacttcttccttcatagcatttagaaaaaatgtgtttctttctatctaatttatctaaatatctttattgttattattctaatttctatactattccaaaataaatcctagaccatttttattttgtttctatgtgcccagcatagtgcctggccaattgtaggtgctcaataaataatattggattaatatttataaatgaattaataacatataatttgatatcattaagacataaagcatcaaacatttggcgaaatctgttatttgaattcattgtcagcccaggcacagtggctcacgcctgtaatcccagcactttgggaggctgaggcgggcggatcaattgagaccaggagttcaagatcagcctggccaaaatggtgaaacctcatctctactaaaaatacaaaaaattagccaggagtggtggtgcagagctgtggtcccagttactcgggaggctgaggcacaagaatcgcttggacctgggcggcagaggttgcagtgagccaagattgtgccattgcactccagcctggcaacagagcgagactctctgtttcaaaataaaaataaaaacataaaataaataaattcattattagtaaattagagcacttttaatgaacttctcaaatattaatgatcatagtaattatctgcatttttaacaaacttttatgtaaggccaatgatgatggaatacagaccattcactgaaaatcaattctttattagcactttccaatacaagttttgcagtgattgaaatcttctggccaggcacagcagcttatacttgtaatctcaacactttggcaggctgagatgggaggatcacttgggcccaggaggttgaggctgcagtgagctgtgctcctaccactgcattccagcctgggcaacaaaacaagaacctgtctgaaaaaataaataaatatatagaaatcatctataattctgggtgccaatgtggtacttaccagccatatatggccatggaacaatgtgtctagtgtgactcaggaatggaattttaaagttatttaattttaagtagtagtatacaataattaaatatgaaataatagataattagtggctaccatattagacactgcagttgtagatccctggcttttgactacatattataatcacttggagattttctttttagggtttagattttttttaagtgtcatgtgcacatagtaggtgggtatatatattgggcaagtgagataccaagcatgcaatacacagtaatcacctcatagaaaacagaaggatttttcccctcaagatttatcctttgtgttacaaacaatccaattacacttttagggttttttttaagtatacaattaaactattattgactatcatcctgttgtgctatcaaatagtatatattattcattctttctaactatatatatagcacccattaaccatccctgctgtattagtctattttcactctttcataaagatactacctgagactgggtaatttaaagatgtttatttaaagactgggcaatttaaagaggttgaattgactcacagttctgcatggctggagagtcctcaggaaacatacaatcatggcagaatgtgaaggagaagcaaggtgcatcttacatgactttaggagacagagatagtgatgggagaactgccatactttaaaaccatcagctctcatgagaactaactcactattacaagaatagcgtaggggaaaccgcccccatgatggaatcacctcccaccaggtcgctcccttgacaggtggggattgcaatccctgatgagatttgggtgggatcacaaagcccaaccataacacttgctttcccctcacccccacacaacccttcctagcttctggtaaccatccttctcccgtctatattcatgagttcaatgttttgctttttcaaaatttttagcagccacaataagtgagaacatatgaagtttttctctgtgtcttacttaattcatttaacatttaatgacttccagtttcctacatgtcgttgcaaatgacaggattttattcttttttatagctgcataggactccgttgtatatatgtaccatatttactttatctaatcatctgttgatggacactaaaggtgcttccaaacttggctattgtgaacagtgctgcaataaacatgggagggcagatatctttttgatatatctttcttttggatgcatattcagcagcaggactgctgaatcatatagtagctctatttttattttttggggaaacttcaaactgctcttcatagtggttgtatgaatttacattcttaccaacagcgaaagagcattaccttttctccacagcttcaacagcatttgttactggctgtcttttggataaaagccattttaactagggcgagatgatgtctcattgtagttgtgatttgcatttctctgatgatcgatgatgttgagcacctcttcatatgcctgattgccatttgtatgtcttcttttgagaaatgcctattcaaatattttgcccatttttaaatcagattattagaagtttttcctatagagttgtttgagctccttatatattctggtcattaatcccttgtcaaatgattattttgcaaatattttctcccattctgtggtttgtcttttcactgcgtcttttgattggagtgtttaatccatttatattcaatttcattactgatgagtaaggacttactcccaccatttgttatttgttttctagttgtttaatggtcttctcattcctctttcatttcttcttatttcccttttctctggtgttatttgatttcttgctttttatattttgtatatctgttgtatgctttttcatttgcaatcaccataaggcttgtgatttttaaataaattattatttaattggtctcttttatagcctaagcatctgaatatttaaaactttccaggcagttctaatgagcagacagggttgaaaacttctgttctaacaaatagctgaagttgataaaagaataaaaagcattttgaagtaaagagtatggataaaatttctcgcttagtaaaacctacttatcttatttctatcaattaactcttaatcaactcagaatacatgaatgtatgaccaaaaactcacttgttcaccaaatccaaaaataaaacactaagttattttaagagtgaataaactggcattgaacaatgccttttcactggggcaaatgttacttttgattaaccctgctggaacacaatattggggcataattatccacagctaaatttactttaactaaaactgtagacattaaaaagaacaaaaatattgaaaattgagtgatgatcttattgacaaaaattatgtgctttgagttgaaagtatgtagcttaacaaaaattgaaaaaaaaattcctctccacagaagacaggaaataagtatacttctgaagcacattacagagtcaaacatgattcttgacacattgtggatgcttagtaaatttaaataaattcatcattatcctgttataatcacaggtatcaaagttgttttgataagttcaaggtagatacaggtaaatttccaaatagtccatatgcagagatatttaagcgtatgtaaagtccatttccacttttaagcaaaattatgaggaggaaatcagcacaatcttccatggaatatccttgaaaatgaaatcaatatacatatacttattagtgctaattttgctctcgttcataaaacttttcagtgcaagtttcaatcacattacttaaattgagtagattaattggattaagtattaagtagcctattttatacagtcttatatttttcatatgtttcagatactttcttaatattttaattttttcagttacaaaaaactgctgaactcggaaaattttagagattaaataattaattacatgtataaagaccttgacaaatgtaaaaaaacactataaataaggtacatgttacatttaagcaaattatgaagagtaaagtctttctgtttatcattgaggaaaactgaacaaattataaacacacgtttttttctcaagttatacagaccatagcattttgttttttagtgacttattttctgtcttacaaactgccacatatttgacatttagctatttcttgctactgtgttctttcacttaacatgaaacaaacaagaagcaacgaaagaatagcatgcatggattcagaaatgggatttaatcagcttgagaaattgcagatagttttacacaaagaatcatggacactaatggcaaataaaaaaagcttcatatagaaatcctgcacaaaaagttttgagtcttcaattgctctcatctcttgtaatttgaaattcaatgttgtattgaaataaagcctattcttcaaatgtagaaagaaatacattcaaaaatctacttcaaattatgggttcaaatttcggacaaatattcaaggattatgtaactacacatatattattttcatttttaccaaaagctttaaagatgttagggattagtacctactattcattagagaggacttagaaaattaaacatctttgactccctctgaatgcttaggttgtgttttaatatacaatttttaaataagtgcccaagagttttgtaatcataaaatggaatggaaaaagtcaatatttataaattatttttgcagatattcttataaactgggataatttgcaacttggaaaattatatttaatgtaactttctggaaaaataagagtgcctttttgaagtgggggcattgtaaactataggaagtggtctcttgtatattttttttaataaacaaaaactagtctatgaaaaaacaaacacagtatacctcacctcattcactaatttagaagttactttagttatagctgtaactttctattaatcagctgttcgtctcaagaccggatagtaaatgcatgtctttcagacattagattctgaatgatatagatgaatagaacattgatacaattggtatatcaaaatataaaatttgagatatgaatctataaaactctttccatgatatagtgtttcacattgtcttcttgctaaaggaaatttcaaatttcattaatttgttatacactaaaacataattaaaatattttagcctacaaaatacttatccaatttcaaaattaaaacagatattacattttctgatctaatggtgactatttgaaatgtgagttgggaaaatttatatttctaacaaatactaaatatattgccttcaaaaataattcaataaaatatctttgagttttcaaagagttgttttcatgaaaatgaggataacaattctgtaataactttcttttctctactatacagcagtctgtattctaaaataatttaacaccatccaatcatgagaacaccgtccagtcatgagatagaagtgtttggaaaatgtttataaattgatttcatcagtaattgaagataatagtcacattaattaatttaacattttcttttagaaactatgactaaaataaagatattaattattggaagattaaaaatatgttttaaatttttaaatttaatattctcttcacatatttcatttttgtaatatatatgtagagtttctggttttacttctataaaaaacttttttataataattgaagatatattctaatttttaaaatatatttcaagaaaatgctcctgtaggcaataataaacacacaacaaaaatatctctttcttataagctgaactctccaatgtcaagtggtaacaaagaacaaactcttctggcttaaagctgtttctcaagaataacttaaactaagttaattgtgactgaacaatttgtaaaattgaaacagtgttggaaataattagaatatatttaccgtgtttgaactttatatctttagtggcgtcaaatacatattctgtgtgagggtttacagaggagattcctcttatataagagtttagaattcccttaagagaaaattattatgaaaatacctcatttattttatagttttattttaatttacaattaacaatagtaaatatggagtacattgtgatgttttcatacattatacagtgtgaaatgatcaaataaggctaattagcttatttatcttctcagatatttatcatttatttgtagtgagaacatttaaaattctttcttttagctattctgaaatatacaatatattaactatggtcatcttgctaaatttattcttcctatctaactgtaactttgtgcccattgtgtgaaactactttatgtagaatccttatcaacctgataagcatatattcagctattaatttaaagtatcagtaaagaagtttttcaagtgtaagatatataatagagaaaaaaaagaaatcctccagaaacataattttctttcatgtgaacacgtgaagaatttgtgacaacactgtccttgtaaataatttttatattaaacaaaactaattttgtttgcaaatgaactgaactccaaaaatacattttcatatagatttatagaattatcaccaattattactcttcatatttatatatttatttcttattaaatttcaaaaaaatatatgtaatgtatatttaaaagattaatattcctaaatggccattttatatttgttatgaaaaaataaagcagtgaagatcattttcttttattggttttttaaaagagtgacaatttagaagtagaacattttaagttaactaacacaatattgcctttattagcaagtgatggttcaatatgttatgtctgtttaacacatttttagttgcttgcacttttgacttgagacatttgttaattccgaactttcttgagctactattacatgccaagcattgcattagatataagggatgcaaggaagattaaagtatagcacttgattttaggaatctcaaggtgtcatggaaggagctttatatacatacaaacactgggatcctgctgtaacaaggaaatgactcaatacttttgataatgtgttagtgtccagtaaagtctgcctaattatgtatttgtggtatcttcttctaagatagttctgtagctcttattcatattcaaattatttgagtaatataaaaataaaatttttatttccaactaatattagagtaaaactttattgatactcttataatataatctgtgttcagtcagagagaaaggcagagggaaaagaaagggagatagaagaaaacagatgaagatgatataaaaatacttattttttttctaaaactagaacatattttaacatgcatgtcattaaattcattctccaaagactgagaagggaaataaatcatatgatttcatttacacaacccattctgttgagaagaacttactcccaatagattctacacttgaaatggagcaattctttttagttttaagacccgagaatactttgctctcttcaaattaaacctttaaagcaaagagtatgatagtaggcattgtctgcacagtaatatgtacattaagtgttgatatgttacagttgagaggcgttggggcaatgaatagttagagcataagcctttattaaaaatacattaaagtaaaataaaaagctcaatgtgatgaatttgttgatttcattcaattaatagttgatttaacttgtattcattgaaggaatatataaaggcctcttaatatctgcatgtcactctggtaaatgttggaagggaaaaagacgtcctttatgttttgaggattttataatttaatgagagaagacaaacttatcaagagccagttgtaataaatgacaatataagcaccacaaatcactatttttttttacaaagtagtcgtaagtagatatatttggagaaaatatctcatgtaaaaactcaaaaatacttctctactatattagtgcattgcagaagacaactggaaaaagagggattgtaatttctcgttccacgtatcctactagtggacgatggggaggacactggcttggagacaactatgcacgatgggacaacatggacaaatcaatcattggtaagtgaaagtcaccatctttattattattttgtgttttctattagatactcacttttgctggtgctaggtcataacatttataagtcctcagaattttgttcttcacatcgtactttatgtcatatagcatcagaaaaagacagtgggccaggaagctggattgagggtgctgtgtagaaactaatgatcttcaattagtttattttgaggaaatggtgtcattgttattggcctgagtttccttactgaaaagggcagtagctggcaaagataaggtctagagctaatagagagaaatgaatagaaattctagatttcatagctattattaaaaagtcaaaaaataacagatgctttcaagattgttgagaaaagttgacatatatactgttggtagtagtgtaaattaattaaactattgtgaaaagcagtatgatgattcctcaaacagctaaaaacagaatgaccattcaaccccaaaatcccattagtggttatatacccagaggaatagaaatgatcctaccataaagacatgcacaagaaggttcattacaacactattcacaaaagacactcttcgacaaagacatggaattcgccagttcgctattcaccaaagacatggaatcagcctaaatgcccatgaatggtagactgaataaagaaaatgtggtacatatacaccatggaatatatacagccataaaaaatgagatcatgacctttcaagggacatggatggagctggaggccattatcttaagcaaactaacagaggaacagaaaacaaaataccacatattctaacttataactgggagctaaacactgtgtacacatggacacaaagaagggaacaacagacaccagggcctatatgaagttgtggcgtgggaggagggtgaggattgagtaacagcctgtcaagtactatgcttattatctgggtgacaaaataatctgtacacaaaacccctgtgacaagcaagttacctaaataatacacctgcaaatgtacttctgaaactgaaatttaaaagattctagattctagggaatataaatcactgatagatgctaaaaaaaaaaaagaaacatttcgaaccaaatttggaaagaaatttgtgacaatagtagaataagtgctaaataagacattaccattttaatagggaaatagatacttttgtgctctatatttagtcttaaaatttgttcaccattgataaataaattcaaggaaaacaattaattcttagaaatattcctttaaaataagagctcagaaatcatattcattgtattttatagaattgattactccttaaaggatttgtttaataagaatggttcagtttttttcaaatgatagactgaaaccagttgaacctatagttcaatcagacctatagttaagtaactgcagaaatagcatatttattttcaaaaatgaaactgtggacaccactttcttctcacactataatgtgtttataatgtatttgttgtctgaatatgtcaccttgcaagtgtcaaggaagcttatagtatcttatttttgtaaatatcataaatgctacaaagtcaaaatgtgtgagcattatgagaagcattatgagataattatattaataatctgaaaaatgtttcaggtttggaggttgatattaaaaacagaacatcatcataaatagaaataaaaaacaatattaaaatatatgaaataataactttctaagatattttttctaactttttcaggtatgatggaatttagtctgtttggaatgtcatatgtaagtagttttattccttttatcttcataaattataaacattcataaactattcaaatttaactaaatataacaatatattttagactggagcagacatctgtggttttttcaacaactcagaatatcatctctgtacccgctggatgcaacttggagcattttatccatactcaaggaatcacaacattgcaaatactagagtatgtaattactacatttactttcagtattttcttacttgggctatgcttcattatactttagtgtacatggcttggttagctggtatatttattgatgttatatataattttggagtagtgaggaaattgtctggaggaactttttttgagtatctggggagacattactaaaaattatggaagagtaggaacagttagagccaatatctaaataagcactaaatttcatgatgctgactttcagtgaagaaatgcagaaaaatgataaattagcaaaatgcgcatgatggacaggttaaagacagagctggcctttaaaagatgtgctctgcctatagtaagtaaatggcagagctcgtgatgtgctgtgaaatctacatggtccccgcactggaaacttgggtagaaatagagagtaggatttattttagaaaatgctgaaatacaaggattgtaggcagaacggaaccacgtttgaaagaatttgaaagctggacaatagagacataacttgatgaaacagtaatatctcaacaggaaaatttgctgtcaataatgcaatttagaaagctgtaatattgggaaagtagagcatgaatcaatgaaagcttggggagagattcattattgagaatatactatttcatatttacgaagtccttgctcaaatgatttatatattctaaaaagggatataaataatagaccattttatatgtaataggtcagatacaaataaatgtctataagggaaaatagattaaactaaagtgatggagttttatagagattctgctttaggaaaagtgctcagaaaggtattaaatgaaggaatactagagctgagatgggtgtggggaacagtaaccaatataaacgtatggagaattccacatgggagcaacaaagtaaaatacccaatgattgtaatgtggttggtgtttttaaggaaaattcaaatgcagaaggagggaaagactgaggaagtatttctaaataaaaatctagaggatagaaaactctacttaagtttaaatatgagttggtacaaatgaactattgaaatgtattactcgaattgtatagtttagaattagatgcttgtgtatcaacatgttaaaactaaaatcatattaatgaggtcaataagcaacagatatgatctttgccttttttcttcttatttaactttggaaataccagcaataggattacatacagcttaacagttcttggaccatttttactttcaagattttctgtattctaatactgcatataacagctatgacatgaaattttcattcaaactttcttactcttaaaatacagaaaaattggaatcatcatcgatatgacacaactataaagggccccagtcatgctgatgtcaacgaaaaacatttaaatgttacctcgagctttgtgatggccttgcttattcccctggtgcagatcaaaatacaaaatagtaataacttttcttgcctattattttttaactaatatgtgcaagaattttttttgtagacttttaatcttccactctaaactttagactaaaaattttagtcttttgagctggagtgtgcattccagagcatactcaggcacattatttcctttcattcatctttatgccttcccttctatctgtactatgtattctttagtattctttagtaccataatctgttcatttctcctgagaacccacaatgtgcatggtcaccatcatttgctctgcttgtctatgtttatttcaatcgactttggatagcctatcatttcatttatctcctacactgatcactctaacactgactatcacctaattgacaacatatttgtcatccattaaaatgtgaacttttctttgggtatgttcacttaaactaaatcaagccatggatttaatttgaatttctcttattaaaatgttgtgtaccttttctctttatcatgtgatagaaatattattgtgtaagattttgggaagaaagtacatagcacatgacaatcaattaatatcatgtcttactttttagttcttcaaatatgaatatgaatattatgacttaaacaaggaccaaagcttataactatgttattttgctttgtttcagagacaagatcccgcttcctggaatgaaacttttgctgaaatgtcaaggaatattctaaatattagatacaccttattgccctatttttacacacaaatgcatgaaattcatgctaatggtggcactgttatccgaccccttttgcatgagtaagtacaaagtttgttttctcttatcacagagagatacttttcacttaatttacccaatgatctcttatagtgcaatataaaatattttagattggcagtttttccattgttatattagcacacattttttattaataaagcatttacacaaatatgtccattaataaatagactagcataagccattaaagaatgaaccacattaattagttattaaaaagtaatgattctatttcagaataattactgtatacaaggtattgttctacatgctttgtatatgtgcttacattgactattctcaacatttccagggagataagtaatgcccctcatgatttaattaatcacggtttactgcagttacgtaaatctactatatacagatgtcttactggagaccattccaccttttccttgatgtatcccaatgagatacacaggaacagtttcaacattatccttataaatttgttttggattcacctcttaaagctcaaacttttatatgaccaaatcttaaaaattctatttcatggagcatatttgcaaaaattttcatccattttatttttaagttgaatacaatcaaattcttattgtagatattacaaaaagcaaagcatgcagtcaaacataaaaacaaaaaaaccccgaataatcacagtatatttagctttttgagcaccctatattaccagagtaattgaatgagattatttgttagatttcactattgataagcccatttaaaaaaggcaaatatttacccaaattaaaacaatacccaaagtaaatttaccaaaataagaagtgaattggtatgccttctcttttgatgataggataagcgatccagttttcctaaaacaacaacaaaagattctttctggattcaaattatgttctggttgctttattaatttatcatctaccataatcccttctttatttctgataacattttattgatctcctttttatttacagactttacccctttttgttattcttatttgcttcccaggataatggagtatcacctctgggctgagtcactagtcagaaatattattattaactatacagactgttgttctattgagattacctcggtttctactttcatgagtttatggaggtgtaagcccatctttccaattcagcattaatctcagcttttaataaggcaaaacaaaaccacaacaaaagaacaaacaaattttaagaaacagcttttctttttcatttcaattggagaagaaatgtgaacatttaatagtggctcttaagccattaaaaaacaaaacaaaacaaacaaaaaaaaaacctttgtttttcctagccatttgcatctcaaattcagaaatccattaacatgttacagagcctttaggaacatgtaaatctactatttagagagtttattaagtaagataagcaaactctttttaaaattaatgaattaaaattcttacagtatgtctcacaattttcttccagtgtttttaatatgttttttaatttgttgatcatatactaggcaaagttaatatttgtacctctattagttctcttccaaagtaatttctcatttagttgatgttacatgtccatcagaattctctattttctccggaaatttagtcatagtctagatttactcataaagtattatactgctgagcattgtactattacattccaactgatatattttttaatttttttacagttttgtttttattttaatccacaaaagtccatactacaaaatgtaatttgaataatgattttatggtattcagaagaaagttatttgttttaatttaattatttgtgataattttgtcgaggttctttgatgaaaaaccaacctgggatatattcaagcagttcttatggggtccagcatttatggttaccccagtactggaacctgtaagtcctaccacatatttttgtttacacaattttctttggtttatatacaactaatggctatttatttacattccagtatgttcaaactgtaaatgcctacgtccccaatgctcggtggtttgactaccatacagtaagtatttaaggaattctggggaattaactaaacagaaacgggtaattgtttggccctagccttttcattaacggtatgttggatttactttccacttaaaaagagtggaaagtaacatatttccggtaaattatagctgaattgaattaatccacagtgaaagagagttaatttattctgctacagtttgttatgtagtcattgatttattttagcaaataaacatggtaactacacattacatacaaaaagataattgtcttttattggatatataaaatgatcattaaaggtagtgcagtctttctaagaataatgtacatggcaagtcaagcagagcttttgtgacttttcaaaaatccacacactttaggcatgtgaactccacaaaaacaacgctataaatgattttcaaagctatcataaagacttatatttaactagattctaaagatatgcttttttaaaaagtaaatttcaccatgtatatttaaggtatacaacatcatgttatgagatatatatatagtaaaatggttactatagtgaaacaaattaagattttctgaataaatgtgaattttttaatctaaaagtgtatcatttgattttttaaaatgtatatcctcaactaccagtgttgctgatgattccatttcttgctccacctgttctttccatccctttcatttccagggcaaagatattggcgtcagaggacaatttcaaacatttaatgcttcttatgacacaataaacctacatgtccgtggtggtcacatcctaccatgtcaagagccagctcaaaacacattttacaggtaagtgaactgtttacaaagctcaggttaaattttgagatacatcatgctagcattgttaagaaatagaaagggtttgaaattttaacccatcgccaagctagtacattagcctgcctcagtaacatgaatgccaggtcagagacaaaagtgtttgtggtttatagcatagcaagaaacaggaactttatcttagcatcaggttttcttttccaccaagtcccatggggatgacatggagcgacccaggcagatgttgcacatgtaggaggtctgtgtcacaaataaggaaccccaggtttaggaaaaccctgtctttaataagactacaaacaaatctatccattatttgcttcaaaaaaaatattatcttttttatattggacagtcaaaagaaatattaagaatttttaaaaagaaaccctgccgtccaatgctattcatttttttttttactatactttaagttttagggtacatgtgcacaacgtgcaggttagttacatatgtatacatgtgccatgttggtgtgctgcacccattaacttgtctttttaacattaggtatatctcctaatgctatccctcccccatccccctaccacacaacaggccccggtgtgtgatgttccccttcctgtgtccatgtgttctcattgttcaattcccacctatgactgagaacatgcggtgtttggttttttgtccttgcgacagtttgctgagaatgatggtttccagcttcatctatgtccctacaaaggatatgaactcaattcatttttaaaacatccctgaaaatacagctcagaagacaggctgtcaatgcctctgcctatgacatataaaaatgcaagagacccatggaaaactgtcttccaacaggatattccctcttaaagtaagaaagcttcccagataaaaatataaatgaaacctttatgatctctgtctataatatgcagaaagtaatgacaacttaatgtcttatattttgaatggctgcctcaacaagatttttaccctacttttctgtttctgacatgtggaagatctagtattatgaagatcactttacgaaaacatgaaatatttattaacctgtttttcaaagacttattttttagagcagttttatacagcaaaattgagaaggtccagagatttcccatttaccccctgctcgcccacacatgcatagcctctctcattttcaacaccccccgtaaaagtagcacatttgttacaatcattgaaccaacactaacacttatcacccaaagaccacagtttacattagggttcactgttgatgttgtaaattctctgggtctaaacaaatgtatgatgacccgcatccaccactggtgtcctttagaattgttttactgacctaaacatcctttgtgtgccacctattcattgctctttcaacccgtggcaaccactgatattttactatctctgtaatattgtattttccagaatgtcatatagttggaatcatacagtatgtaacattcaatttgactttttttacttagttatatgcatttaagattcctccatgagatacctgggttgtatctcatttctttttagcactgaataatattccatttgatgaagctttttataagctttaagtcagtattgcttggaggtgtctctttcctttccattaatttgctgtttccctttctctgcctctcttcatctgtcttgtgatatatttcctgactcattatagtacatgaaaatgtagacattcactggcagtatcactactccatcaaactactaagtgtcctgctgtccaagaggaaccagacctgtttctcttctcttctttctcttctcatttcttctcttctcttctcctctcttctcctctcctctcctctcttctttctttcctttctttctttctttctttctttctttctttctttctttctttcttcctttctttctttcttcctttctttctttctttcttctttctctcttttttttgacagagtcttgctctgttgctcaggctggagtgcactgccttggctcactgcaacctccacctcctgggttccagcgattcccctgccacagcctcccaagtatctgggattacaggtgcctgccagacgcctagctaatttttgtatttttagtagagacggagtttcatcatgttggccaggctggtctggaactccagacctgtttcttttttttttaattatgtatttatttatttatttattattattatactttaagttttagggtacatgtgcacaatgtgcaggttagttacatatgtatacatgtgccatcctggtgtgctgcacccattagctcatcatttaatgaccttgtcccatataaagatgaaggctatcccagatttctgtctatcaccatttttataactgattgtctggccaggcccttctcttatttgcctgagaacctctacctggatttctgtttctctccttcagcaatatgtccaatttaccagggacaatggatctgctctgtcttctcagactgacataggtgtaaatctcttattcctgtcacagtctttatttccattgcaaaattccttgctttgacattcaaattctagaggaccctgtctctgtttttcttctctttttatgctatatcatctctcttggtgatgtacatgctgacagcccctgttggcatgaacagaatcttctaatctactggacccacccaggtccatttctactaatattctatcctgacatcagttaaagaggagagacattattgcacctgaaaagtgagggcttcatggaggagaccattcataaggtgtgccttgaataatccttatttttttatgagagagaagacagatcattgtacagtatagaaagttgtaaaactctttctaatcacaagttttagtatatgttgggaaattgcaggttaagccatatttttgatgtttctaaattatatttaaaccccagtgactgtgaactgaaattcatatacatattcatggtaaggtatgttaatatatttcactggaaaatatctaattactgtggagatttgaactctagagattctggaaattttaggagacttccgtggctgtacattcttcaacatttgtgattagaaaaggcagacagctaaaacaattggtctggtaaattatttcaaacaatatgaggctgccaaatcaagttgcttctcaaggattgctggagatgtaacatggaagcaagtatttagttcacaagtagccctatgcaggaacatgcttgaaaggtattctctattacagagatagaacttagaacttggaggctactttatacattcttattaattataaccagtgataactccatgatttatgtatggaaatatgaggaaggcttaagtcagaaaagattttaaaatgctattaaaattgtttcatgtttaatggttaatgacaggattacccaagagaagcatgagtaaatatatgaataaaattaatgtggttttaattactttcaattaggccacttctgatttgttacattacatgaaaccttgagatcaaaagacatgcatcacatttcctattaaatgtgaagaattttttttttgatggagtcttgctctgtcaccaggctggagtgcagtggtgcaatctcggctcactggaacctccacctcccgggttcaagcaattgccctgcctcagcctcccaagtagctgggactacaggtatctgccaccacgcccagctaattttttgtactttagtagagacggagtttccccatgttgggtaggatggtctcgaactcctgacctcatgatccacccgccttggcctcccaaagtgctgggattacaggcgtgagccaccgcacccggcctaaatatgaagaattttattgttttatatcattcctgttaactaatttagaaaaatggaaatgctttaattttcttagtctaagtcagtttgcacactccttaatgcttgggttcctatagatccttatgtggatgtcatatcataactagacatatgctattctacaaacatgggtaaaattatatatttctttcttatagtcgacaaaaacacatgaagctcattgttgctgcagatgataatcagatggcacagggttctctgttttgggatgatggagagagtataggtgagtgctcgatttagtagataaatttaattgatgtcgtattctatcacattacttttacgttatctattattgttctttggaagctgagtacaaagctattaatattattcaaggctaaaagattttactaaattcactgaatcaacttaaagagataaacaatgtcgcaaacatttaaagacttctcttatcctaaatatagtcaatccctatggtaagtgtctaggtaagaaatttgtgtgggcagaattatgtatctattatctttgtactttcagaagctagcacagtgctattcacataatagacacttggcatatatgtaaagttaacttagctgaataaccacattattatatgtgcaaaatattgatactatagtgacaaaaaggagtgacacttttcctcatttatcataagggtcacagccaacacctctataacaaagcacacgttaacatgagaaaagcataacaaacatatgtaatcatagttttatgtaaaacaggaaccttcagaataaaggcccaaagatacagagaatgctctcaggctttattcttaggttcaatgaaacaggaactgccatgtagaaatgtgattggacaaaaagtgtataagctaatggaaacagattgagtgaggaaatctagtaaggcctgtccacattcttgttggcttattaattgtagcatttcttcctctcaggtatggggtaagacccctctggaaggaggttgttaacttcttcatggccagctgttacacagaaaagcaggaaaagagagtaacatttctaggctttatagctagctttgggggaaaaggattctagtttctgtgacttgcctttgggaaaaggaattctagtttctatcactagagagtaaggagcaagagacaggagggcaggagaaggtcagagagaaactttcttccagtgttgcttctgggacctttattctgagaaatcagtttttgagcccccaaaatgtacaagtggtgcctctacaacaaggaggtagtccagaaaccaatctcaagtaaatttgatttctgtgtttttatatctactcttttggcttgtttgcttgtttttggtagtatttagcatttttttacatgaggagatatattttaatttagatctaggcttattccattcataactgttcctcaagaccatactaaacttctaaactcctagccatgtgaaattcactaaccgttgttatcagaaacacctgggacagcttgctaagaatgcagattataggactcattcaagtttcattaattttaggagaaactcagaaatctcccataggagatttttattctgtatgtaaacactgatagaggataggtttactgactgctatttaatagtgtcagtactactagatgagcgttctgaacattttgttgacacaaactttaatcaaaaaaattgatatctgtgtgaagttgacagttctctgcaatttaaataacttatccgaagataatagttttttcattaatagcaaagacatgcatcttttatcttaaaggtaaatcatagttaatattctgcaaccataagaaataatccattagtaaataagtgtaataaagttgatataagaattatatgctagacagcaagacttttgggaaaaataaatccctctttttaacattttgtgacttagaaagtgaagatatcaacacaagttagtcctttgcttttagagctctgaccttcatcaccgcaatgactgagggtctatgaagttttcagcctttccctttgtgtccagcaggaaatttgcctacaatttcccaggggtgtaaagtttaagtatgcaacttgggatctttgaatctcataattaacaaattaagttaattcatttcatcagttaggcagacaaagcttctcttagaattttctccagctcctcctatccaactacagcatcgatgacaacatttggtgtggactttaccctattcaagtttcatggcagactttttgtaatcactggaaagtacctgagcataatccaaatatttctctatgatctcctcatgcaagtataaaaaattgttttttgccaattggatctacttattttgttatgtttcacaatatcagtatatttggtataatttagtataaatatttttaaatagtcccttgaaatttcctgagttaacagcgaaaaccatatatagcaaatgcttattctctggatttgttagatcagaatctccaaagaggttttctctcacagcaaacacaacaatctagttgatgggcatccaatctgaaatgatgtctttcttttaaacaaacatgttcaaattttgtgatatattataatgtggtaacaaattatcttgaaataattaaaggtaaatcaaaatgaacttctcctaaaacttgttaacattaagtaaattttaaccattcttgattaataaagttatagcttagtaaaatgttaatttttctacttatcttaatgaaatagttatatttgtgtccttgaccaagatcatatgtgagatctttcttcctcttattaaaaacaacaaagctacccatatcttcgtaatagctgtcacttttgctttttttaactcagaattctatacttaaaagattgttcatgaaaacttaagttgtaattgtatatttgaaaataagaactaaaatggttaaggaatattgacactaatatgtcttgtaatacatattaaattagccatacatatattagcatacataaaaaagtcttaggcagaatatccattttagtataggtaaaatcaatagcaaattaattttagtgggttaatgaatacagccctgatgtgtataagtagataagagaataaaaatatcctgctttttcaatgttaccccaatacttcttttatttgactctactttgctctatcttatgtatgcttatttgtttttttacataaaaacacaatcttagaagtcaaggaagactgggtttgattccagacattgacagtaattagcttttttgtttttttacttttggcaatttatttaactgctttgaaagtcactttactcttctatacggtgggaataataataaaatatcttttagagtaaagtgatacagtatttagaatttggcaaatagtcagcactaaacaagttttacctgtaggatgatcattaaaatgagttttaaatatggcaagattatactttaaactgatggtggtggctcatgactgtaatctcagttctttgggaggctaaggcagaaggatcatttgagtgtaggagttctagacaaacctgggcaacatagggagaacctgcctctacaaaattaaaaaaataaaaaagccaggcatggtagtgcatgcctgtagttccagccactcaggaggctgaggtgggaggattgcttgagcccaggaggtccaggctgtagtgagccatgattgtgttactgcacttcagctgggacaatagagccagactttgtcttaaaaaaataaaaactaaaaaataatgattataccttaaagaggtggctataaacctacattttgccagtttaattttagttgacctgcaacaatctctaactactgaatttgttttttcaaatgacactagaatgtattgctaccatgttcttttttcctttatattattttgtcagtcactaaggtgacaagtaagtgtcgattgctatcatcactgaattctgtttattcttgcattacttgtgcacttcttgccaccttcccactgttgtgtgtgaaaattattttaaacctgttactgttttatcattacccctacacacacatacaccacctagcttgtcctcttaggaccttacctggtgactcatccttcatttccaaggctccttggattgtatctgaattagttaaataggcttagagaaaaaataggtacatcttgataatatttgctactttttatactgggaaagagaagcaaagtatacaggtatttactatggttcttctttggaaataacaatatatcacattttttttctctctctacagacacctatgaaagagacctatatttatctgtacaatttaatttaaaccaggtatgtaagattatttatatgcaattctgttaaggaatatttgaagttcacagctgggtggggtggctcatgcctgtaatcctagttcattgggaggctgacatgggaggattgcttgaggccaggggttcaagacctgtctgggcaacataatgggaccccatctctataaaaacattagccagttatggtggcatgcaactgtagtcccagctgcataggaggctgaggctagagggtcactggaatctaggagttcgagatggcagtgagccatgactgcactattgcactccagcctggcagtaatggattcacctccccttctcttgcatatttggtgactgaatccaaactttctgagcctgggtggcagagggagaccctgtctcaataaatagatacataggaaaaaaggaagaaaatttgaagttttattcatgtttattatgtaaaataccttatatcaaatgcacaaataaacaatttattatactacgaaatacatttttggttaaccgacatatttttaaagttttaattgcttttgcaaataaagtgtttatgttattcctttttctttatttatagaccaccttaacaagcactatattgaagagaggttacataaataaaagtgaaacgaggcttggatcccttcatgtatgggggaaaggaactactcctgtcaatgcagttactctaacgtataacggaaataaaaattcgcttccttttaatgaagacactaccaacatggtaagtaatgtaagaaaatatttttcaaaagcgtacgtatttaaagcatctacatggacttcttatatccctcatctgtaagaaacataattatgagtcaattatgacattcttcatatattccttttcattaggcctccatatttatttccttattactatccttagtaaactgtcatacaaatcaatctaatgacatctattttattcttattatgatacaatcacagcaaaattaacttaaaactttaaataactgttatccctatatgataaagtgcctcagaaaatacttttttaaaaataagatatctgcatttaaacattgactatgtcttgaaaatgtatttgaaaattcttgcaaacttaataaaactgtcagcacccattaatacaggagtgtgatacatatgatacagataatacacaaggaatcaggattcttgcgttaaagcatcattgctgccagtatttagctctttactttgaacaaaaaattttaggcctattattctatccaattgaatagaaaaaaatgcaagtaaatgatcaatctcttaagctccttccagttctaaattctgtgaatctatggcttgcaaaggtgaatttcaaacacatgttctagaaaacagctaactgttttaggtgttcattttaagtttaagcctacttatgcactactaaaactgtgtaaatttgtgtgcacccacccttaatcgtttaaacttggataaaaacaaagagcctttaatcagtcactttagatgaacttaaattctaaaattgtcagatgttcgactaacttgaacctaaaaaaatatatatatatgcatttggacacagtcctaggtccttgtaggtgtcagaggatgtcagagttaaacagcacctgaaagtctgttccatctttttgaaactcaacacccatcctactgctactgctgttttgttgacaagtggggttttcctttaatatggaactatgtttttcttactgcttttgcactgcaactcgctatttttcttaaaactgtatcaagaataggaaatataaaataaaatttcccaactttgatatatttaatgtccttcctcggtaaaataaaagttaatatcttagtgccttacactcatatttttatttttataatttgactgatttataaaattccagaatacctgatctagtccagtagtcttatgtgggtgacaaagaaattaagtccccaaagaaggaaattaattccccaaaacaactactcaatagttatcaatcacaattagaaatcacttttttgcacggtccaatgttcaatcagataaagaaaagacggtttggcttagataatatcttaccttttatttactaaattacaatggcgaaaattaagctcacaacttttatggtaaaaataaagcaaataaacaatgccaaataagatattttaatattttggggtgttatttcaaggtcgttttgatcaaatatgtagcataaaaacaaaccattaaaaatcatttttttctattctctttaaaaacattcacaaagaattttaagtgttgagaacaaatatttgacagtgtttcattacctcagtgatgaagaaatatacatttactttaaccaacaactctgggcagttccttctaagtgcatttaaataaactcagtatttatgagtaatcactgttttccaagccttcatagatacataggaaaggaagagaggatggtcaatttctttctccaccctgcttgtcctttaatttatgcaagagattatttaattgctctagcaatataatttcaaaagcatttttctagtaacaattatgtccagctgatttatgtaaaaagtattaaaagctatgtggtgtatttttgctttctacctttaagttaaaaaaatagtttaagttttgttacaagatggatctgttttaaacctgtctaacgaatactcaattatttaactattactttttaaattaatttatcaaatgtggtaaattaatccaaatgtgctgtgctttaaggaagattaaattttataaagcccttatgaaaagacctggtatgtggtaggtagtaaaggattcacctccccttctcttgcgtatttgatgactgaatccaaactttctgagctaaagcacagaaaatcttatcagttcattggacaaaaaggagcaatggtaaagtctcctgaaatcgtcatatcataaaactatgacagaagatcatttgactacagcaacttaataatctccatgatagagataataatctctctagagtctactttagattatctccagtgaaataaagtaacacatgcaaaattgaatcattggcaataaatgaagcatcataaaatcttttttgattgagttaaaataacacttttaaatctaaactttggctgaaaatgactggataatacttgacaaagggatgcattgagattcatgcggtgcagttataaataactccatatttcaaaattatgtgaaaagagtaaagtcatagaaatcaataaaattggctgagagttttgggtttttcagtatcttttgacagcaacttcacctttctgagatttattttaaccttaggtaaaatggataggttgggtgaaattgttgctgaaatggttgcaaactttctgagagtaaaaatttctcaagatataaaagaaaataaaggtatatactatttattagaaaacttttttgaaatagcattcatgaaaataagaaaaatgtggttgtgattaaacaactaattattattttacttttttagatattacgtattgatctgaccacacacaatgttactctagaagaaccaatagaaatcaactggtcatgaagatcaccatcaattttagttgtcaatgggaaaaaacaccaggatttaagtttcacagcacttacaattttccctcttcacttggttcttgtactctacaaaatatagctttcataacatcgaaaagttattttgtagcgtacatcaatgataatgctaattttattatagtaatgtgacttggattcaattttaaggcatatttaacaaaatttgaatagccctatttatccttgttaagtatcagctacaattgtaaactagttactaaacatgtatgtaaatagctaagatataatttaaacgtgatttttaaattaaataaaatttttatgtaattatatatactatatttttctcaatgtttagcagatttaagatatgtaacaacaattatttgaagatttaattacttcttagtatgtgcatttaattagaaaaagagaataaaaaatgtaagtgt

SEQ ID NO: 93 - DNA, 8336 bp, Homo sapiens
agggtcactccactctgggtgtctcatgccatgtggctgcagtatggggttctcattggaccaccgtgacagtgtagggtggatgtcattcctggaaactgagcctcaagctgggttctccagcaatgccaccaccccccaccaaccctgatatcctccgaataaactcttcccttccttggtcagcgagagccagcgtctgctgcttgcaaataagccactgagacatcaggaaagctgctcacagaattacaatgaaaatcagtaataaataaaatgtttcttaaatctttagaatcaaggaaaacctgagggatacttggagagtcgctaacagcaccccaatctggcagttgtagctctgcagggtgggcccaagctggcccagaccctcaccctccaagggccacactgggggctcactttctgaggagtgccctttggaaacgtcccaggaacacgtctagtgggaaaagagaaaagttggtccatcgaggagagtgttctgcataaggggagagatgagaaggtagccttggccagaggaagaaacttcattacaaccagctctccttctgcaagggaagagggtgaagtttgagtttgtcttgcaggaagacaatcaaactaaagaggccaacaccagcttagagccgagcggccccctgctcagagcttccctgtggctctcctccatgtgatccagaaggagggactccagtgtgaactgcctgttccagaaaccccatcagaactgcctaacctagaaaaccaaacaggaggagctggcaccagggctccaggctgaaagctaaatccagcggcagccagatggagacaatgtgccatgtgactgctgactgctcagggcaaatgacaccaggggttagcgattagaagttcacccttgactgtggcacctcccttcagttccgtcgacgaggttgtgcaatccaccagtcttataaatacagtgacgctccagcctctggaagcctctgtcagctcagcctccaaaggagccagcgtctccccagttcctgaaatcctgggtgttgcctgccagtcgccatgagaacttcctaccttctgctgtttactctctgcttacttttgtctgagatggcctcaggtaagctctggtacctgcaagagtttcccatccccagggctggggacaatggggctgatgtgagtctcggatggctgcctccgtgtcccaagggacgaggaacaagcagcaggaaagcatcccgtggttgagtggcctgcagttggcagaaggcagcaggcaagccctgccaagccttcagggtctgtgagccgccaaggagtgagcctggcagggtcatggcgcttgtcacaggcagctgcctgcatccttgtcctggacatgtagacagtatcctatgtggatgagattgctgcttcccctgcaagacgactcctcacactgagaggccagcttcctatgcagagagaggggccggccccatcctcagcccacgtcactgggtgcagcctcctggggtgccctggtacaggtgaggtgctgccgccccacccatcaggccagctcagccggtgccttggactcacctcctgtgcaggcaggcggtcctctccctctcctgagaaatgcatccacattctccaggttagcagtctccccagtcaataggagggggcttcctgtgagccaggtgtatgtcagcttctctgggccaaagcagccatgaccctgacatgatggtgggacgtgcaggaggaatcgggaacatgttttatcccagccctatccttgttcacacgagtcacatggtgctaagccttggtttattcatctgcagaatgaggggctgggaaggatgatcctgaaagcaagcactccagttcagaaagtctctgtaagatcctattgtaagtttctctaggccatcactgtatccagcagataggcttaatttattccaattatgcctcagtttttccatctgaaagctgagtacaaaagcattctaaatgcagaacttttcatgctgccagttgctacaatggattttgtttttttgtttttttttttggtttttggtttttggtttttgtttttgctttgctttttttttgagacagggtctcactctgtcacccaggctaaagtgcagtggtgtgatctcgcctcactgcagcctctgcctcctgagctcaggccatcctcccacctcagcctcccaagaaactgtgactacaggcatgcaccaccacacctggctaatttttttatttttattttttcgtagagataaggtcttactgtgttgaccaggctggtctcaaactcctgggcacaagcaaccctcctagttcagactcccaaagttctgggattataggcatgagccactccactcagcctaccgtgtttttttgttttgttttgttttgtttttttgagatggagtcttgctctgtcacccaggctggagtgcaatggcacaatctcagctcactgcaacctccacctcctgggttcaagcaattctcctgcctcagcctcctgagttagctgggattacaggtgcatgccaccaagcctggctaatttttgtattttttagtacagacggggtttcaccatgctggtcatgctggtctttaactcctgacctcatggtccgcctgcctccgcctcccaaagtgctgggattacagccatgagccaccacgcccagcccatgtttttttaaaggaatagaaaatattacttcatgccatgtagtaaaagtagatgctatttaattacacccatatttcagtttggggtgtgtgcatatgtttttactgagtagcagtgagaaatttctttctgatggtggttcagtccaaactcaaaagggtttgaaaggcactttgttaacataaagaatttttgttttcagtctattatatctaaattgaattatgagaagctattctcgagccttcccagtcacaactccctcctacccccaagaataatcactcacttgacttttatggtggtaacttttcatattctttacacttttgccacactaattaatattcaggttgaatagtacagcttggtttgtgcacacatttctattggccagtaggtgcccttatgcctctatttctacatgctgaaaagttgcatcaccggatcataggctatgcatatattcaattgtattggacaatgccaaactgttttccaagattatttacaccaacttgcactcccacaagcagtgaataagagttcctcttgctctgtatccttgccaacatttgataacatcaattatttttaaattttaaccacctggtgagtgtagcaatagctcactggagttttaatctgcatttccctgataaataataagttgggcccttttatacatagttacaggcaactgggttattttttgtaaaatacctgtttgtcttttgtccatgttttcttttggattatctgtcttttcttattggtttgtagttctttatgtattttctatgcaagccttttgtcaattatatacatcacaaatatcttctcttgctttgtgttttgatttttcactctcttaatggaaactttcctagaaaagaggcttttatcatgatttcaatgtagtcgaatgtgtcatgtctttttccgtaaggttactgcactttctatcttgtttaagaagactttctttacatcaaagacatgaagatagtccccaatattgtcttctaaaagcttatcctttttctttttacatttagacttacaatccatctggcaatggggtgtgtgtgtgtgtgtgtgtgtgtgtgtgtgtgtgtgtgtgtgtggcttcggtatgaagtaacggtcaagttactttttttccccaatatgaatatctgattgtccagaaccaactttttttttttttgagactgagtctcgctctgtcacccaggctgtagtgcagtggcacaatcttggctaaccgcaacccctccctcccaggttcaagggattctcctgcctcagcctcccgagtggctgggattacaggcgcctgtcaccacacctggctaatttttgtatttttagtagagagcaggtttcaccatgttggccaggctggtctcaaatacctgacctcaagttatctgcctgcctctgcctcacaaagtgctgggattacagccatgagccaccatgcccagcccagaaccaactgttgataagactatttttccccactgttctgctgagccactactattctacatcaattctccatgtatgcatgagcctctttctacactctatcttattccatttggacatttttctgtccttgtgccataagcacattgccttaattacagacgctctacacttagtcttgaaatacagtaaagcaagacctctcaccttttttccaaatgtgtcttggctattctcggccctttgaatttccaaataaaatttagaatcactttgtcaaattagaacctctggggattcccatggtatttggttgaaccagaagattaattttttttaaaaaagtaatcttcaaatgctttaacagagcatttccactcatttaggtcttcttcatttcaaaatgtttcaggccttcataataactttttttatgttagtagaatgtgatgttcctgcttttgtttcggtctttctctcaaatcttgacctagtaattctttactgttggttctctaatacctacaaagtgcacatgtgcgtgtgtgtgcgtgtgtgtgtgtgtgtgtgtgtgtgtgtatgtcagatattctagctgttctttttgggctgcctggtccacaattattggaaaacaaaaaccttcagaagcatttagattacactaacatccttaagaagcacgtaagagaaacagacacaggcacagcaatatctaacacaaggtgaaggcaaatgtcatgaaaatgttaaaggcaagtgcttttaaaaggcccctagactgaaagcagcatagactgctccaacaggaaggaacctcaatattccagaccaaaggttgtaaaagtatggcctctggaccagaagcttcagtgtcacctaggagcttgttttaaaatgcaaattatcagccccaacccagacccactcagatgctgaggaatggaatgtgatcttgtcacccaggtaatgagcatagtaccccacagttagttttccacactcctctgcctcctttcccctctagtagcccccagtgtctcagtgtttagcccccacttataactgagaacatgtggtacttggctttcttttcctgtgttaatttgtttaggatattggcctccagctgcatctgtgttgctgcaaaggacacaccttcattcttttttatggctgcgtagtctcctccgttttaaatttgagaagctgctgcctagagaggttgagtggtttgcaaaagatcacacagtagattagatgtggaacacagaatgtaatcaaagtaccctctcactaactttgctgcaattccttttgtgtcccataatgtactagatcctggaaggtaatgccagaaattagttctggttatgcaccgtgacaccacagtcaaccagcagtgtggtgaagtggaatgagaactgaagtgagatcaggaggcatccattctggtccggggttggtctttgaccagctacatgctctggggacatcactggaccttgttccttcatctggggagaggatcacagaaaggttgaattaattgagttccgaagtccatcctggctctaaaaagctacatccatattaaatttgggcctcctctgcttaatcagcatatatacacccaaccatttgattactgagaagaacaatcaagaacaaagatgtataaaccttctcgatttcaaagtgctttcaaatttatatgctcagttgatctctctaataacagataatcacttggagaggttccatctttcgcagtgtgggttggagtaggcatcctctaagtatctttccagcactgggagcctccagtgcagggagactaaagcagaaagtggagactttggcagagtctagctggtcatgatcttacttgaggtcaacattatggcgagattattaaaacatagtacaatctcagacagcctcattaggaatcagtcagagaaaaagaatataagctggcaatcaagagactgtgttttgtatgaacaaatgagtggccttggcccaagatgcttccctgagtactgggatgggagaaccagagtgcctctcaattcccttccatctccacagcaacacaaaaaaactcttcttttctcattctcctcaatgcctggtttccgggcccttcccaaacctcttcattctcctgtggatgtgtttaagttggccaatagacttcccaacgtttgaagcctggtatcaatacagagtaccttctattgaaatgaagttgaataaaacgttctgcagtggtaaaaagattctatatctgctgttcaatgaatgcagcacccactagccacatagtgctcgtgagcacttgcaatgcggctagggtgatttcaattaacctaaaagagaacagccacagggagcatgtggctgccatattggatggtgctgctttgagaacaaaatgagagaaatgaagcctctatttaccttggttggcggaacacattgaagggactctgtattgataccaggcttcaaactttgggaagtgtactggccaacttaaacacatccacaggagaatgaagaggtttgggaagggaccagaaaccaggcattgaggacaatgagaagagtttttcaaaagtggaattactgcaaaaagtggaaaaatagcctttggatggaagttactgatgagacaatttccatcggtgtgaaagccatctttccaacagagatctgcaacatgagaatgtactgtctcctagggtagcgatggcctcttgtattagtccgctcaggctaccagatttatcgtttaaactgcccataaacagaccaggcagtttaaacaacagaaatttatttcctcgcagtcctggaggcaggaagtctgcgatcaaggtggaagcagggttggcttcttctcaggtgtctgtccttggctggtagatgaccgccgcctccctgggtcctcacatggtctttcctctgtgtgtgtctgtcccaatctcttcttataaggatgcaagtcttatggatcagagcacaccccaatgaccgtgtttaacttgaatcacctctttaaagtttctctctccaaatacaatcaccttctgaggcactgttagggcttcgacacaggaattcttttcctaggggattcagttcagtccaaaacgcctaccagtggagacttgcaacatggcggcctgctggtccctcgccaggaatatcacaggcgactgttccctgttgcatggaatagaaggctattccagagtactgtctctatttatcagatctgggatactgggagaagggcaaaataaagtccaagtagaaaaaaaaactatgaaagttttagagagtaaccataatttcagcccgatgtgaaacgatcctagatttcagctgaaatagtgatgtgggaagtgagggggccgggattcaaggcagagggaacagcgtaactgaaggcatggaaggagggaagtgtaggctgtgtttgaagagtggcagctgcttccacatttctaaaacacaggatgtgattttggggtgtgttgagacaaggcagaaaacttgtttggaaaaataacttgaattccctgcacatttaaaatctctcagcagaagaaaaccccactcagaaccccactgctcattccttggcttgtatttggccacagctggcatagccccagactgagtaagctgttcagacacctcatttcatgagtagccccaaagatcaatcatgggccaatttcttggaagagaagactctccggtgttttgcagttatttgttctgctttcgcgagatgttctcaaatcgttgcagctacaagccatgagtctgaagtgtttgtgttccctccttacaggtggtaactttctcacaggccttggccacagatctgatcattacaattgcgtcagcagtggagggcaatgtctctattctgcctgcccgatctttaccaaaattcaaggcacctgttacagagggaaggccaagtgctgcaagtgagctgggagtgaccagaagaaatgacgcagaagtgaaatgaactttttataagcattcttttaataaaggaaaattgcttttgaagtat

SEQ ID NO: 94 - DNA, 13621 bp, Homo sapiens
ggatgaagctggaaaccatcattctgagcaaactattgcaaggacagaaaaccaaacaccgcatgttctcactcataggttggaattgaacaatgagaatatttggacacagggaggggaacaccacacaccggggcctgtcgtggggtggggggaggggggagggatagcattaggagatatacctaatgtaaatgacaagttaacgggtgcagcacaccaacatggcacatgtatacatatgtaacaaacctgtacattgtgaacttaaagtataataataataaaaaaaggtaaaaaaaaaaaagtagacacatactataatcaccttgaaaaaaaaagaaagtctttcaaagagataaaaaattccatatactccacttcctacaattctggcagtttccaaatacttttacttatgtgaaaatgctatcatatccaagagtgcctttagagctaagctaacagtaggctactgatctttagcacattgctttttctgttgtgttattcagggggctttctcacatttatgtttccatttttcacatttcacaactttctttggagcacagatatttcaggaagattttagagcctttgaatagcattatggacttttttgcattaatttttacttttacaaaattgtgctaaatattatttctgttaattagtgagttttgttgggggccccttaaattggaaccccaggctatgcctcatttgcttcactctggtcctggccctgagagaggaacacaaaagggatggttagaaaaacaagaacaaatgagcctcccagaattttctcaaacaacaggccagttaattaaggaaagtagatattacatagctaggtataatgaacatgcagtcagtggattgtctcagtaatttatggagataaccaccaacaaaaagtgtatgtgggtggggacaaaagagagacaacaaagtactgcaggcagaaagcttccttttgctgattttgcctcacagaattgagagtttgttcttacacacaagtttaatgccaccttcctctgtctgccatggaccaacaagcaatatatgctgagttaaacttacccacagactcaggcccagaaagttcttcaccttcatctcttcctcggggtaagtggctttaattttcctttcggcatttgtatgtcttccagaattagatcttcctgttacatttatggctttaaatcattgctttaaagatgagcagtagttttatattaatgtttaacgggtgttgcatggcttgcctgtagataatcacaactttgggaaaaaaaatttaaacctcatacatttatttttttcaatcaagttagcatgaaaagcaaacatcacttgtcttactgagccttggttaaaagactctgaacactttaggctaccctgggcacactgcctattggttacccctgctctacagggatggaaagaaggaagaaagaaagaaagaaagaaaagaaagaaagaaagaaagaaagaaagaaagaaagaaagaaagaaagaaaggaagaaagaaagaaagaaaggaaagaaagagaaagaaaagaagaaagaaagaaaggagagaaagaaaaagaaagagagagaaaggaaaggaaagaaagaaaaagagaaggaggaaggaaggaaggatggaaggaaggaaggaaaaatattttacatgtatgaactaaggaatatttaagacacattgcaaacttgctgtaataacaacctacgttattccaaattcctctacaaaatatcaatactatgattaagtcccagtgcattttcatccataatattcctttcagaatacaacgtgtaggccagttgcagtggctcatgcctgtaatcccaacactttggtaggctaaggtgatttgcttgagtccaggagtttaaggccagcctgggcaatgtggcaaaacctcatctctacaaacaatacaaaaaaatagccaagtgtggggcacgtgcctgtggtcctagctactcgggaggctgaggtgagaggattgcttgagcccaagagatcaaggctgcagtgagctgtaattgtgccactgtactccagcctgggtgacacagcaagactatctcaaaaaaaaaaaaaaaatatatatatatatatatatatatatactttttatacatatattttatatattttatatatatatatatactttttatacatatattttatatattttatatatatatatataaagtgtaggcttaatgagtaacatacttcactctctcaagagaggggaacactttctggaaaaaaaatcatattcaagatcaaagatttgaatatcattactacctgatagtttctagtttgaaaagtatcacagcttagaaagagacaagccacaaaaatactcgagcatatcagtaacgaacctacttaccatttgttgaaactggcactttcctgtgtctctgaagagttagcattctgagtgaaagaagcggggaacaccaatgtgaggtaacacatgatggatagcatggcctgtggatggatgggaagaaactagaaactgaggcagaaaatcagcatgaaattattatgacacattattattttctgatatctaactgaatttactatcattgataatattacaattgtttaccaatctgatattcattccatgtcatgccaagcatttgacttgtgctgttttaagactgtttaagttttaaactattgaattctcaaagttttaagtcaagaagaaagtcttagagccgtcaattaagtttcagtataattttcacataagagtagaggaaatcagagggttctaataactatagggaggatttggttgagtaacatttttttttaaagaaaagagtaagtctttcttttcctctattcatatctagcaaaaggtggaaagtgggcttttgtcagaaaatgaatatagaggtagtgagactcttcccaaatgttgctatgatcccaaaccaatggatgcagaaattttttctacttggattgtaataattatcctataaaatgtcattctgagagtaaacctgaagaaaaaataagagtagaataaagccagagcaaaatatgtgactatagaacactggtctgatattgaatgacagtaaaaccactattggtctctggctaaactgctgaggctgtggtcactctgtagcaagcacggtgattgtgtctaaggcagtcaacaaaaccagaaggagagatgtgagtgataaccgatcttgcttatggccaaatggccaagggtttggtctgttagaaaagtggataaggtgtttgcaaaaatgcccctagagtttattcattcattaaaaaataagctcctactctgcaccaggcatgctgtgaatacagcagtgaacaaaatagagaaaattattttccttcatagagtttatagtaaaatagaggcacacttgtggaagacagtatggcgattccttaaggatctagagctagaaataccatttgacccagtgatcccactactgggtatatactcaaaggataataaatcatgctgctataaagacacatgcacacgtatgtttattgcggcagcattcacaatagcaaagacttggaaccaacccaaatgtccatcattgatagactggattgagaaaatgtggcacatatacaccatggaatactgtgcagccataaaaaaggatgatttcatgtcctttgtagggacatggatgaggctggaaaccatcattctgagcaaactatcacaaggacagaaagccaaacaccgcatattctcactcatagtgggaattgaacaatgagaacacatggacacagggcagggaacatcacacaccagggcctgttgtggggtgggggtagggagaagggatagcactaggagaaatacctaatgtaaatgacgagttaacgggtgcaacaaaccaacatggcacatgtatacatatgtaacaaacctgcacattgtgcccatgtaccctagaacttaaagtataataaaaaataaaaattaaaaaaatggaggcacaccatcaataaaataaacaaataactaagtcagtataaaagatgagacggtgttaatgttattgagaaagatttgaatataggatttaactttcggggagggtagcatatcaaacagaataatcaaggaaggcctccctgagaagatgacattgagtcaaaacctgacagaagtgagggacaaagacataagcccctgagagagaagccttctaggaaggtgaccaacaagtgcaaacacatcgaaatgaaaacacgcctgtggtattgtaggaggcatctgcgtggagagtgagcgtatggaggccagatggggtgagggcaaaatgtgaaaccactattggactctggctaaactgttgaggctatggtcactctgtagcatggtgattgtgtctaaggcagtcaacaaaaccagagagatgtgagtgataacatccaacagaagtgggcgccagcttaaatagggacatatgagccattctacagactcagatttgcctgatgaaaagccattggaaggtttagaataatgaaatgagatgatttcacatactttttaaactcaaatggagaacagccataggtaggtatttccagatagctaacgtccgccggacccctgtagtgattcattgtaacttcattaattctaatgtcacgtggtgccacagaaacacagtacaggagtacattcctcccagacacagtacactccactcaactccttacattttagcatgaatgaataacgatttttaaaagtcaccaagttgccttttacctatagttaaaaaaaaaaaacaacttttagaaaaaaagaactgctgttcattgaacagttaccatgtgccagacactgtgcccagcatttagaagaattgtttcatataatcctctccaaaatattatgacatagataatattccacatttcacagatgaggaaatctgtgggttatgaaggttgaacgtattttccaaaataacatgttcacattcagatttgctagatcggaaagactgttcttaatcaatgttagcctttagtaatgaaaattactaaattcatgttagtaatagaattaggctgggtgcggtggctcacgtatgtaatcccagcactttgggaggctgaggcgggtggatcacctgaggttgggagttcgagaccagcctgaccaacatggagaaacccgtctctactaaaaaaaaaaaaaaaaaatacaaaattagccgggcatggtggcgcatgcctgtaatcccagctactcgggaggttgaggcaagagaattgcttgaacctgggaggcggaggttgcggtgagctgagattgcaccatgagcctgggcaacaagagtgaaactccgtctcaaaaataaataaataaataaatagaattaagttaacacttaaaatagtgactatacagagctttctccactagacaaacaaacttagagtttcaaggaagaaaacggtggggaagagaagagacagaaaggtgaaataacgtacatatataaaactggaaggaaagccatgccagtgctgtcttgggcttattgactgcatgtagacattcttgtatcacaccagctctcattagaagttctaggccaatattaccaagcttggtttcctcacattcagatatatccctggggccttggagtctcctctaggtatctactcctccctgcccccctccactgatacagcatgtcctaaatagtaccagacgataatccatatgttacaaccctgaccccagtgtattatggttcctcccataatctttgatcacatctaacgctactaaattctatctcctcagggccgttttagagagagctgattcacttatatcagtgtgagcatcctaatgtgagagattatcaggtctgcaaactggactgcacaacttaatcctcaaggatactgtaccattaaaagtagaaatggcttcatggccgttctgaaacatataaagagactaaaggataatattatagtatatctgatgctaaattttttaacatgtaactcatagcaagtaatcacttacatggaataatattagaaaaaataaaaaggaatagacaatacaaataaatcaatagcttcagataaattagaaagcctttattcataaaagctcctagctctaataatagaatttataaagtaatttataattataatatatctaatatgttaaaaaccaaatgagagcagagggagacttacaattaaatcagagataggggagctatttaggcacaacttctagcagtgtaactgagcaatatactaccagaataattccttatcagagttgatttaattttggaagctatatcccagtgtttctccaaaatatttttataaatctctctttattttttttctattaattcatgttttcaaagatacagagcaaaatacattgataaagttgcgattaatttataacatttcatcaatataatcataacttttgaagaacatgggagattcattatatagtaattgatgtgattacagagaaaagcagagatatctgacacttggtttagactatgcgatgttgtagacataagcgcatgttatgttatactagtgataatattgaaaaaggtatgcagtcacaaaaccttatcccttgatggcttgggatcccaagttggcttagacccaacttggagatgattgttctagacaacagcaaagcagaggattccatgtccaagaatagaatttctgtataccaccagcacctaacatggtacttggcacaaaatagagagagcctcaaaaaatatcttgactaaatgaaggtcttccttcttggacaaaatgctttgacttacttcatacattaagacatgcacttaatttttgtatagcacttggcaattttcaaaacatctttctatctatctcatttggttcttacaccaatcctttgtatacacacatgcataagcgttcatattttatcaatgagcaaactctgttggatctgagaacccatcttgcaggactctacttttagaatgatggatagaggttgttccctgcccccatcccccaagctgaatctaattgtccctatgttatcccaagtacatttttgtgccagatgtactccactgagttaaccaaggttttttgtttcgtttgtttgtttgtttttgtgtttttctttttaacttttcagatgtctgtcagggttcaccttggcatcaatttgccctgaaacttagctgtgctgggattattctccttgtcttggttgttactgggttgagtgtttcaggtaagtggggcaccatcatctgtttcataatacttactctacttccattacgtatcttagagcatctctgtaggggtgggttgcccctacacacctgtgggtgtttctcgtaaggtgggacgagagatttggaaaagaaaaagacacagagacaaagtatagagaaagaaataaggggacccggggaaccagcgttcagcatatggaggatcccgccagcctctgagttcccttagtatttattgatcatttgtgggtgtttctcgagagggggatgtgtcagggtcacaagacaattgtggggagagggtcagcagacaaacacgtgaacaaaggtctttgcatcatagacaatgtaaaggattaagtgctgtgcttttagatatgcatacacataaacatctcaatgctttacaaagcagtattgctgcccgcaggtcctacctccagccctaaggcagtttttccctatctcagtagatggagcatacaatcgggttttataccgagacattccattgcccagggacaggcaggagacagatgccttcctcttgtctcaactgaaagaggcattccttcctcttttactaatcctcctcagcacagaacctttacgggtgtcgggctgggggacggtcaggtctttcccttcccacgaggccatatttcagactatcacatggggagaaaccttggacaatacctggctttcctaggcagaggtccctgcggccttccgcagtttttgtgtccctgggtacttcagattagggagtggtgatgactcttaaggagcatgctgccttcaagcatctgtttaacaaagcacatcttgcaccgcccttaatccattcaactcttgagttgacacagcacatgtttcagagagcaaggggttgggggtaaggttatagattaacagaatctcaaggcagaagaatttttcttagtacataacaaaaaggagtctcctatgtctacttctttctacacagacacagtaacaatctgatctctcttgcttttccccacaatctcaacataatttggctaccccaatcttagtgtaaaatcaatgaataaaaagtcatgaaacaatgtttctaacagtcagtccatatccactttggataccagcctttcatatttgtcttcctaactgccctgagagtcatcacggggtattatatatgtggcccaagaacttttgaaaaaaatcacaattgatgataacaaagaaaagaaaaatttccagttatttatggtttataatgtacttactaaaattccagattgcagtagacaatctctcccttggaacaggcacaattagactcattttgaagatgataaagttcaggtgagactgtaggcaatttaagagcttaagtaatccccttagattgacttacctagtagatacaggcaacctaatggctgtgtgagtccacctgttttgttttttcttatttgtttctgtatgcttcctgtaggtgagatcttttttttttttttttaccacttcgctaatacttttattttctgtccatattcaagcgtgttgagattatctagtttcctaaagtaacaaatataatatatccactccaccacacatttcagcatttaatactcttgtttttccttatgtactagtgacatccttaatacagaaatcatcaatagaaaaatgcagtgtggacattcaacagagcaggaataaaacaacaggtaattgtgtggcttcaatttcctaagaataactgttaatatttggtagatttcatgtgttaccttaggcacaattcataacaatccatatgttaagatattcttatcattctgcttttctggattagaaaattgagacataaaaagattcaacaacttgctgagggtcacataagcaccaagtgatgaggctgggaattatatgtaagtggtctgacttatgagcctaaggttttaaccagcaaggcatgctgcctcatgaggagcctctgctaggatactccactgttgataggaaatatgtgaaatatctgattattttagtgagctgttaagtttggtctgaagttaattgatagaacttaaacatagaatgaattctttactatttattatatttcctcaccatgcagccacattagtcttgttccagtgtgtgttaataaaaaaaggtgactactgttgagtgactatagtggaatatgatctgtgtgcacattctcacagaatggaagttttaagaaaacctgaaagtccttctggaaaattctatccaatagatcacattaagtaggtaaatacatcgtttagcaattggaaattttcttataattttttctccatggtatttcttattaatttagtgaaaataattatttgctatgcattttgtgcatcatttaaagtcagtactttttacatgagttttatattgttgcctgtgcagtgaaacaggcactggtgatgaatttaaggaaactgagaagtagtgggaaatatttcatctgactggctggacttaagttattctgtctctcactgtcttaaaatgtaagatgtggcagtttaaattattctgatggtgttttcctattttaatattttatgattccatttatgctcaagataactggtcactaattcccaattcttggtactagaatgaacagtaggtctcaaaaatctcaactttataacaaattcattgttctcacagtgataatcaaaaactttgagcatttataatgacctgtgtgtgtgtgattggttgtggtgtgtcagggataggttagaaatataacatttatttcttatttctgttttttactttagagagaccgggtctcttaaactgcccaatatattggcagcaactccgagagaaatgcttgttattttctcacactgtcaacccttggaataacagtctagctgattgttccaccaaagaatccagcctgctgcttattcgagataaggatgaattggtaaatcattaaataaaataccttaataaaacttaacactttctttaaaccatattaatgtctgtgcattagcccaggggttttatgcaatggaagtgatgactttgacttcacaatttgaatgactacatggatatgtaaacaaataattaaatataaggtgatgaatacaataatagaaataaaaacatagacagaaatatcacaaagaaggaataattaatgctgacgacgagttaggaaagacttcagagatgaggtgatgcttgaactaggttttaggggatcaaaccaggaatagataagcagattcaatatttttctgttccatttatagatacacacacagaacctgatacgtgacaaagcaattctgttttggattggattaaatttttcattatcagaaaagaactggaagtggataaacggctcttttttaaattctaatgagtgagtattagatgagctaactttaatattcaatttatatcaggtttacactgcaaggtagtaacactgaagattgagttttgtagttttaatttggtttaaaaactcaagaagttctgaataggctaagaacatggatgatttcaaagttggttggaaagttctatatatgaaaagatatcagctctttatgagaaaatatatttttatctgcaatggagttttaggggacaggaaatagactaacttatttgaaacgggcacattaaattaaaaatagtgattatctggagaccactggcacacagaatgtcttacgttgtatttttcaaactgtgggaaaatatacattagtaggtaaagagaccaatttagtgggtcacagctggcattaaaagaaaagaaaaaatagtaaatatcagagtgtggaacccagacacccacgttgtgacaaaaattgcagtatatttgaaccactggtgtgaaagacagaggtacttgagacgatgtgatgaaaacatgtctaacccacaaaagagctatttgctgttttctcttcagtgtgacatgcttttgtcttgtgtaagatggtcaaaattaccatcaacgtactatgaggcatttgcgacacaggcaaatttcatgttttagcagaattcatggataattttgcagaaaaaggcagggtgttttcttccctcacaagcgaaaatgtataggccttcaaccacatttctgtaaagaacttttaatgagtttttcaaaagagataatataaacagttatatttaatgagtctgtaaatgatttagtcaaattggcagaatttacatttaaaatgtattttccgtcactcaaaaaacaagaggttaaaatctaaaacataggagaatgttttaagtttgtctacattatcctaagataatttattaagtatggaaagtattaaacactgaaagaaatgttggctcaatcagcaaagttttgacattatatgagccacattctaaaatattttataaagtgtaagattttaaaataaagatgatttaaaataagtgttctggactagaataaatttatgaaaagccaaacatacacattatgtttaaaaacatctctcttgatttttatattgctttctgggggttattttcaatattttatttacaaataaatgaaagtaggtttgctattaatttatttttatctttccacacatggtattggtgaattagcatttattaagtatagtttgtgtgtgtgtttcttaatggggtcataatgcaaaatgtttattttattgtggttcacagtaaaaaataaaatttgaaaacattgaaatgtgaacataaatatgtgtaaagtggatggaggaaattcagttgaacttttcattttattctgaggagaaagatgatgctttaagataatagtgatcaggtaaacctggaaggtatcacgttatagtagaaaaagcaccagttagactctgcttttatttgcaaggcaaggaaagaaagggaagaatcataatttttttacaggattattttgggggctacaggagacaatgttcaagagctagccagatgtctcatcaaggaaggcctgtaaaaccactgagggccttttggaaaaggaattgttgacttggccagattggcatttaaaaaaattaccctgataattgaagaaacaattaaaagggtggaagagataaaatatagggaacttttgcaatagcccagttgaaagaagttcttggtttgactagaaggttgggcagtaggaagaaatcagacaagcagccccaagaggctacatgagaaaatggaacaaaggactaaagaaaagctgtgatggagcccagcatgctgccaccacctcatccgtttgagacaaataggagagtcttgaactcacaccgtccttgcaactcaaccccaatacagcctgtccctttgtttgaattatatcatcacctcctacctgcagtgagccacaggactcatgtctgtttgaaactaatattatgtttctgcagacacctgttcacctctgtttggaatgagaatgaaaggaacctctgactacataaccatgaactgagccactttttctcactgcttccaaattctatagaccctgaatatccatcatgcctctagatatttatcatatttactcagcacatatttttgaagtattgccacattttcatatttcatctccatgcctcccctaaatattaggtggctatagcctaaatatttaataaaactgtggctcagtaaagttaggaaacatttttaatgtgacctgttagtagaacaataagaagactgaatccccagtttccaaagtttctttctttttttaatgtaattgtgaagtttcttgttagagggattcttttccaatgaagatgaacttggaagttccagaggtttacattagctctatcttaaaagttcataccattatatttgtgaccgtgtgccttctttgtttaatagtttatcattctactgcttcctgagagtcctaggaaataatggctaagtgagaatagctctgagaaaatcataaatgctaagacagacttttcttttgctccacagcttagaaattagaggtgatgctaaagaaaacagctgtatttccatctcacagacatctgtgtattctgagtactgtagtacagaaatcagatggatctgccaaaaagaactaacacctgtgagaaataaagtgtatcctgactcttga

SEQ ID NO: 95 - DNA, 28435 bp, Homo sapiens
gacagtaattcataactttatcagatgaatttttattgggggtcactatgctccaggtcttgtgtggggcactggagaggcaaagatgaaacctccttgagaaactgtcagagtcatgtgacaattcaccatcacataatgaacaaagtgctctaagatctgagaagacgaacaagtattctctgggctgggggtttgtccttccggcaagagaggacggcaaggtcaaaggcagggaattgcatgggtgtttggtggtgcttagagggcactgggaccagtggtaggagggcagttggtggtgaggctggaaaggaaggcaacggctcgattgtgggaggccttctaggcctccagctctgtggctgaagggagaaggtgaatgctttgtaggctaggggatagcatgatcaggtctaggtggtgcaagatggctctgaggcagtatggatggcagagcagcaaggccccacacctgctctagggggtgtgccaaggggtcttgaccccaaactgactgagtccctggagcctgagcatgtggacctcagatatgcagtggcagaaggcttccaaactgtgaaggaaccggtagccaacaccatctacacttccagatggtgagcccatgacttacttaaagaagcttcctgttatcagtgggtgggcactcgcaaagaggctctgttcatcttgtgcctacaagcccagatccagtcaaagagcacgggcatgttctccttccttccttgagggttggcctctttttccgtgggcatagccgacatcagagccagcgcccccatatttcagcatgattaagccttgccattttgggggtggctgggggcgaggggaggggctactgtgtttcaaaatggaataaacagaaaagcaatattgaaagaatgaggaggttgtttactgaggcttgaagagatgacaggtgtttcctcccagttgagaaccagtgacccctgggaatcgcatttcccgctgagcaggcgcccatggcgggctgagtcctgcccatgccctggtggcctggaagcctgcatgggcgccgtgcaaagatcaacgttttccagaggagcttttgggctcatcactggcctggggagggcttgacacggggttcccacagcttgccccacaccaccttcacacccacacacagcaggtccccgcggggccggtgcaggctgtggctgcccgcgctgcgctgttgctctgtcccagctggctagctccgagtgtggagcgctctgggccggggccgctggggcgcgcacagtggggtgacaggcggcctggctgcagaaacgttgcaccggtgcctgaggtgggaggatgtgatgacgcggcccacgcagcgggaacccaggcctttaaaaagcccaggaaacagcctcagctcaagcggtggctccactggaggaaaacacaccccggtctcacattaaagaagccaaactgtcggcttcaaagagaaaaggcaacatcctgtcacaggccatgctctggcaaaaacgtaagtggtttggctgtggctgtcagacccaagcgagtgccagcggggcagggcgatcacagcttggtctggaattggggagctggtggtggaggtgatggggccacggggggagggggtctgggttccaagccccggagcagggaggggggaggtgggcgggatggagcctggtggagaaaccagcctgtcagaggtgatgctgattttccaggctggaggggaacgaactagtgttccaaggtgggacggctcagggtacctccgcttctgtgcatgaatcactgtggtgaagaaagggcagtttatgattcacacaacaaaagccagatgtgggatgggtttggggttgggagggaaaagccatgcagttctttacaggaggggctttatttccataagcagtggctcttcagccttctgttgaattccctgggcctgtttctagctgagtgacttagctttctgccaggtgtgacttgtccctgtggataccctgggaggagtggagatctggctcggtgaagcgtgtcctcacttgctccactgtcttgcctttcgtcattctttttccccttctgtgacaaggcttgtccatcccactgcaaaggatgcagtgggtttatctttggccttgatttttatccccggagttggatgaaacaattgtgaactttattttcctttatgtggaccaaacagcgacttaccttactaataactgaaataatacagattatttacaacattcttttcacgaggtaaacagcgtcaactcatcagcttctgagagttgaaccttattggggctagttctatacttcctcaagcaagaagaatgaccaaaaattgctctgtctttctcttaaagattcttggttccttaaaattcgttttaattaattttagtatgctgtgcctcaagcaagcttaatataagagaatctagatttacagaagaagatatattagggaatgtttttattttatggaaagatacttgattggatccactaaagttcggaaaatataacttcattgattaaaatgtgacactgtcatcaccaatttattgtttgctttatgtcttatgtaaatttctctggaattaagctgattaaccagtaacacagaagagtgatttcaaaatttctcaggttgtgaagacccaccattgtttgatatcaaaaggtcaattttttaaaaaaataaagagaaatgagctttaatttgggtttgagagttatggactccttccaagataactaggaatattcaagaattgttggcacgccactcttcccaacaggcgatggagcagcggcagcctatcctttctgggacaatggcagctgaccctgttgtgagtgctgtgtggatgagagcaggtgggcattcatctttttactgggggcccctaagcatctgtgtgccctttcactcagggctgaatcatttgatttttgtgtgagcccctggaaggagttttgcctcagctcctaccttctatgagcaagccactttcctttttctcaatccttaggttttttgtatgttaagtgggggtaaaaatcatatccacactgaggatctatccttagtaagtgaggtgccaccgaagtcatgttcattgctctgtctgcatcagcctctgagatatgagttgcttccctgcattcaccatctgccatattctcccctcttggttctgtagtacattttttcatttctaattccttctaagagatgaacagactttttttgtttgtttgtttgttttttgagacagagtgttgctctgttgcccaggctggagtgcagtggcgcgatctcggctcactgcaacctctgcctcctgggttcaagtgattctctcgcctcaccctccctagtagctgggactacaggtgcccgccaccacacccagctgttttttttttttttgtatttttagtagagatggtgttttactatgttgttcagcctggtctcgaactcctggactcaagtgatccacccgctttgacctcccaaacaggtgtgagtcactgcacctgtcccccaaattttttaaaggggatgctggagggcatgcttcctgctcacaccctggagaccagtcagatagatcaaaactccattgtaagggagaccacattgtaagctcatcaatggaataactggggtgaatgtttccacatgttcagatgaacacaaatcaaaattatcttgaattgtcctttaagccttaaaggaaaagtaggagagaccctgggctctggacccacccccttagcctgaacccaagtatgtggtatagagggcacctgggtgactaaaccgtgtgggaaaatcagtaaaaacagggcagcatgtcagcccacttagagtcacccgatggaagggcagggtttgaaatcagacaccaagagtgctgaaagggcactttcttttttcagaaaacaccctcgaggcatgagctgaaatgactgtactatggggttctggaaagggttaagaaaacattcactttgtgaatgttacctcctccctacctagcccatgaccctagtttgtggactaaatgtgaaccctggcttttggttaagattagagcataaagtgacaaagcccagaactgctggcacagagaagtagaaatcttcaagccccaaccaatggatttgagatttgcttgatgggccaattggatgaagaagtcactccatctgtagattctctccctgggttctggacttggacctgctggtcaggtgcacatgtgaagaattaccatccctccccagctagtaacagtgtagtggaaatagcaggaaccttggagggagacaggtctgaaagttgcctgtgcaacttagttctttctttgtgagaaggaaatttccattcatttccttatctgggaagtggggattctaatgtctgcctcccaaggtttttgtgagaattaaagtagagaatgtaggtaaaatgatagcaagtttcctgataagtagtggtagggatgagttagtaccttccgtcctggaaaccacctgtgggcccatcttgaatgatcagtgttatgttaaattcatatattcttttccacactttgattagaatagttaaaaagccacagtctaaatattcttgggtgataggatattgcaaaattttccaagggtctaaaatagtggtctgcaaactatggcctctgtgccaaatcaggcctgccactccatttgtaaataaagttttattggaacacagctctgtctatcatttgaatattgtctagggctgcttttgcagagttgagtagttgtgacagagactgtgcagcatacaaagcctaaaatattttctctctggcttataatagaaaaacattgccaacctctggtctgagatgatttgcttggttcttcaggcattcatttccttaagatactcagtatcaggccgggtgcggtggcgggcgcctgtaatcccagcactttgggaggccaaggcgggcagatcacgaggtcaggagatcgagaccatcctggctaacatggtgaaaccccgtctctactaaaaatacaaaaaaattagctggggttgtggtggcaggcccctgtagtcccagctactcgggaggctgaggcaggagaatggcatgaacccgggaggcggagcttacagtgagccgagatcgtgccactgcactccagcctggggtacagagcgagactccgcctcaaaaaaaaaaaaaaaaaaaaaaaagatactcagtatcctggggttgtacattgccaacaccaatgggaaataaaacttgcagccaattcattaaataatttgtacaatgccccaaactgatttgattgaatttcttccttaaaagtgatagaactgtgtataataaactgaactccatttgttagaaagtgaacaaattggacagttgctttttattgttgttgtttgtattagggaacaatctacatgctaatgaaaggcaggcttgactgattttctttggactggctgattgtcttggtgtcctgtggacttggccttggaacaggaaataattcgtatcagattattatgtcatggatatgcctttgctttcagacaacttgaacagagcagagatttagcaaacagaaaaattaaggacttaaaattctcatcaacatagaactctgctcttcagatgtactctagggttccactaaagagccaatattgtttgggaggcagttaaagataagtaaaatgtgtactatgcatataatttttggaagcctatctcctacataaatttaagcacaacttacaatgagaggtaatttaggtttctggacaacctctaatatttctattctatgttacaacctttgcttatttaataagcctagtgagcacctttacttcttaccaagttgattccattgattcagcagttctttttttgagatagagtcttgctctgtcacccaggctgcaatgtagtggtgcaagatcagctcactgcaacctctgcctccaaattcaagtgattctcctgcctcagcctcctgtgtagctgagattataggcacatgccacaatgcccagctaattttgcattttcattggagatggagtttcactatgttggccaggctggtctcgaactcctgacctcgagtgatccacctgccttggcctcccaaagtgctgggattacaggtgtgaaccaccacgcctggccaattaagcagttcttgctgttaagggcaagtagaatccaaaagagagacacaaattcacgtgcactgtctggaggtgaaataaaggacaaacatcaaccaaatacacagatttaattggtaaaaaagcagatgatgttcttgatggatattttacttcctgccccttatatttatttactaaagaaaatgccagatttgtccccaaagttactgactcagaagttttgaaagctctctcccaattcacacttgggattctgttctttcatgaggaaccaaaaaaaaaaaaaaaaaaaatcaagtttgcctacagctgttcattaaatatgtggacatttaattcataaagaagtcttataaatatttgcttttaactttcccattacaaagtgttttttccccctttgacatctttctaaagtagtttatcttcccacttaatgaagatgtccacctatttcttattctgagccaaccaaaccaaagttggctaattgattatgaacattaacataattctcacctttatgaaatgcttaataacactctagttttctcatttttgtagaactgcttgacaactaagtgagcctacctgggatggggaggccttctctgaaaccctcttgtcccgcttgtgtgatactggggacaagcacttgtaggcaggagccaggggttttactttccattctacagataattagatgagagaccttaagcaagccacctaaccactttgggtctcaaatgttctagtgctggaatggaacttgccttttcctggctaattttcctggagattgaacttgattgaggttctttgccagctctaattgctgagttttcctgagtgtttatacaaaaaataaattaaagtttaaaatcagaagtccttaatttaatagatgggattcttctatctgcttagggcagtgtttttataccttggctacacactggaatgctctgaggagatttaagaaacacagatgcctggatctcaacctagagcttctgattaaattgtcttgggcattgaaggagagctgcaaatggctcccaggtgagaaggctgagaactgctgacctggaggttgaaatggatggcttctaataaacctttgggcattgctaagagcagaagaatgctcaatccttttaacagtgataaacaaacatctctggggaatggagaacttatttggtgctatgcagtatacaaaatgttctgttggatcagtttggattacatttgattgctggtgaagagacctgaaataacgtagatttaagtaagacagtggtgtcctttctctcacataaaagaagtccacagtagggtgttcaggatcttatggagtctcacagtgccaacatcatcccaggctcctttttcctttctaatctgccatccttggcatgtggctcttgtcctcaagatttttttcatagttgccattgtaactccagccattacatctgtgagcatcacatcttcggacaagcaagaagaagaaaaaggaatagcaaaagatcatgcctcctgatcgctgccccttctccctcccaacacacaacttctgctgacatctgatgccatttctatctacaagggagaatagcataattgtttagctgggcacattgccaccctccataatgcaggggctgttagaaaggaagggaaggtggatgttgagtgtaacaactgccagtcttcactatgctttgagtgcattatctcatttaatcctcataaaaactccatgaagcagattctgttgtaaggttcattttatagatgaggaaactgaatcatgaagattaagttagtaactctcctacaaagcaaaattcatgtgaacagacctcaagtgttggcctgctaagctgtcctgtctccctgccacagtgcctgtctctctcacattgcttaggaagtattcttggtaaaagcacaggccttccatgtcagataagggaccaatggcaaaaaaaagccctgcagatggtagttcataccatgagaacccattttgtttaacatttacttcagcttacctgttgaagaaaacaaggtctctgcttgctgctgggcctcttctgcgggacagtttgaagatattttagctataataaaaggctcagagaaggatctagagtttgcccccaaataacccagccctactcttttctgggcagttttagtagagagcccgatgtagcaggcagcctttgctgggagccaaggcttctgcctccgtggcacttccttgattctgaactttctagactttggaaaagtcaggctgctccttcatctctctctctctctctctctgtgtgtgtgtgtgtgtgtgtgtgtgtgtgtgtgtgtgtgtatttgtgtgtgtttaggtggggtgtggagagtaagatgtagagagtagggtttaactttgagttagagagtgacacttctgttctttctttgcctttagtagttaaagcttagcttctggggcaggcagatctgagtttgagtcctaggtttatgccttactggttgtgtgacactggtaagtcctttttcctccttctgccaccatttctttataggcatgcaccagaggtgtgactcttaccttatgggattgtggtaggggttttctgctgtgcttggcattaagtaaacactcaataaatattagttgctattattattttcccattctgtcacaatctacctctgaagacaaaggttatgccggctaattttagattacaatttgtatgtcctctgagttctgaatttcttgtgaaatggcagggcacacatctccagtcttgtaacttgtggtgggttagtgatcatggttacttctgatgattaatctgaccattctgtgatcaaacttggaactcgcgtcacaattttcctaccgaccttgtaaggtagggtggcggcaagacttgtactgactggcaaactcgtgtttgtttttttaattcacaagattggactgagtgtttgtaatctagttgtgagcagaatgacacttgaaatatgcaagaaatagataccgaaaactgaaacaacaatgtgtggcctccttttcttagtaacagtttcattagtaccactttctgggaagagctggtcaccaaaagattataaaccagaatcattctcagaccaggtgctgggacaaaaaaggatttgaccagtcttaaactgaattactttttaatgcactagaaagagccatacatttcattggaagacagcaagcatacaggacattgttaaaactttccaggactaggaaacgctgaggtgacagaaaggaaagaaaagaagagaggcaagagagttgacaatagaagcaagtcttaatgttggatgaaaggtacaccaattcaggaaggaaaggtatagaaggaaaatcaaccatctattcatcatcccatgcaggtatgcatccctctaagcatccatccaataatggaattatttccagctagagaaaccaaccaatgaaataaattatcttcagcagaaggtggggatgatggaatcagggaaggtgtcatggaacatatagcattgggtttggatcctgaagaatagatggtaatcagacttcttgcttagatcctggggtgtgcagatgcatcttaggacataaaatattagcactgggaagaaaatccaaggattttaggctgatgtctataacatttttgctacaaactcccttattcaaaccaaatctactgtagaacttcagtataagaataaaaatcgtgcggttttggggggctatctggagctctgattgctcatgttcccccacatttccctgccattctcactctgttggcacctgcaggcaccataactatattccagggttcttcaggtcacagctggatccccctgacctggccaatctacccctctttttagcaagatccctgctagctggtcacagagagtggcagtgagtggctgtgaaacatattgcattggtcttcatcaagctctgaagctgtgaagactatgtgttcggtctttgtgggtctcttgtgaataaagaggaggtaaattcctaaaaaactgaccaagtgacttctttctcaggcttgatactaacaaccactccccttctccaatgtctttcataaaggaatcccttgcatcatgagggccattggttagcaaagctgaacattatccagaaagctcctcttgaccagctgtgatgtttctcatgaatccattgttagggctactctcacttgcgaaggctacaccccaggccaccatgagccttggaacttgggcagttgggtctgaccccaaatacaaaactaatgctgggatctgaagagtccattctccaagaaagtggtccttacatgatggtctcaggaaaagttaagttttttcaataaagctctttagtcttgaaaagccaaaattagatattgcttgaatcaaggaacaaaaaatcggatatccatctgcctcctccagctgcctaaccacaggttattcccatcctagctcagatgggcaattctagattcaagccttgatctaataaggaaagagacagccctttcctctgctccatccctcactatggtactgccttgctatagaattggggtggccactggggtaggtggactctcctcattcaccttctggtctgggacggtaggtctggagctctgtttaggccctttctctttcctgatgccccactctcagcaaatttgaggcaatgccaaatatgtaatccaggaatctgctttgctctacaaggtgataaaactcccatctatgggcactgaagagccctcccttgcccattgccacatttctattccatatgcgatatgtgctcctaggtttctagcccccttgagggagtatctacaacatagcctcagccatggctgtgtccctggcctttaggagatacatataggttccttaaggggctgcatctgaggtcaggacaagggaatgccatcatactctgtctgcaacctaatcgctgccattcaaaaatatccaaggtttttcatttctgaagtcatactttaaaaactcacatctgctgcaaacctaatcctctggtgacttctaaagaaagaagtcttctgctcagctcatcgtatctttataaaaggccatttccagggtttggcgtctcctgtctaggattgctgtacgaaagcgaagtcttttaccagcccctctgcagcatcattggcttccctgtctcctaagtaggggtatcttgctgcctggggattccaggtacctgagggattaattccaggagcataatgaaggcaggtagagacaggcctggcaggcaacagaaggccctgggtatgctgaagacagagacattcagtatcaggatgtagctgaatggaggcaagttagggtcactgtaccaaggctacttctccgatgacagatgggccatggattgttggctgagatcaaggagaaagggctatttgttgggagctcattatgcaccaggtgtttcattgtgttaatctcatacagttctcatgattaccctttgagatggatattattactttcattttgcagatggggaaactgaggcacacaatggttaagtgatttgccaagagtcacacaggtgataagcaacataacaggctttctaaactaggtctagtcccaaactgtaccacactgcttctcaatgacaaggattttagtgttgcactgggtccttcttcctctcccagttgaagagggccctcgcttagatggaggcaggttatgacttcatcaagggtagctctagcctggcacaaaagcctctgcagatttggatcttagcaagtcacgctcgagactcagtatggaagctctgaaacctactgatttccatcttagaatctgagttccctggactcctcttctcttggtgggccaatcagccaagataggataggaccagctagtgacacacccttaggattcactcaggacctgccacttagagtgtctgggacaagggtctgctcatggtgaggcctgagtctctggccccagaccagcccctctgcactggagatccaacagtcatatctcttgcactcacctctatacagtctctacagacttggggccccagtttgctgcttgttcaagccttactaaaccaggtgtaggtggaaaccaaccaaacaaaccagaaccacttcagttctgaggcagatgcagctctgtcacagtttgtaattctaaatttgtttgtgcaattatttgattaaagtctgtgtaccccactagactagactgtaagctccaagagggcaagaacctcatctgttctgctcagcaagtacttgttcagtgaatgctctgccaggggtctcttggtcttgtcccctaccctgggacacagtgtatctgcgaaccctttctgctccggtgaccccagtttctgtaaaaggcaggcagatgcagctgctttctcaggtggacctgtccgctgtcatttcagtcgaaaaataccaaaaataaaaccttgcggggaattgtttgggtctctcagttctcgtcactcctcatgtgagaaggctgctgacaaggttctcgtggacagatctctcctctcttggctgggcaacaccatttcttggggaaattggcaattgagggagactggatcagggtagtccaagcccagactttaactggagcaaggagggttaggatggggccaggaatcatttgatgattaacctgcagtgtcgctcagagaaaaaaatgggacttgctcgggcagagacaaggcaggcagtgaggcagaagtggagtgtacttggaatcacaggtcctgggcttggttgaggacactgttacttacaagtatagtcgtttggcaagtcactgaatatctctgagcatcaatttccttctcggtaaaggaagggagcggaagaggaatacgttgtactgagcctctatctgcaatcattagtgtcaaaatctctatggaacatcatgcaaataggagtgtggtgatttcagagctcccaagagttaagaatgtgaccaggaaacacatggacctttaccacccattcattcaacagacctgagtccctgggagcagagaatgggtacaaacagccttctgtgcttgacctgatctgcaggaggctcagaggaagggaggtgtggtgtggaaggtgcggagagtgccggggaaaggatccctgggagtcttgcctgtgagggaagggttagagggccactgccacgtggaaacctctcgcactcaaggcctttggctgcccctacctgcggttgtggggcgggacacccagaagtttagggacaatccaagtaatcctgaggccttagggtgtaaatgctcaggtctgagcttggtggagaagggtggtcttctgtgggtcagtgggatcttgacttcagcctaatacaacctagagggatccctgtgactgccctgggggtccatttcctgttggctatgacctctgttaagtaggaatcacttggcccctagaccacttttgtctggggctctgtggctctaagactgaaaaaccctctgctgtcacctccaacatactttaagagtgtcccctgggtctcgttgtcagggctcttctttctaggtcctggtggcttgcctaggtctggggaaattctcagtgaccgtggaccctggttcagcctttcccaggggacctgcctatggttgatgagtgagatcttcagggctgatgggaaggaatagtcttttagaatgaggacacagggagggcacatgtcactgtccctttatcttctccacccagaccagagaacgtgaggtcagccaccatctttgtgatctgatacagacatcccagcctaccaagcaagatattacaacttattcttcagctgtccagcagccttgcaggcaacatcaaattgtacatcaatcatggttcccctttctctcatgtcttccaaccacctttaacgtcagttttctccccctgctgtctttttctcctctgtcctgggtatcatccagattgcaggatatatgagtgatgtgtttataattcctggctgcaggatcctctcagttcaaatgttagtgaatggaaagtctgcgtttacatgcatatgggatttctttgttggcctacattaaacaccaacaacaaaggtcaactaaaatatagtgtaaatgagcgggaaagcctttctgtagtgtgtcaagtccaacctttggccaaaacccaacttctttcttcctgtttggaaaaaaaatcagccattgtccatgaatggaaagaacaaatttgaaaactttgactcagaccgtaactgtaagaaaagcacccacattagtgttccagttaaagatgtgaataatcctttagccaactggagttaatgttctctagaagtccttgggccacaagtacaaacaaaattctttgcatgaaaatgtaaacaattcttttttttttttttttgagatggagtttcgctcctgtcgcccaggctggagtgcaatggtgcgatcttggctcactgcaacctctgcctcctgggttcaggtgattctcctgcctcagcctcctgagtagctgagattacaggctcctgccaccgcacccagctaattcttctatgaaaatgtaaagaattctttatacgaaagtgaaaggtgacaacgactattgtgacttcattttcagttagaagccagggcaagtttgttggccatagtcttgaattcctattgtttgattagttttgctacaaataaagagaaaatcgtatttcttctcagtggggttttttttccttgaagattcaacagcagaagatatttccattgattacttagagtgatcaacagtgtgtcactattaacggtgtgtcacatgtccttctgggctaggggcttttatcttgcaaaatggccttgtacggctacaaggtttacctgttgtttaggtaagttcctaaaaaattgaccaagtgacttctttctcaggcttgatactaacaaccactccctttctccaatgtccttcataaaggaatcccttgcatcatgagggccatttgttagcaaagctgagcattatccagaaagctcctcttgaccggccgtgatgtctctcatgaatccattgttagggctaccctcactcacataggctgcaccccaggccaccatgagccttggaacttgggcagttgggtctgaccccaaatacaaaactaatgctggggtctgaagagtccatcctccaagaaagtggtccttacatgatggtctcaggaaaagttctgtttttcataaggctgtctttggtcttgaaaagccaaaattagatattgcttaaatcaaggaacaaacaactggatatccatttgcctcctccagctgcctaactacagatcattcccatgttattcctatgctagatcagatgggcaattccagattcaagccttgatcaaataaggaaaggtacattcctctcctctgctccatccctcactgtggtgctgccttgctgatttgaggttcaaccagtcagttgtgaatggagagtactctcagtaggtgagatggtgggacggaaatgcatgcttatcctgcagcccacctcgccattagagcaactctcttaactgttatccaccctggtgcctggccctggcagctcatgggacgtcacaagaggacaatggctgggagaaggaccttctctcaagggtgccttggaggctgttttagggaatgaatggcttctgacatgggctttcttaaagttgccccagaagagaagttaccattgaccaggccctaggtgtttgcttagctcagagccatcaggagggtcttagctccttagatgagcagctcctgcactgtggtgtgaacgtggtttgcaaggtgccattaaataaacaagtgctgacaattttgcatgtttcctgggtgatattttattatactttcatcaaggaactggagcaccatatttatttaaatcagtacactccatatgttcctagcttggtgcaaagcaggcacaaatgtccacatgcagccagggtgctgactgaggtgaccagtttgcttgagttttcatactctgcactctccagtggaacagcagctgcaggactcttatttttgtgatgtggagcatgtctgggtgtgtggcagggggaactgaaatagtctctgctgactttttgtacctacagattttgtttcattgctcattttggaaaagggaagcccttataggggccaaattaatggtttttctgtaaatgattttttttccccctcaaactccattggcttgacttccagtggtatagaaaggcaatatggtgaacttctcagcccgaaaaaggagatctccaatcagggccgagaggctcatgctaaggtggaaagattttcctccgtgatggactcttggatacctacgggagacttaaaaggccctcagaccacaggattaatggtgagaaagcttcaggctttgagggtgaactacttggagttacaagttaatcgggagcttattaaaatctctggagaactctactgtgggaaattgggcttctatcttctctgctgatatcttattatttcaatctcctggtttattttctttggattttttattatgattttaagaaattatttaaaaagttaaaaatatttcttttacgtattccagtttagttgttttgaagttaattcagggatccgggatccccaaggtgaggcaaccgtgattttagacaaacttttttcctctcccaaatttgtatttgtgggctcagttctcatgctggtggcagtagggagctcagtgtttactgtggaattaaaaatgtttattgttgctgcacataggttggtgtgaaaggtaccaactgcaagtttcaacttgcaaaaacacttggccgttgggctcctttggaatcgtcttgaagcttcagattctgatatttcatgagcactttgcaaagtcactatgagaagcaccctccttcttacctgctcagctggagtcagttacagaattccttggcagctggctgtggacacgtgccgggcagtcaggagacccgtgggagctgtgggagtcctgcaacgtcaataggaagaggtggggacttagagattgccccacatatggtctgttgtgccagggcacacctgttgacactgagttccaaggaagtccagacattagagggtgatactctctgtccacagcacctccaccaagcgctctttgttcatcgacttagaaacagtaggaggcgggaagccctctcttgacaagatcctggaagtggccagctggtccctttccagccaagtgtgtggtgtgtccacttcctgggagggactgggaccaggaggcctctgagcccttcctcagaagtgtacatgcaaacaagagggggctgagccatacacctgtctctgagatggtctgagatatgtgcatatgggattgagcccttcttgttcctcagctgaattaagagggtgaccacagtgctcagacccccccaagtaaccccatttcccaaatttctcttgagtacacaatgcctcagactgtactttatgcctaaggaatagctgagaacccaactgaagacaagtgtgaactgcaggatatggttgtgaacagaactgacgtgtgcaacagcatggatggaactggaggacgttatgtgaagggaataagccaggcacagaaagacacaattctcatgttctcacttgtatgtgggaactacaaattcacacaattgaattcatggagatagagagtagaatgatggctaccagaagctgggaagggcagcagggggagtgggagtggggatgacttatgggtacaaaaatatagttagatagaatgaatatgatccagtatttgacagcacaacagggtgactatagtcaacaataatttatggtacacttaaaaataactaaaagtataattggattgtttataacacaaagaggtgacaaatgcttgaggggatgggtgctttatttaccctgatgtgatgagtgtgcattgcatgcccgtatccaaatatcttgtgtaccccataaatatatacactgactatgtactcataaagattaaaaccaaaaatgctgacgtggccatggggtgaccctgagaaagagtgagttgagtgtggcagggcaggtgccctgttcgctgacacgtcagattgtacctggggcctgtggtcatcgctgggcaccacccagcagtagggaaagtggcaaatggaacttgtgcaagagtgactcacccagaaggaaggtggggagactaaaaccatgtcatttagaaatagctgaaggaatgagaagtcccttcagacctagggggacacctggtatctgtcctcagatttcggaagggaatattactactaatactcatgataatcggagctcacatgtattaaatgctctgtgccaaactctattccaagcacttcacatgcaaatcttaaattaccctacaacatacataccattatgatcttcactttatagatgagacagctgtaaatggactaagaaatgtgagtttcattagaaggtaatggagggaaatatggcatgtgttaccataagttagcctcagtaggaggaagagctgtctgacatgataatatccccccgaaaggaaggtggaaatggccagaaggaagataattaaaaccacatgtattgagcatctaccctatgccagacatggcctttggagctccccatgtattattttggttaatcctcacaaccactgtgtgagagaagaattattattcccgttttacaaatgaggaaattgaagcccagagacattaaataaatctaagaactttccaccagtaagtgacagcccagatttgaatacaggtatgtgtggttctcaagtctactgtcattggtgttcagagcaaaggtggaggcgcacaggtggccccggggcacagaaccaggctggttcccctgctagacactcctatagcagcctgaatttcacaagttgtgacacattcatctgctggtaacttttgttgcttgtcttccccgttagactgcaagatccacgtgggcgggggctccatgggtcctgtgcagtgctgtactcctaggcactagaaatatttgaaaaaatgaatgaataccagtagagatctcttgttcagacaggggaagttaaaataaggataatgaatctcctattgggatgttatcgggagattcttatgttaaattaggaatggattatcagcagttgtaatcccagtatattttcagaaatactggacagattttttttttttttttttgagacagagtctctctctgttgccaggctggagtgcaatggtgtgatctcagctcactgcaacctccacctcccaggttcaagccattcccctgagtcagcctcccaagtaactgggattacaggtgcctgccaccacatctggctaattttttgtatttcagtaaatatgggctttcaccatgttggtcaggatggtcttaatctcctgaccttgtgatccactcacctcagcctcccaagagagatttttatacatacagattcctaggcctatatcagccccctagaatcagactttcctggagcaggacctgtacctgtatattgcatcatttcctggttgatttgctacctggccagctgagggaccttggaggatgggtctaaagtccacctgagatactgggattcctgacccccaacatctgcccctgggactcatttcccacttcctgttgcctctgcccaagcttctctctgccttctgggcttcaaggccaggccttgctcgtggctggagcctggagggaggtctggtgccgagtcaggcatgggaccttatcagctgggtatttactgagcaaagttcaaccagggcagtgctgcagatccgggtttaacagatacctaggcttccgggactttgattcagagcccaggtccctggggcccttatcggtggataataatgggctccctgtggaagtcctaaggtctagtgtttcttggctgacccaggcctgctctctgagagcccaggatccctaggccacaggctgtctaggtgggcagcttgttgcttcccagccacggctgcttttcagttgctctcccaggccaggaagggccctatgcactggctcttatttgggtcaatgctttggtttcctggctttgatggcaagaggggaaggaaaccttccctcagcagcaggtggacactgtctggccccagggtacaaggatcacccttgggtaattgtcccatgccctgaaagtcactgagaacctgggagccacttgcctcaatcctaaaggtgtaggagaggtgaagggaagacaaatggcagcatgtcttaaagaatcacccaatcgattaatcaataagtatcaactgagcttaaaacgcatgggcatgccactgggaagacatagagaaataaggtacaataactcaccttgagacgtttataatctagttgtgggtataagacacttccatcaaaaagaataactattacataatagactgaatttttttgaatgcctaccctgtacctgaatttatttgaggcatatactgttctaccaatttcccacatcaagtgacttctctcaatattcctttgataaagaaactgaagattaagaggcacagagaggtttagtaacttgcccaggatcacacaggaaggtggtggcaggggcaggatttgaggcctgtgctatctggctcagagtccctgctcttatggctgtcctctactgccacctatgatgaatactaatcagatctggaaatgtttgagaagctgtagaatgtggaaattactcaggctgcaggggtcaggcaggagggttgcatttgtcttgtgtcagcaagaatcaagaggttggaagaagtgagagggaattctgaccacggaaaacctcaaccacagatgaggaggtgagacacgcaggaacacgtagagaacacagacagaccttctggttggagacagggtttgtgtagtagggagtgtgcaaagtggtgagaaaaatgggttcggatctcattctgaagactgtccaattctaggacaaggagctgggccttcgttgtctgggtgcaggggacccacagaaggtttgggagtaggaggagtgacaatactggagaggcattctaggaagtgtcacgtggttctccgtgttcaagcacgacttaggggagcaggcagatccatgaggaaatgagcactttggggtgggggctcgtctgagaaggaccatgggctccagggacattgcttttcacagccacagctccggagcaagccccagccccggcccggccataccagggcgtccgtgtgaaggagccagtgaaggaactgctgaggaggaagcgaggccacgccagcagtggggcagcacctgcacctacggcggtgagagtttgtgtgtgtgagagtgtgagtgtgtgtgtgtgaaagagaatgtgtgtgtcagggatagtgtgagagtgtatgtgtgtgtgagtatgtgtatgcgtgtgtgtatgtgtttgtgtgtgatagagtgtgtgagagtgtgatagtgtgagagagaatgtgtatctgcgtcagtgtgtgagagtgtatgtgtgtgtgagggagtgtgagtgtgtgagtgtatgcatgtgagtgtgtatgtgtttgtgtgtgatggcgtgtgtgagtgtgtgatagtgtgagagagaatgtgtatgtgtcagtgtgtgagaatgtatgtgtgtgagagagtgtgtgtgtgtgagagtgagtgtgagagtgtgagcgtgtgtgtgagagagtatgtgtgtgagggagtgtgtgtgagagagtgtgtgagtgtgtgagagtgtgagtgtgagagtgtgagagtgtgtgagagagtacgtgtgtgagagagtgtgtgtgtttgtgtgagaatgtgtgtgcgcgcaggcagatggcttgggaggtgaccaaaaggatcaggcaggaaggagcgcaggtcccttggtggaggctgccagggatagagctagggtggagcaactgggatgagggatcagggccggctcagctggcccaccgaacacagctactgtcaaggcctgagtgagcgaatgacttgcataccctggtgtgagttgggggccccccctgagaagaagaagacaccagctccctgagcgcacagacttcctgctaaatagaaacgcaaatctctcaagtgtaggtggtgatggttgggatacggggtgggatgttttgttctaaccagagagattcctatcttctattctcctgccctgaggccctctgggcaagttctctgcacagggccggttgacgagggctaaacattgaccctggtcttctcctctcccctctaggtggtgctgccccatcagcccctggcgacctacaccacagtgggtaagagtgccccgtagccctggtggcccccaggcctctcatctgggtggcatctgaagttctgtaatttccttcttcccacaggtccttcctgcctggacatggaaggttctgtgtctgcagtgacagaggaggctgccctgtgtgccggctggctctcccagcccaccccggccaccctgcagcccctggccccatggacaccttacaccgagtatgtgccccatgaagctgtcagctgcccctactcagctgacatgtatgtgcagcccgtgtgccccagctacacggtggtggggccctcctcagtgttgacctatgcctctccgccactcatcaccaatgtcacggtatgtcacacaaaggcaggactgcacccgcccatgctgagtgcacccttttataaccagagctgacttctcgatcctgatcttccttgctattgattctcaagataatcaggtcatcagagctcgccttggtctccatggaggcctgctctgattctcatttcctgagataacttccacaaagatgtctcgcagcctctctcgtcatactttctgctcctcaggactggggaggtcttctctgattccctgttctaaatctccccagcttccctgcaagcagtgagtcttggttctgagttgaagtttttagtgaatgtggcaccaggcgagatctacatggggtcttgtgttggaactagcctttcatttctattcagataacttagggagtgattgttcacttaataatggggtttaacagaagatttctaggctgaacaacaggtgatatttttgatggtgtcagacccacgtgtggggtaattttttaaagttctgtctctactgtcagattgccttgttcaaatccctgtcccttcacttactagctatgtgactctgggtttagtgacttaaaactctctgagcctcagtgtcctcatctgtaaaatgggaataccaagaaaagggtcgttgtcaggatcaaatgaaataatgagtgtggagggcttagcacagtgtctggcatacagaaaccactaatatatgttagttatcatcatatcaaaatctgctaacattaaccaagggcttgatgggaaaggaagagcctcttcccccgggaatgaaggaaggaagggaaatagatttatgttaatgattcctgttcgactaaaggactgggaattttgcaagtattcaagggcaaaaagacctgtggttacagctgtatccagctccagtccagggaaaccgtgggaagtagagctgggccttgagcagtcccagagcccaccttcgatggtggtgcttgctttggtccaccttgtctcttccatttccctccagggtccagtgtcatcctgatgcacctgcccctgcctccaagcaccttctatgaaaggcctgcagaagcccttccctcccaggtccacctgcctacccagcaaaccaattttggagcctggatgatgatagataagaaggagttaatccaacacctctcccaggcaactcatttccatgtcagaggcctggggtgagggtggtgggtggaggactcacggctcccacccatttcattaccaaggattcctttcattatttatcccctttcatcattcccaccttctgctttgaaaggttctgtatatcaaacaaacagtattcattaagaattgatttatttgttttgccattttgtaaattaagtcatcaaagctggctagagctgtaagtccacactcctgatcagcagagataagacctgctgtgtgctgagtggaagtaattgtattcccgagcaaagaaacctatagttacaggtttatgactgggaaatgtagaatttccatctggatttttgaaaagctgggaatcatgaggctttcccggattctgtctggtttcaggacactgggatggggaccactggcttaagtcaaaggagaggaagtgattatgctgtggtggggtgtacacctcagcccggatttcaggaggctggaaggcctctgagaccatttccagctctatcattctgtgcaaaaacaccctaaagccttgctactcaaactcttgtccctggactggccacattggagtccccctgagatctgattagacatgcaaaatcccaggccccactctagacttcctgtgccagaagctgcgttctaacaagatccccaggaggttgagaaaagccctgccctaaatgattctaacagtttgctgtcaagacacagtgacagtaggagggatatatgacaggggagacagggatggtagggggagattttggcctccctctcatgaatccatgcagagagcatcctcttctatctgctttcctcaagtgtgaaagaaaagtaagaatccaggtcccgcccctgttgcaggcctgatctgaggtttgtgagggcagtcgccgtgcaggtgagaggtatgactcgcagagcattcaggagaaggactctaacacttggagggtcatggggggtgcccataagtgggatggccatggagatcagctcagagacagaggacgatgaggatgtggaaggcaccaggcagcagcaggaaggaaggccaagtttgctgacaaagcagtgcttcccccatctggggatggccaggcctccccatgctggccaccactagaggggtgggaggtgatggagctgtgttggcccaaggggacctccaaagctgttgtgtggagcccggactgtctttgtgtctgggcaggacagtggccaccttccagatacagcttccaggctgtggtttaacatatattttcacagattttaagatgcatatatttttaatgttttaagatctctgaaatagaaatgaattttgtattcaacgaaacctggaaaatcctctctaattggcctaacccaatgagttcattactgtttgtattctatttcgtagatgagaaaaatgagccttctgagcaggaagtggcctgagcaaagacatatagctaggaagggtcaggattggggctgcggttgaagtcagcctggctcctcccttggggaagactttgagcaggaggaggtggagccccatgaagtgagaaaccaggaaagggcagaattgaagggggagatggagacccctctaagggcaaggatgggtggatgggtctcctggggctgctaaccctctgtcacgtgttttcctgtcacagacaagaagctccgccacgcccgcagtggggcccccgctggagggcccagagcaccaggcacccctcacctatttcccgtggcctcagcccctttccacactacccacctccaccctgcagtaccagcctccggccccagccctacctgggccccagtttgtccagctccccatctctatcccagagccagtccttcaggacatggaagaccccagaagagccgccagctcgttgaccatcgacaagctgcttttggaggaagaggatagcgacgcctatgcgcttaaccacactctctctgtggaaggcttttaggcgtggctcccacctgagtcctgttccctgaaactgggattttaaaatgagcctggaattgagccccaggttcatgcttgtttggagtagtcatttcatgactacactttctacgcacagctagaattgtagacctgtaaaccttccttcccttcttccttcccctccctccctcacttcctccctctcccccatccttccattcttcccctccctcccttcttcctttccaaccccttccttccttttcctccctcccttccttccctccttcccttctccctttccaaccccttccttccttttcctccctcccttccttccctccttcccttctccctttccttctttacctccctccctccctcgcttcttctctctttcttacttcttttttcaattctgttccattttgggaggtaattatagggattttagcaataacattttatgtcaaatgttgccaagtctgtggtccatgggctttcatttctgtcacatttcatttcttggaaaaggcctccttcctccagtgcctgctgaaccatcttagggtcactcacaccctctgtaattttaagatgtatgtggtggccggcgggaagaccagccccgacagcacctcctgagaaagtcagccaagggcctaccctgatgccagagtccttgagctgtcagttcccacagttgctcctttgtttgctcttctcagcctcggccagatttacagtccaggcagcaaaatctcaaggcctggggctcagagtagtaaggggtgggaagtgggtggcagggagaaaagaacatcagggtgggtggggacaggccagtgacgaagagagggacagaggagggatgggaacaggctgtgcatcttagttggagagaggggtgtgggaggaagcttgagtttgatgcagggaggaggaaggctgaggaatgacttggctccagattacttggttattaagaagaacaataaactaaaggaaagcattgcttgaagagatggttttgctgctctccttgaggatacgtgcaagggaagttgggctgttgtaaacagggtgaagggtgtgtttggtcggccatttctgtctcacctctaggccctctgctggtgctgtggaggccaagaccccattaagcctaaaggtgatgggtcctcgcctaggcttagtgctaccatgtgggttttgtttctttccttccttccttccttccttccttccttccttccttccttccttccttccttccttccttctttccttccttccttccttccttccttcctctctctttctttcttttttttggttttttttgggacggagtctcactccattgcccaggctggagtacaatggtgcgatcttggctcactgcacctctgtctcccaagttcaagtgattctcctgcctgagcctcccgagtagctgggattacaggtgcatgccaccatgcctggctaatttttgtatttttagtagagacggggtttcaccatgttggccaggctggtctcgaactcctgaccttgtgatccgcccgcctcagcctctcagagtgctgggatcacaggcgtgagccaccgcacccagccttttaccatgtgggtttctttagtgtcttaaaagcgtccataagccaccattctgtggaaccaaggccccctccacgcaaacaccctccctcctggggacctctggagcctcagccagaagtaccattaggtttaattttaatttgttttgctggagaaacatcaggtttgtaggagactgagttgttagcaggtgtgcttagctcttgatagtgaacgtgtaccttgggaactggctcacccacctgctaatagcaccatcgtcactattaagcagacatttcagttggtagaatccatgtagaagtcatggacttttctgggaaatgacttttctgggaaatgacagtttctttgacatattttctttgcccactttaaataaaaactctggag
